United States Patent Application Publication US 2012/0277999 A1 - sequence listing, part 2

SEQ ID NO: 599 - DNA, 4242 bp, Homo sapiens
agtgtatccagaagctactgtcaggaggacactgtaagagaaccttggcacctctgggcccaaagggaaagacaccagtggaaagaggtgagcatctcctggaccaccctcaagcttcaggtgagctgagcttctaacactaccatcaaagcaactggaaccccttgaatttgatttctggagacgcgagcataatccttttgcagacatctcaacgctggctctccaggtggagcaccatggaaggcgactgtctgagctgcatgaagtatctgatgtttgtattcaatttcttcatatttctgggcggggcctgcctgctggccatcggcatctgggtcatggtggaccccaccggcttccgggagatcgtggctgccaatcctctgctcctcacgggcgcctacatcctcctggccatggggggcctgctctttctgctcggcttcctgggctgctgcggggccgtccgtgagaacaagtgtctgctgctatttttcttcctgttcatcctgatcatcttcctggcagagctctcagcagccatcctggccttcatcttcagggaaaatctcacccgagaattcttcaccaaggagctcaccaagcactaccagggcaataacgacacagacgtcttctctgccacctggaactcggtcatgatcacatttggttgctgcggggtcaacgggcctgaagactttaagtttgcatctgtgtttcgactcctgaccctggatagtgaagaggtgccggaggcctgctgccggagggaaccccaaagtcgggacggggtcctgctgagccgggaggagtgcctcctgggaaggagcctattcctaaacaagcagggctgttacacggtgatcctcaacaccttcgagacctacgtctacttggccggagcccttgccatcggggtactggccatcgagcttttcgccatgatctttgccatgtgcctcttccggggcatccagtagagggtatggcctgaagcctgaagactcgccccacccaccactgcccagcacccaatgtcctcccgtgcccctccccgctgtcctcttggccccaggggagaagatgaggccatcagagatggccaggagaagggccaggggaatagagctatttttttaacaaaacaaaatgaagacaaaaatatggactgatgtatcctcgcctggactcagggcaggtgccgtgggttctccagagaccccagcaactggcccaggatgcaggctgctctagagaccaaaggaacaccaggcccagcgccctctttggtccagccagaccctgggccctctctcctcactgcaccaggacctgatgccaagaaagtgaggatttaggcaacaaggaggcaaaagcaaatctcagagaagtcatcaaagcccaggggctgcacggagattcagctgccatgtctttgaggactcggaacccacagcgcaatccctggtccactggaggatggactgttccccccttcaggccggggccaagagtgagctgctaacacggcatccaagaatggcccagctggtaggatccttgctttccccatctgttggaccaaataatctcaaaggcccagagaggacagtgaccatccacagacacacagcacaggcgtgacagttctgaaaagaagctgagttgtctccaggctgctgtcactgcatccaggactctgtcagctctgctgcccacatgcacccctggcctcagcatcccggttcccccagacaagagagggcaagtcagccaggaactgcctcctccctgctctacagctaagaaaacaccattccatgacttcccaccgcgccctcgctcctacctccccacacctctctctgagtccccaggaacacacagaggtgcacatcacattcccttgtccacactgcccgcctctcccacatgccacccccttccctgtccttccccaactccccagctccaagagtggaagaaatccccaagatcatctgggtctccctctccacacccagaactgaggcttggatatcttcttcaacatccttgccaagacttctccaccctcttgcatacctccagggacagagagcttactacctcccaaggcagcctcctgcctttggactgctctgactttagcatcagcttaatacacagaagaggtttctgtttttctgtggctctgtccatggcatcccacttgcccactctccttcctggagtgttgaggtcacacattgactcccctgagccctcttctctccaggctaaagaatcccgaaggcatcgaggccatttctgctgcaacaaggtttcctgtctcttcactgtccgcacatttcttagtattccctccaggcttgggcagggagactcgcagatgcacacccacaagtattcagttctcaaactctagacgagtgttggcaactggattgcaagatgctcctaccctgatagatcaggggtggctgctggaggctgtgctggggatctgaggtttggtctgggctcagtgggagacggcagtgcaatcctgatgagtgatgtctgccaggcaccgtaagtttgattagtgatgtctgccacgggcagggatggaaggagcagtgtgatgtctgctctcttctctcccctctgtccctcttcaggaagaaagagctcattctgtctcacaagccaccggcatcctgtatcagcttccagcctcccctcaggctttccagtcaccagggacactcggagccacagcctagagccccgtgttccctggcctgtgcgtctgcccccttctgagatgcagccagaagctctgtgcctgctgcaaagattcaggtggaccctcctctaatctcctcctgctgtgcccgccagtccttgccctcccaccaggtctctgagctcagtgttaccaaattcgccctttaacagcttgctctggcaaccccataaatgacacctgaggtccgtagaagctaagctcctgagacccagggggacctgccactggtaccgcggcccagcctggggcctgggggctgcccctcttgaaccacccacatgcttagccccagctttttggaagaggcaaatggctggtctgaggatgacacacaaaaacaaaaacaaaaaacaaaaaacccatgctgggcaggactgaggcaaattgcacagctttatggctctaatccaggggcatcccaggcttctggggcccacagaagtcagagggaggacccaagagaaagggctggtcatgaagggaaatctggctaaggtgggttcaagggcagacacaagactgcccctcagcagctttctacaaatgtgccaaggaaccctcaatcagccctgattcagctcgccagccagccactggccaccctcttaggctggaaagggaagacaggcagtttctgctcctgttggcattcgctcaggctggtagctatttgcaagactgcctgaggccattccttggaggcaaggcaaagaaagctcagcccaaatcaggcttgagcctccctccagagcacagggagaaacagggtttagctggcttggtccagatacaacccacagcaggttctggtggtggctggggttgtgggggaggggtgggcagggatacctctttgtttcttttcaccccgaaatacaacagcccataacagagacttcctcggaccccactaacagggcaaggaacaagaagactacaccgctcatcacaaaccctgcctgtatcgaaagccactttcctgctctgaagctactgcctcttagagaaagggaatagctctttatgggctgggggtgagggcccctccccagggtccctgttaatttctggccttggtgctcaggcctgtccacagcctcccttgtctatgtctctatccatgcttaaggggcccggacaggatttcccaaaccagccgaggccccagcacccgccgtctccccagaagccccctcctccttcccccatgggtcatatgttgaaagtctattttaaaaactatgttccttgccgtagattgcagagctaatttatcacgtttctctcctgtgagaccccccttttatatgatatatccagaggaagttttgtaatataaaacaggacgcccacactgatggttttgcactggtttttgtgaatgtttcttacaaaaagaaaaaggaacaaagaataaatagtgaccgtgaagaaaaaaaaaa

SEQ ID NO: 600 - DNA, 2943 bp, Homo sapiens
ccgaaagagaaaacaggccgcgcgggcggcagaggagccgggcgccgcaatggacgtgcgggcgctgccgtggctgccgtggctgctgtggctgctgtgccggggcggcggcgatgcggactcccgcgcccccttcaccccgacctggccgcggagccgcgagcgtgaagccgccgccttccgggaaagtcttaatagacatcgatacttgaattctttatttcccagtgaaaactccaccgccttctatggaataaatcagttttcctatttgtttcctgaagagtttaaagccatttatttaagaagcaaaccttccaagtttcccagatactcagcagaagtacatatgtccatccccaatgtgtctttgccgttaagatttgactggagggacaagcaggttgtgacacaagtgagaaaccagcagatgtgtggaggatgctgggccttcagcgtggtgggggcagtggaatctgcttatgcaataaaggggaagcccctggaagacctaagtgtccagcaggtcattgactgttcgtataataattatggctgcaatggaggctctactctcaatgctttgaactggttaaacaagatgcaagtaaaactggtgaaagattcagaatatccttttaaagcacaaaatggtctgtgccattacttttctggttcacattctggattttcaatcaaaggttattctgcatatgacttcagtgaccaagaagatgaaatggcaaaagcacttcttacctttggccctttggtagtcatagtagatgcagtgagctggcaagattatctgggaggcattatacagcatcactgctctagtggagaagcaaatcatgcagttctcataactgggtttgataaaacaggaagcactccatattggattgtgcggaattcctggggaagttcttggggagtagatggttatgcccatgtcaaaatgggaagtaatgtttgtggtattgcagattccgtttcttctatatttgtgtgacatgttgggcagatcaagagacagctacaaaaatgaaggttttcataatgcaatgtaacatagtacttcaaagtattattcaacttcaagtttcagcaactacctacaaaagattctaaggcctagtagtatttaaactaagtttcagaatgttcccttcttgtagagagatggacaaccaaagtcagtgggacaaactccagcacagaagcctgcgaggaagcctatggaatagtttcctgtcctgagacgaaattcagattaggagatattttaggcccctgcaactggggaaggctactgtttgtttttgtttgcttattatttatttgtttgtttattgtgagatatttcaggtgggatcaaagaggtcataagaatttattttcttttgtggggtgtaactactagctttagattacccctatacacaagaatggccaacctaaaattatgtgtgtcttgtacagttagttatattagcagccctctgagatggcgtatctatcggaaggatttcaaacaccaattgctttacctgaacaaatggtgcttaccctttgaacagcagagtgaccacgtagaaggaaggaaaagggcaaaatcgcttcagttaaactgaaattaaatgaacaataaggcaactatataagtaacttctagtagcattgcctgagagacaaattattgtttgataattttcattgtgaataggaatccaatagatcatattgcttactttgttctttttatactatagaataatattttgttctctagtatatcaaaataccaaaatattatctcatattttctccctctttctcttactctttaccaagttttcctggtggcttggcttccctgactaaagaattaagtctcatttttactttccatttctattttcttaccacttggttggctccctttgtctctgtacctttaccaacattaggatctcacctctttcttcctcccttaattcataagcaccactcctatcaaagtcccatctcttaaccctgggtatcaaacaaactgtgagttttccagaatctgtttcccagttttcccctcagctttcctggtctcccatccgaactgcttctttgtgcacctcttgttctttctcttggctcccagtcttgattcctgtgatcactcttgcatcactaattgcacaagtgatttcaggtgcaattctgattagcctgcgtccacacagtgatcgatgatcctatgtgcctagaaaggacactgtgtgctgctcatgacctgcaacaggaaaaaagccatttcttgttagcagtgtaagaaccttagagcaaaggagttgaccttctgattgaatataagcacaaccatattaaatgaatcaatacaagaaaattatttctgatactatgtatgtacatatttcttctctaaaatgtatcattcttttctaatgtatatgatctaacaaaaatgaaacatgaaatgcagtagcaaccactaaaaaaaaaaattcaaggacatctaactttttctctcacttttgccctttgtttatccttccctgtgattagataaacaaaataaaaaacaaaatgctgtatttctcttcttacgccagtcagaaccaatccgaaaagaatgtgtgttgactcaggtttggagttatttcaggaagacagatattgaccttttaattgataaatattcttattatcctggaatgccagaaaagaactatgtcctgcttgtctagtttgtattcgctgactttctatgtgatatagatgcatttgtaatactctttttcaagtgctaaaggatttctaaaatttcaaactgattaatatgtttctgctgttctggattttgatgacatttacaataaaacaacctacatttgactttggtttaaaaagaaaaaaaaaaaa

SEQ ID NO: 601 - DNA, 837 bp, Homo sapiens
gctcctcctgcacacctccctcgctctcccacaccactggcaccaggccccggacacccgctctgctgcaggagaatggctactcatcacacgctgtggatgggactggccctgctgggggtgctgggcgacctgcaggcagcaccggaggcccaggtctccgtgcagcccaacttccagcaggacaagttcctggggcgctggttcagcgcgggcctcgcctccaactcgagctggctccgggagaagaaggcggcgttgtccatgtgcaagtctgtggtggcccctgccacggatggtggcctcaacctgacctccaccttcctcaggaaaaaccagtgtgagacccgaaccatgctgctgcagcccgcggggtccctcggctcctacagctaccggagtccccactggggcagcacctactccgtgtcagtggtggagaccgactacgaccagtacgcgctgctgtacagccagggcagcaagggccctggcgaggacttccgcatggccaccctctacagccgaacccagacccccagggctgagttaaaggagaaattcaccgccttctgcaaggcccagggcttcacagaggataccattgtcttcctgccccaaaccgataagtgcatgacggaacaataggactccccagggctgaagctgggatcccggccagccaggtgacccccacgctctggatgtctctgctctgttccttccccgagcccctgccccggctccccgccaaagcaaccctgcccactcaggcttcatcctgcacaataaactccggaagcaagtcagtaaaaaaaaaaaaaaaaaaaaaaaaaa

SEQ ID NO: 602 - DNA, 7506 bp, Homo sapiens
gacagaaaaaaaaatctctctttgtcttgagggggctgttgagtggtcgcggacctgggctctgtgcgttgggaaagggaagtggaggtctctgaaagaagatgaatttggctgagatttgtgataatgcaaagaaaggaagagaatatgcccttcttggaaattacgactcatcaatggtatattaccagggggtgatgcagcagattcagagacattgccagtcagtcagagatccagctatcaaaggcaaatggcaacaggttcggcaggaattattggaggaatatgaacaagttaaaagtattgtcagcactttagaaagttttaaaattgacaagcctccagatttccctgtgtcctgtcaagatgaaccatttagagatcctgctgtttggccaccccctgttcctgcagaacacagagctccacctcagatcaggcgtcccaatcgagaagtaagacctctgaggaaagaaatggcaggagtaggagcccggggacctgtaggccgagcacatcctatatcaaagagtgaaaagccttctacaagtagggacaaggactatagagcaagagggagagatgacaagggaaggaagaatatgcaagatggtgcaagtgatggtgaaatgccaaaatttgatggtgctggttatgataaggatctggtggaagcccttgaaagagacattgtatccaggaatcctagcattcattgggatgacatagcagatctggaagaagctaagaagttgctaagggaagctgttgttcttccaatgtggatgcctgactttttcaaagggattagaaggccatggaagggtgtactgatggttggacccccaggcactggtaaaactatgctagctaaagctgttgccactgaatgtggtacaacattcttcaacgtttcgtcttctacactgacatctaaatacagaggtgaatctgagaagttagttcgtctgttgtttgagatggctagattttatgcccctaccacgatcttcattgatgagatagattctatctgcagtcgaagaggaacctctgatgaacatgaggcaagtcgcagggtcaagtctgaactgctcattcagatggatggagttggaggagctttagaaaatgatgatccttccaaaatggttatggtattggctgctactaatttcccgtgggacattgatgaagctttgcgaagaaggttagaaaaaaggatatatatacctctcccaacagcaaaaggaagagctgagcttctgaagatcaaccttcgtgaggtcgaattagatcctgatattcaactggaagatatagccgagaagattgagggctattctggtgctgacatcactaatgtttgcagggatgcctctttaatggcaatgagacggcgtatcaatggcttaagtccagaagaaatccgtgcactttctaaagaggaacttcagatgcctgttaccaaaggagactttgaattggccctaaagaaaattgctaagtctgtctctgctgcagacttggagaagtatgaaaaatggatggttgaatttggatctgcttgaatttctgtcagctctttaatttctggtatttttgttgataaaatacgaagaaattcctgcaatttttaaaaaacaagtttggaatttttttcagtggagtggttttcgcttaaaggaaaaaaaaatctaaaactgcgaagaatactaaatgtagttgagaaataattgatggcgagagtttgctagtctccctccccggctttgtgctggtattccacgtattcctgcattaatattgcacacccaaaccagtctatcagggaggctgaagcaagggcgcagtgtgatattttaggaatacagaagatttagaaatacccctatttctcatttgcagtttttttttccaattctgtgctctgtcaacatgagggacctatctatgtatgttgacttttaacatcaaaattggatttgtgtcaaacattcattgttaagagaagaatgacagtatattttggaggaaataatgaatttactaattaaacctttagaatttatgacttactgttagagtctgtcatatggttagaatttttacttccgctacccctgccatttcttctgctagctacttcataatatcttgagctttactgaggaatattctcacgctctgtggtatttgaatcattttgccaggtcatttctctgtctttagtattttttgctggtgcttcttacatttaatatggaaaggtgggaagaatattactgcattagatgtaattcttcattctagacttccaagtttgttttcacttttttgtgtgtgcgtgaaggagtctgtgtcacccaggctgtgtagtgcagtggttgatcttggctcactgcaacctctgcctcctagattcaagcaattctcctgtctcagcctcccaagtagctgggattacaggtgcgcaccaccatgcctggctgtgttttcacttttctttcaacatgttcaaccagatatatagccattatttttctcagctccagcattgtttgatttttcttgagtttgattttagtatttgagataaatacttttacattctaaacaagtccactctctgtggctaacgcaaaacaaatgaaatctttattgttttccaaacagctagtttaacaaaacagcatcatacatagtgaatgatgttcattggaaaattctaaaatttgtccttgtctaggttgagaacttttacacacactaagataaagatagaaatctgacatgctcactcaattcagcaggaattacacattagaaagaagccagaaaaataaatggcatatatccaatcacaagtaaatgatcctggcgttagtttttatgattacatgtgtctcattaggcaatttatgctttaatggtcaagcttttaaaaatttgtatttgataacatcctgaattctcagtttcgaatagtgcctactggtttaaaactaaaaataatacagctttttggacatttaaccaagatactaagaaggttttttttaaaaaaagagatttgattatttttccctgctaaaaactgtaaatgccttatgttcttttcagataacttaagtctgacctaaactccagtattcatctgatgctgtaaattgcccttctttctgagacacagattataagatgccagatcataagacatcatgattttattgtaattgaattcttcctaaaaattgagaggtttccttttattaacttttaaaataaagaaataagtagtttcattacgattattttgcaaactattgccagtcagaaatgcactttttttttccctgaagttttaggagccgtcactaaaacattagtcttgtgattgttaaaacttgtttgtaatgggttggtgcaaaagtaattgtggtttttccattactttcaatggcaaaaaccgcaattacttttgcaccagcctaacaatagttgattagttagaccttttctgggttttgtattgattatcttggtgtgcatttaattatttttctgaattcttcatggataatgacatagtaattgtgattcttttaataccagttaagcagtatttggcaacttaaacttcctgggagcctaactttactatgttaagtgagtcaggtgtgctttttatttcccttgtttctcattttgccctgtcagtggatggtagatgctttgtatatcttaaatcccttaaaggatcttaaagacatccctcaggtgttctatttaacttttattttattttattttatttatttatttattttgagactgagtcttgctctgtcgcccaggctggagtgcagtggcatgatctcggctcactgcaacttctgcctcccaggttcaagccattctcctgcctcggcctcctgagtagctgggattacagttgccgccacacccggcttatttttttgtatttttagtagaggcagagtttcaccatgttggccaggctagtctcgaactcctgacctcagatgatccgcccacattggcctcccaaagtgctgggattacaggtgtgatccaccgcacctggccctaacttttaatatacaacacacacacacacacacacacacacacacacacacacacacacacacacacacacactatttcagaagacagtgtgttgccttacccagaatgagtgctaggattacaggcgtgagacagacacacatacacacacatacacacacacagagtctttattgcagaagacagtgtgttgccttataggcgtgagacacacacacacacacacacacacacacacacacacacagtctttattgcagaagacagtgtgttgccttaccagaatgagtgcttggattacaggcgtgagccactgtgcccagccctaacttttaatgtacatcacacacacactcacactcacatacacacacacacacacactctgactgtctttattgcagaagacagtgtgttgccttacccagaatgagattgaattgttttgcttcgttttgttttgttattcagtgttgcggtagcagatgcattatcaaaggaaaaatatttggctcctttaattcctctgaaaacatgagtattttgagttctgcagcacaatgactgtaggactaagctaagtctgctttgcagatatctgatcagatagtcccttcattctgtagacgtgtattggttggtccaagacacagtgagtaggagctctgtggaccaagacaaagctggactagagagtacagttcaaacttggcagtttctctaacgactctgtatagcttctggcttctactactgaaacaagagtttagatcactgatggagaggcatagtaatctgtttgtgctttggaaaaatatataaaagtttttttcccctattttttgcactttaaatctgttttgaaattagaactgatatacatttatttgaataatgtgtaactattatggatctattttaatgaacaatttttaccatttcccaagctgcctgtttattataagcatgacatgtttactataaaccttttgcccccataatttctttttttaaaggaaattaatattagtaaaataaacacctctttaatggaagctgcaaccttctagtgatccaagtagacaatagatggtggcatcacagactttatctacacactttcgggtctgaccactacctcccacaatacctagccattttggaaggggaaaacatgcggtggtctagctgtatagctcagggcttaatttcagcttctgagattgtgatgtcatatttcactctcaaaacataggctgaaagcacgaattactcaaaaagtaagcaaaccaatacctggtgaatctatggacagtcatacacatacatcaggggaaaatgtgtgtgtacaacccaaatttacagtatgattgtcattctttgactttgttttgtatagcctgactctgttgaacatgaaattattagtactctaggttttggacagcttgagttcatttgaattccttccttaggaataagtttttatatacactgctaaatgtgtgatgagaatcataaaacactaaccagctgaggtagctgtgattcactttccccccaccctaacttgagataaaatgaaggactaggcaagtatttcatgttgtgtgagtggacttcggttccttcagtattgtctaggttattgagtctttctttgcctaatagtggattcccactcttaagataacttttattagtgataaatcagtttagggtatattctgtatgacaggcataaaatgttaagggtgaatgctggccttttccaagaaaaggccaccttaacttgtatgaggaaaaaatcctaactattctcttttttgtatctttttttccgtaactgttttgattgtatattttaaagaaaccacttaatttgtgatgcacgtaatatttgtgtgaacctgagaatatgtcacaataggaaaaagcagaaattatacttaggggacatgttaggggggtaaaaatatttaagcctcgaatgttttactgtcatctccactaactatttttacagaaaaagctaaaaactctgttgtaattattgtaagtttacttatttatacttttaaattaggcttttcatacttaaatttttttgacatttgcttttaatatttgtttcttaatgtggaaattgtgtattttaataatcaaattattaggataatagatatatttttaaacattcacctcattaacaaatagatctttgaatttttattaggttttttggctccagacaactgtttagctttaatgatatttctaaattcccagtgacttattaataaaaacaggaaaaatatttaggtaatgtcataaaatttattttacctttctcattttctgagaaaataaatgaaaaaaaccctagatattgctttattaccaacagtgtgtaggtttttgtacatatggaaatttgacacaaaaaaatagggaatttgtatagagaagtttccctcttataaaaggactcccatttgattgttcgaaactataaaatgcacttttactttaccatatctgaaatgacaaaatatcgccctttggaaaacctgactctttgcacgtgtaattcccagagtctacctcagttaaccaggcttagttttaggcaggaatgaattgaattaaattcagttcatcatctatgcagatttgtttcttttaagcacatccttccctcctgctgttgccctcctcccattaacttttctttttaatcttgaaattgtttaaaatattccatctttctttctctagcaaagtgtttgtattccaaataaggcctctgtgaaatgtctgaattacttttcccgtctttgttatggtcagcttcattatttggatgtattgcattcaaagcagcagttccaaacataacacacatctattttcttagagttttgtaaatacaaactaacctgatgacattaaaaattgtggatcctacatgttcctatgttcattctctaaaaacctgagtaactttatgaaaacacacaaacctggaaaaacatcacatttttgtcacatttttactgacaaatgtatattcatatgatggtacggcagcagggagtggcccccagttaacatggctgtgagtggacacagtgtctcgcaggatcactgcatgttatgatggcttgtaagtgcgttgttaagacttttgtttcagtgtttgtctcccagtatttgaacctaatttaaagaaaaagacgtttccaagttgtatttattaaatgtgtttttccttaccttttgtgctgctactttgctaatctcattagcttagctgtgtttgtgcataggttatatttggtaataaatttatagagtgttggttgtcaaaaaaaaaaaaaaaaaaaaaaa

SEQ ID NO: 603 - DNA, 4668 bp, Homo sapiens
cggcgagactgcacctcccagcatgccttgcagccaggactggagtcggtacttaagagtgatggggttccctagatactttaggccgtcgcatcgattatagagattgaggtggaacccggggcctgggaactggacgcacgcggagggcgaagatggaagcctggcgctgtgtgaggaagggctacggccactgtgtggtgggaagaggccgataccccatgtttccccatcactcgaggagtctgggcagagactggactacaccgtgggagaatctgcaaaggtgttgctggaacagacatatttctagttgtatgaggtggcctggacattactctcgagctccttacccatacttcagtagtaggcatttttcactaaattggagaccaccctgtttgtttgagtctagaactcagttccagtactgtaactggagacctgacaacctgagccagacatctttgattcatctctctagttacgtcatgaacgctgagggagatgagccttcatcaaaacgaagaaaacaccaaggtgtgataaagcggaattgggaatatatatgtagccatgataaagaaaaaacgaagatcctaggagacaaaaatgttgatcccaaatgtgaagacagtgagaacaagtttgacttttcagtgatgtcctataatatactttcacaagatttactggaagataactctcacctttatagacattgccggcggccagtattacactggagttttaggtttcccaatattctgaaagaaattaaacattttgatgcagacgtactttgtttgcaagaagttcaagaagatcattatggagcagagatcaggccaagtttggaatcactgggttatcactgtgaatataagatgcggacaggaaggaaacctgatggctgtgctatttgcttcaaacattccaaattttcactcttgtcagtgaacccagtggaattcttccgccctgatatttctctgttggacagagacaatgttggattagttttactcttacagcccaaaattccatatgctgcctgccctgcaatctgcgtagcaaatacgcatctgttgtataatccaaggcgaggtgatattaagctgacgcaattggcaatgctactggcagagatttccagtgttgcccaccagaaagatggcagcttctgccctattgttatgtgtggtgactttaattctgttcctggttctccactatatagtttcataaaggaaggaaaattgaattatgaaggacttcccataggaaaggtatctggccaggaacagtcttcacggggacaaagaattttatctattccaatttggcccccaaacctaggtatctcacagaactgtgtgtatgaggtacagcaggtaccaaaagtagaaaagacagacagtgatctgacacaaacacagctgaagcaaacagaggtcctagtgacagctgaaaaattgtcttcaaatttacagcaccatttcagtttgtcatctgtttattcacattactttcctgacactggaattccagaagtgaccacctgtcattcccgaagtgccataactgtggattatattttctactctgcagaaaaggaagatgttgctgggcacccaggagctgaagttgctttggttggtggcttgaaacttctagctagactgtcacttcttacagaacaagacttatggactgttaatggacttccaaacgaaaataactcttcagatcatctgcctttattggcaaagttcagacttgagctctgactctctttgatcacatactaattttctttccaatttgtattgtttttcaaagaatgtaaagttcttaagtgtatgcatgttgtttatttttgcactgtggagattctgaagcggttatgttagatgctttgaaactccatatcagaagaaataactttataacaattttttttaataatgaaaaatattttcgtgacaagtgagctctaaattctctttattgtaaaagagatgtaaaggttttatattctaaatcctagtaaaattgacagtgatttttaaatataatgcatcttcctttgtctgcttagtaaaaaatttcatttcataattttggcaagctctgtagtggatccaaagtatctttgagttcttgcaaactacaagttgtttcctttccagaaggcttgatttcattaggagacccctctattgagttctaaatagtttatcttagaaagccttgggtcattcacaggtatccaaccagccattgtttagtttgtttttgaaggggtttgataatgctttttaagttgtacagaatgcttaatccatcttattactgtcctgagccatgtaatatgcctgcatcgtgttggggaaatgtttgggaaatataagccagcataacgtgtaaagctcactctttcaccctggaacagacaagaggtgggcttaatagaggcagagactggggatatacctttgtttccctagcatttttatttatttatttttattttattttattttttgagatggagtttcactcttgttgcccaggctgggggtgcaatggcgcaatctttgctcactgcaacccctgcctcccgggctcaagcgattctcctgcctcagcctctcgagtagctgggattacaggcatgcgtcaccactcccagctaattttgtattttcagtagagacagggtttccccatgttggttaggctggtctcgaactcccaacctcaggtgatccgcccacctcagctctcaaagtgctgggattacaggcgggagccactgcacatggcagcattttttaaaaattcagttttaagatctctggtttaggggagagattttattttactgaaccagttctatagaaatttattttattaggaaatttgtctttggaacaaagtggcagctataaaattatttttgttaagcctcagaaatatgaggaagcctgtaaaactctagtggggagatattaacttggagacctaatgctctgtaaatagtcatttaaactgttggttttagtggttttgtttctaaaatgttttcttttaccgtgatgcaccagtatgagatggtgctgacactttctatgaagtggttatgagcaggtttaataaatcctctatacaagtgtttgaatcaattttaaaacataaaaagtggaaatttccttttttgtagacagtaggaacaaggaattatatgcatttttactaagtagtaattttacactgaattgtaaatgtttttacagtgagttttattaatagaatgcttcaccttaaattggaaaacaataatagtcttggactaagtctttgtactaaagcatttgctataattatttttaaaaaaacaaacagatgaaaacctcagagaaggcatgtggattataagatttgtctagtaaaaattgtaattgaatatgtttaaatatttaatttctcattttggggggtttttatttttttattttttagatggtgtctcacgctatcgcccaggctggagtgcagtggcgcgaactcggctcactgcaacctccgcctcctgggttcaagcaattctccttcctcagcctcccaagtagctgggattacaggcatgcaccaccatgcccagctaatttttgtatttttagtagagatggaattttgccatgttggccaggctggtcttgaactcctgacctcaggggtgatccacccgcctcgggctcccaaagtgctgtgattacaggcatgagccaccatgcctggcctttggggggattttaattacagtattaattatagttctaggatttcccacattttatagtagtagtttgcaggatattatgtgccctaattagcagatatagacattatcaaattataatgatagtataattatccctttttaatattggggaaagaaaaatgaaaattcattagttaattactgctttgtgttgtgtgaatttattaacaaataacattattacatataggtcattgttaacaaacaaacatccctgaaaacctctgtgaaaatttaattttttatatcctgattaatatattgtgactttaggcccatttttcatgtgcttcactttgatagagttaatccataaaattgctctttactttagcttatcaaatgaagtattattttgtggactggaggccaaaaagtcaatgtgagcttctcacaggtttttaaagctccactaaaaataattatccacttgtctttacttttgttgaccagaatagttggtaactctgccagagcctgtacttacctgccaaaaacaattaaatctggttaatgcctgaaaccaaatctctcagtctcaagtgttatactatccaagttttaaatggaaaggtaaactgtggagtaatgaaattttggttttactgtaccttttgctatcaagataatattcatgtttgaaatcttgtctttatttggaatttagttactgtctgcttttaacctttgctttcctaaagaaagtttgagatccagagagttcaagggattggggaaagagaggcgtcaagtcatttgcactttgtacctgtaagttaggtaataaactattatactcgtaaaaaaaaaaaaaaaaaaaa

SEQ ID NO: 604 - DNA, 896 bp, Homo sapiens
cagaggtcagacggtctagcgctgcgtgggccatggtgcagctccgaccgcgagcgtctcgcgccccggcgtcggcggaggcgatggtggacgagggccagctggcctcggaggaggaggaggcggagcacgggctgttgctcgggcagcccagcagcggcgcggccgccgagcccctggaggaagacgaggaaggggacgatgagtttgacgatgaggccccggaggagctgactttcgccagcgcccaggcggaagcgagagaagaggagcggcgagtgcgggagaccgtgcgcagggataaaacgctcctgaaggagaagaggaagcgacgcgaggagctgttcatcgaacagaagaaaagaaaactccttccagacactattttggagaagttaaccacagcttcacagactaacatcaagaaatcgccaggaaaggtgaaagaagttaatttgcaaaagaaaaatgaagactgtgaaaaaggaaatgactccaagaaagttaaagtacaaaaagtacagtctgtcagccagaataaaagctacttggccgtaaggctaaaagaccaagatctgagagattcaaggcaacaagcagcacaagccttcatacataattcattatatgggccaggaaccaacaggactactgtaaataagttcctgtctcttgccaacaagaggttaccagtgaaaagagctgctgtccagtttttgaataatgcttggggaatccaaaaaaaacaaaatgccaagaggtttaaaagacggtggatggtcagaaagatgaaaactaagaagtaaatcaatgctaaatgaagaatctgtactttgtatgtatagaatttatctaataaatcattcatagatcaaaaaaaaaaaaaaaaaaaaaaa

SEQ ID NO: 605 - DNA, 811 bp, Homo sapiens
gcagaagcgttccgtgcgtgcaagtgctgcgaaccacgtgggtcccgggcgcgtttcgggtgctggcggctgcagccggagttcaaacctaagcagctggaaggaaccatggccaactgtgagcgtaccttcattgcgatcaaaccagatggggtccagcggggtcttgtgggagagattatcaagcgttttgagcagaaaggattccgccttgttggtctgaaattcatgcaagcttccgaagatcttctcaaggaacactacgttgacctgaaggaccgtccattctttgccggcctggtgaaatacatgcactcagggccggtagttgccatggtctgggaggggctgaatgtggtgaagacgggccgagtcatgctcggggagaccaaccctgcagactccaagcctgggaccatccgtggagacttctgcatacaagttggcaggaacattatacatggcagtgattctgtggagagtgcagagaaggagatcggcttgtggtttcaccctgaggaactggtagattacacgagctgtgctcagaactggatctatgaatgacaggagggcagaccacattgcttttcacatccatttcccctccttcccatgggcagaggaccaggctgtaggaaatctagttatttacaggaacttcatcataatttggagggaagctcttggagctgtgagttctccctgtacagtgttaccatccccgaccatctgattaaaatgcttcctcccagcataggattcattgagttggttacttcatattgttgcattgcttttttttccttct

SEQ ID NO: 606 - DNA, 1411 bp, Homo sapiens
gcgcgttcctgccccgcacacgcacgcgcgaacccttcagcttcttgttcctttgggccgcgggctgtaccaagtaaacccaggcagcgaggggcaaagcacggcgccccccgcgcgggtctcgtcgacggcccgacgcgcatagcccctcttcccacagcgctacaggactagtccgtctcgccgcgcaagcgccctaggctcttcacgccccctgcgcgctgtcctaccctacttgcgacgcaggcgcagaggctgggcgtgcagccgccgccgcagagccggagcgggggccgccggcgccgcatccctctctacctgccaacatcctgtattagagaacttgtggccggaggtgtggctgtggagagctggccggggagggacgctgctcagctgctgctctgctcctgtctcctgtcccctcccccggtcatgacagagacccgtgagccagctgagactgggggctacgccagcttggaagaagatgatgaagacctttccccaggccccgagcattcctctgattcagaatacactctctcagagccggactccgaagaggaagaagatgaggaggaggaggaagaggagaccactgacgatcctgaatatgatcctggctacaaggtgaagcagcgccttggcgggggccgtggtggcccatcccgccgggccccccgtgcagcccagcccccggcccagccttgccagctctgtggccgctcaccccttggggaggccccaccgggaaccccaccctgccggctctgctgccctgctacagccccccaggaagcaccagcccctgaaggcagggccctcggggaggaagaggaggaaccacctcgggctggggagggccgaccagctgggcgggaggaggaggaggaagaggaggaggagggaacctaccactgtacggaatgtgaggattccttcgacaacctgggggagctgcacgggcacttcatgctgcatgcccggggtgaggtgtaggcagagcccccatacggggagcttggcagaaggggtggggtgggaggagggggctgaggaaattggggttgtgacagtggtcatgggggatggggtactgccggtctgtgttgtcttagaagtagatgtgtgatggccagaataaaagccaaaatctgtatctgtgtgtgttggttcagagtgtgtgtgtgtgtgtgtgtattcccgcccgtgtgtgtgtttgtgtgtgtgtgtgtgtgtgtgtattccccctgggctccttcttggggaaccttggggtcttttgggaaagataacatttactgcgtgcttgtattcgatgaggtttccatgtatttacttacagaccccataatgtaaaggctctaataatagaattttgtttctcactcaaaaaaaaaaaaaaaaa

SEQ ID NO: 607 - DNA, 2401 bp, Homo sapiens
ccccccctcgccggggaccgagcgcgctcgctccggcgccggcctcgcctcctcgcagcagcgccatggatgagttccacccgttcatcgaggccctgctgcctcacgtccgcgccttcgcctacacctggttcaacctgcaggcgcggaagcgcaagtacttcaagaagcacgagaagcggatgtcgaaggacgaggagcgtgcggtcaaggacgagctgctgggcgagaagcccgaggtcaagcagaagtgggcgtcgcggctgctggccaagctgcgcaaggacatccggcccgagtgccgcgaggacttcgtgctgagcatcaccggcaagaaggcgccgggctgcgtgctctccaaccccgaccagaagggcaagatgcggcgcatcgactgtctccggcaggcggacaaggtgtggcggctggacctggtcatggtcatcctgttcaagggcatcccgctggagagcaccgacggcgagcgcctggtcaaggctgcgcagtgcggtcacccggtcctgtgcgtgcagccgcaccacattggcgtggccgtcaaggagctggacctctacctggcctacttcgtgcgtgagcgagatgcagagcaaagcggcagtccccggacagggatgggctctgaccaggaggacagcaagcccatcacgctggacacgaccgacttccaggagagctttgtcacctccggcgtgttcagcgtcactgagctcatccaagtgtcccggacacccgtggtgactggaacaggacccaacttctccctgggggagctgcaggggcacctggcatacgacctgaacccagccagcactggcctcagaagaacgctgcccagcacctcctccagtgggagcaagcggcacaaatcgggctcgatggaggaagacgtggacacgagccctggcggcgattactacacttcgcccagctcgcccacgagtagcagccgcaactggacggaggacatggaaggaggcatctcgtccccggtgaagaagacagagatggacaagtcaccattcaacagcccgtccccccaggactctccccgcctctccagcttcacccagcaccaccggcccgtcatcgccgtgcacagcgggatcgcccggagcccacacccgtcctccgctctgcatttccctacgacgtccatcctaccccagacggcctccacctacttcccccacacggccatccgctacccacctcatctcaacccccaggacccgctcaaagatcttgtctcgctggcctgcgacccagccagccagcaacctggaccgttaaatggaagtggtcagctcaaaatgcccagccactgcctttctgctcagatgctggcacctccgcccccggggctgccacggctggcgctcccccctgccaccaaacccgccaccacctccgagggaggagccacgtcgccgacctcgccttcctactctccgcccgacacgtcccctgcaaaccgttcctttgtgggattaggaccaagggatcctgcgggcatttatcaggcacagtcctggtatctgggatagcaaaggtcttcttccctcgccccttctccatcgtcccaggaatcccagggggcagcacagccggcccccggcccacgttttcggtggaaaattagagtgaacaagaacacccctgccgactcccagcccggccaaaaagacaaaacacatagacgcacacactcaggaggaaaagaaaaaacaaaggcagaagaagaagaagaagaaataaaaacccacccaagcaagaagacaaaaggtaaagacgcaacgtttccaactctcgggacgccaaggccgcaggactggagggccaggccccgccacccccacgggagacccgggacagggcgtcttcctaagttattcatctcctctccgcctgctgctcgggaaggacagacgccggccgcccgcccgcgccccggaggccctggctctgtccggagaccaggtgagcacagcctggagcctgtgcccagggccgacaggcgcgacacccagcaaggccacctctccccgggcccccgcgcctctgccggacacggaccggcccctcagcccccaccgaggacgcagccactggggggaaagggagacacagcggaccccggccgggcagcggagaccgcagaggcgggcagggtggggcaggcgagtggtgtcgcgggggtgcgtggcgcttgcgagccctggccaggggaggaagtgaggcccaggcacctgctgcccctcgagggggccctgcctgccgcggggcctccccacaagcccctcccaaagcgccggccgactcgctgtctcgctggggactctttcagccctcgcgcccgcccgtttgggaggagaagtctcta

SEQ ID NO: 608 - DNA, 401 bp, Homo sapiens
cttccgccagcttccctcctcttcctttctccgccatcgtggtgtgttcttgactccgctgctcgccatgtcttctcacaagactttcaggattaagcgattcctggccaagaaacaaaagcaaaatcgtcccattccccagtggattcggatgaaaactggaaataaaatcaggtacaactccaaaaggagacattggagaagaaccaagctgggtctataaggaattgcacatgagatggcacacatatttatgctgtctgaaggtcacgatcatgttaccatatcaagctgaaaatgtcaccactatctggagatttcgacgtgttttcctctctgaatctgttatgaacacgttggttggctggattcagtaataaatatgtaaggcctttcttttt

SEQ ID NO: 609 - DNA, 941 bp, Homo sapiens
ccaagagctaaaagagagcaaggaggaaacaacagcagctccaaccagggcagccttcctgagaagatgcaaccaatcctgcttctgctggccttcctcctgctgcccagggcagatgcaggggagatcatcgggggacatgaggccaagccccactcccgcccctacatggcttatcttatgatctgggatcagaagtctctgaagaggtgcggtggcttcctgatacgagacgacttcgtgctgacagctgctcactgttggggaagctccataaatgtcaccttgggggcccacaatatcaaagaacaggagccgacccagcagtttatccctgtgaaaagacccatcccccatccagcctataatcctaagaacttctccaacgacatcatgctactgcagctggagagaaaggccaagcggaccagagctgtgcagcccctcaggctacctagcaacaaggcccaggtgaagccagggcagacatgcagtgtggccggctgggggcagacggcccccctgggaaaacactcacacacactacaagaggtgaagatgacagtgcaggaagatcgaaagtgcgaatctgacttacgccattattacgacagtaccattgagttgtgcgtgggggacccagagattaaaaagacttcctttaagggggactctggaggccctcttgtgtgtaacaaggtggcccagggcattgtctcctatggacgaaacaatggcatgcctccacgagcctgcaccaaagtctcaagctttgtacactggataaagaaaaccatgaaacgctactaactacaggaagcaaactaagcccccgctgtaatgaaacaccttctctggagccaagtccagatttacactgggagaggtgccagcaactgaataaatacctcttagctgagtggaaaaaaaaaaaaaaaaaa

SEQ ID NO: 610 - DNA, 1904 bp, Homo sapiens
gggttgatgacgtcagcgttcgaattccatggcggcgcggcggcgacggagcaccggcggcggcagggcgagagcattaaatgaaagcaaaagagttaataatggcaacacggctccagaagactcttcccctgccaagaaaactcgtagatgccagagacaggagtcgaaaaagatgcctgtggctggaggaaaagctaataaggacaggacagaagacaagcaagatggtatgccaggaaggtcatgggccagcaaaagggtctctgaatctgtgaaggccttgctgttaaagggcaaagctcctgtggacccagagtgtacagccaaggtggggaaggctcatgtgtattgtgaaggaaatgatgtctatgatgtcatgctaaatcagaccaatctccagttcaacaacaacaagtactatctgattcagctattagaagatgatgcccagaggaacttcagtgtttggatgagatggggccgagttgggaaaatgggacagcacagcctggtggcttgttcaggcaatctcaacaaggccaaggaaatctttcagaagaaattccttgacaaaacgaaaaacaattgggaagatcgagaaaagtttgagaaggtgcctggaaaatatgatatgctacagatggactatgccaccaatactcaggatgaagaggaaacaaagaaagaggaatctcttaaatctcccttgaagccagagtcacagctagatcttcgggtacaggagttaataaagttgatctgtaatgttcaggccatggaagaaatgatgatggaaatgaagtataataccaagaaagccccacttgggaagctgacagtggcacaaatcaaggcaggttaccagtctcttaagaagattgaggattgtattcgggctggccagcatggacgagctctcatggaagcatgcaatgaattctacaccaggattccgcatgactttggactccgtactcctccactaatccggacacagaaggaactgtcagaaaaaatacaattactagaggctttgggagacattgaaattgctattaagctggtgaaaacagagctacaaagcccagaacacccattggaccaacactatagaaacctacattgtgccttgcgcccccttgaccatgaaagttatgagttcaaagtgatttcccagtacctacaatctacccatgctcccacacacagcgactataccatgaccttgctggatttgtttgaagtggagaaggatggtgagaaagaagccttcagagaggaccttcataacaggatgcttctatggcatggttccaggatgagtaactgggtgggaatcttgagccatgggcttcgaattgccccacctgaagctcccatcacaggttacatgtttgggaaaggaatctactttgctgacatgtcttccaagagtgccaattactgctttgcctctcgcctaaagaatacaggactgctgctcttatcagaggtagctctaggtcagtgtaatgaactactagaggccaatcctaaggccgaaggattgcttcaaggtaaacatagcaccaaggggctgggcaagatggctcccagttctgcccacttcgtcaccctgaatgggagtacagtgccattaggaccagcaagtgacacaggaattctgaatccagatggttataccctcaactacaatgaatatattgtatataaccccaaccaggtccgtatgcggtaccttttaaaggttcagtttaatttccttcagctgtggtgaatgttgatattaaataaaccagagatctgatcttcaagcaagaaaataagcagtgttgtacttgtgaattttgtgatattttatgtaataaaaactgtacaggtctaaaaaaaaaaaaaaaaaa

SEQ ID NO: 611 - DNA, 2323 bp, Homo sapiens
ggcgagaggaagcagggaggagagtgatttgagtagaaaagaaacacagcattccaggctggccccacctctatattgataagtagccaatgggagcgggtagccctgatccctggccaatggaaactgaggtaggcgggtcatcgcgctggggtctgtagtctgagcgctacccggttgctgctgcccaaggaccgcggagtcggacgcaggcagaccatgtggaccctggtgagctgggtggccttaacagcagggctggtggctggaacgcggtgcccagatggtcagttctgccctgtggcctgctgcctggaccccggaggagccagctacagctgctgccgtccccttctggacaaatggcccacaacactgagcaggcatctgggtggcccctgccaggttgatgcccactgctctgccggccactcctgcatctttaccgtctcagggacttccagttgctgccccttcccagaggccgtggcatgcggggatggccatcactgctgcccacggggcttccactgcagtgcagacgggcgatcctgcttccaaagatcaggtaacaactccgtgggtgccatccagtgccctgatagtcagttcgaatgcccggacttctccacgtgctgtgttatggtcgatggctcctgggggtgctgccccatgccccaggcttcctgctgtgaagacagggtgcactgctgtccgcacggtgccttctgcgacctggttcacacccgctgcatcacacccacgggcacccaccccctggcaaagaagctccctgcccagaggactaacagggcagtggccttgtccagctcggtcatgtgtccggacgcacggtcccggtgccctgatggttctacctgctgtgagctgcccagtgggaagtatggctgctgcccaatgcccaacgccacctgctgctccgatcacctgcactgctgcccccaagacactgtgtgtgacctgatccagagtaagtgcctctccaaggagaacgctaccacggacctcctcactaagctgcctgcgcacacagtgggggatgtgaaatgtgacatggaggtgagctgcccagatggctatacctgctgccgtctacagtcgggggcctggggctgctgcccttttacccaggctgtgtgctgtgaggaccacatacactgctgtcccgcggggtttacgtgtgacacgcagaagggtacctgtgaacaggggccccaccaggtgccctggatggagaaggccccagctcacctcagcctgccagacccacaagccttgaagagagatgtcccctgtgataatgtcagcagctgtccctcctccgatacctgctgccaactcacgtctggggagtggggctgctgtccaatcccagaggctgtctgctgctcggaccaccagcactgctgcccccagggctacacgtgtgtagctgaggggcagtgtcagcgaggaagcgagatcgtggctggactggagaagatgcctgcccgccgggcttccttatcccaccccagagacatcggctgtgaccagcacaccagctgcccggtggggcagacctgctgcccgagcctgggtgggagctgggcctgctgccagttgccccatgctgtgtgctgcgaggatcgccagcactgctgcccggctggctacacctgcaacgtgaaggctcgatcctgcgagaaggaagtggtctctgcccagcctgccaccttcctggcccgtagccctcacgtgggtgtgaaggacgtggagtgtggggaaggacacttctgccatgataaccagacctgctgccgagacaaccgacagggctgggcctgctgtccctaccgccagggcgtctgttgtgctgatcggcgccactgctgtcctgctggcttccgctgcgcagccaggggtaccaagtgtttgcgcagggaggccccgcgctgggacgcccctttgagggacccagccttgagacagctgctgtgagggacagtactgaagactctgcagccctcgggaccccactcggagggtgccctctgctcaggcctccctagcacctccccctaaccaaattctccctggaccccattctgagctccccatcaccatgggaggtggggcctcaatctaaggccttccctgtcagaagggggttgtggcaaaagccacattacaagctgccatcccctccccgtttcagtggaccctgtggccaggtgcttttccctatccacaggggtgtttgtgtgtgtgcgcgtgtgcgtttcaataaagtttgtacactttcaaaaaaaaaaaaaaaaaa

SEQ ID NO: 612 - DNA, 4109 bp, Homo sapiens
ctctctggccgcccctggctttatttctcgcgcgcttggggtctctcccagtctccgtctctccatttctcctggggggcggggagggggggtctccaaaaaccgcggcggcggcggcggccgctccaggcgcccgttccggagtcggggggaggcccagccgggaggggggaagggggggagccttagtcatttccccgctccagcctgctcccgcccgagcgcgcactcacggccgctctccctcctcgctccgcagccgcggcccatggagcccgccggcccggcccccggccgcctcgggccgctgctctgcctgctgctcgccgcgtcctgcgcctggtcaggagtggcgggtgaggaggagctgcaggtgattcagcctgacaagtccgtgttggttgcagctggagagacagccactctgcgctgcactgcgacctctctgatccctgtggggcccatccagtggttcagaggagctggaccaggccgggaattaatctacaatcaaaaagaaggccacttcccccgggtaacaactgtttcagacctcacaaagagaaacaacatggacttttccatccgcatcggtaacatcaccccagcagatgccggcacctactactgtgtgaagttccggaaagggagccccgatgacgtggagtttaagtctggagcaggcactgagctgtctgtgcgcgccaaaccctctgcccccgtggtatcgggccctgcggcgagggccacacctcagcacacagtgagcttcacctgcgagtcccacggcttctcacccagagacatcaccctgaaatggttcaaaaatgggaatgagctctcagacttccagaccaacgtggaccccgtaggagagagcgtgtcctacagcatccacagcacagccaaggtggtgctgacccgcgaggacgttcactctcaagtcatctgcgaggtggcccacgtcaccttgcagggggaccctcttcgtgggactgccaacttgtctgagaccatccgagttccacccaccttggaggttactcaacagcccgtgagggcagagaaccaggtgaatgtcacctgccaggtgaggaagttctacccccagagactacagctgacctggttggagaatggaaacgtgtcccggacagaaacggcctcaaccgttacagagaacaaggatggtacctacaactggatgagctggctcctggtgaatgtatctgcccacagggatgatgtgaagctcacctgccaggtggagcatgacgggcagccagcggtcagcaaaagccatgacctgaaggtctcagcccacccgaaggagcagggctcaaataccgccgctgagaacactggatctaatgaacggaacatctatattgtggtgggtgtggtgtgcaccttgctggtggccctactgatggcggccctctacctcgtccgaatcagacagaagaaagcccagggctccacttcttctacaaggttgcatgagcccgagaagaatgccagagaaataacacaggacacaaatgatatcacatatgcagacctgaacctgcccaaggggaagaagcctgctccccaggctgcggagcccaacaaccacacggagtatgccagcattcagaccagcccgcagcccgcgtcggaggacaccctcacctatgctgacctggacatggtccacctcaaccggacccccaagcagccggcccccaagcctgagccgtccttctcagagtacgccagcgtccaggtcccgaggaagtgaatgggaccgtggtttgctctagcacccatctctacgcgctttcttgtcccacagggagccgccgtgatgagcacagccaacccagttcccggagggctggggcggtgcaggctctgggacccaggggccagggtggctcttctctccccacccctccttggctctccagcacttcctgggcagccacggccccctccccccacattgccacatacctggaggctgacgttgccaaaccagccagggaaccaacctgggaagtggccagaactgcctggggtccaagaactcttgtgcctccgtccatcaccatgtgggttttgaagaccctcgactgcctccccgatgctccgaagcctgatcttccagggtggggaggagaaaatcccacctcccctgacctccaccacctccaccaccaccaccaccaccaccaccaccactaccaccaccacccaactggggctagagtggggaagatttcccctttagatcaaactgccccttccatggaaaagctggaaaaaaactctggaacccatatccaggcttggtgaggttgctgccaacagtcctggcctcccccatccctaggctaaagagccatgagtcctggaggaggagaggacccctcccaaaggactggagacaaaaccctctgcttccttgggtccctccaagactccctggggcccaactgtgttgctccacccggacccatctctcccttctagacctgagcttgcccctccagctagcactaagcaacatctcgctgtggacgcctgtaaattactgagaaatgtgaaacgtgcaatcttgaaactgaggtgttagaaaacttgatctgtggtgttttgttttgttttttttcttaaaacaacagcaacgtgatcttggctgtctgtcatgtgttgaagtccatggttgggtcttgtgaagtctgaggtttaacagtttgttgtcctggagggattttcttacagcgaagacttgagttcctccaagtcccagaaccccaagaatgggcaagaaggatcaggtcagccactccctggagacacagccttctggctgggactgacttggccatgttctcagctgagccacgcggctggtagtgcagccttctgtgaccccgctgtggtaagtccagcctgcccagggctgctgagggctgcctcttgacagtgcagtcttatcgagacccaatgcctcagtctgctcatccgtaaagtggggatagtgaagatgacacccctccccaccacctctcataagcactttaggaacacacagagggtagggatagtggccctggccgtctatcctacccctttagtgaccgcccccatcccggctttctgagctgatccttgaagaagaaatcttccatttctgctctcaaaccctactgggatcaaactggaataaattgaagacagccagggggatggtgcagctgtgaagctcgggctgattccccctctgtcccagaaggttggccagagggtgtgacccagttaccctttaacccccacccttccagtcgggtgtgagggcctgaccgggcccagggcaagcagatgtcgcaagccctatttattcagtcttcactataactcttagagttgagacgctaatgttcatgactcctggccttgggatgcccaagggatttctggctcaggctgtaaaagtagctgagccatcctgcccattcctggaggtcctacaggtgaaactgcaggagctcagcatagacccagctctctgggggatggtcacctggtgatttcaatgatggcatccaggaattagctgagccaacagaccatgtggacagctttggccagagctcccgtgtggcatctgggagccacagtgacccagccacctggctcaggctagttccaaattccaaaagattggcttgtaaaccttcgtctccctctcttttacccagagacagcacatacgtgtgcacacgcatgcacacacacattcagtattttaaaagaatgttttcttggtgccattttcattttattttattttttaattcttggagggggaaataagggaataaggccaaggaagatgtatagctttagctttagcctggcaacctggagaatccacataccttgtgtattgaaccccaggaaaaggaagaggtcgaaccaaccctgcggaaggagcatggtttcaggagtttattttaagactgctgggaaggaaacaggccccattttgtatatagttgcaacttaaactttttggcttgcaaaatatttttgtaataaagatttctgggtaataatga

SEQ ID NO: 613 - DNA, 4542 bp, Homo sapiens
gctgctgctgctgctgcctccccaccgcctttttttttttttaatctggagcggggtggggagtgggaaccggagagaaagcaaaatattaaaaagccccaaagacagccagcaggagcgcggtgcccgatggcttcgctgtaccagaggttcactggcaagatcaacacctcgaggtccttccccgcgcccccggaggcgagtcacctcctgggcggccaggggcccgaggaggacggcggcgcaggagccaagcccctcggcccgcgggcgcaggcggcggcgccccgggagcgcggcggcggcggcggcggcgcgggtggccggccccggttccagtaccaggcgcggagcgatggtgacgaggaggacgagctggtggggagtaaccctccgcagaggaattggaaaggaatagcaattgcactgcttgtcattctggtcatctgctccttgatcgtcacctcggtcatacttctgacaccagcggaagataatagtctgtctcaaaagaagaaggtcactgtagaagatctcttcagtgaagacttcaaaattcatgaccccgaggctaagtggataagtgatacagaattcatctacagagaacagaaaggaacagtgagactgtggaatgttgaaacaaatacttctactgtcttaatagaaggcaaaaaaattgaatcattaagagccatcagatatgaaatatctccagatagagagtatgcacttttttcatacaatgtggaacccatatatcaacactcgtatactggatattacgtcctgagcaaaattcctcatggggatcctcaaagtctggacccaccagaagtcagcaatgcaaaacttcagtatgcaggatggggccctaaaggccaacagctgatatttatttttgaaaacaatatctactactgtgcacatgtcgggaaacaggccatccgtgtggtctccactggcaaggaaggtgtgatttacaatggcctcagtgactggctgtatgaagaggagattttgaagacacacatcgcacactggtggtctccggatggcacgagactcgcctacgccgccatcaatgattcccgtgtccccatcatggagctcccaacttacaccggctccatctaccccaccgtgaagccctaccactatcccaaggctggaagtgagaaccccagcatttccctacacgttattggcttaaatggacccacccatgatctggagatgatgccgcctgatgatccacggatgagggagtactacatcaccatggtgaagtgggccaccagcaccaaggtcgccgtgacctggctgaaccgggcgcagaacgtgtccatcctcaccctctgcgacgccaccacgggggtctgcacgaagaaacacgaggatgaaagtgaggcctggctccacagacagaatgaagaacctgtgttctccaaggatggccgaaagtttttcttcatcagagccatcccccagggaggacgagggaaattctatcacatcacggtgtcctcgtcccagcccaacagcagcaacgacaacatccagtccatcacctccggggactgggacgtgaccaagatcctagcctacgatgagaaggggaataagatctacttcctgagcacggaggacctgcctcggagacgacaactctacagtgccaacacggtgggcaacttcaacaggcagtgcctctcctgtgacctggttgagaactgcacctacttcagcgcttccttcagccatagcatggacttcttcctgctcaagtgcgaaggtcctggtgttcctatggtgacggtgcacaacacaacagataagaaaaaaatgtttgacctagaaacaaatgaacatgtcaagaaggccataaatgaccgacagatgcctaaagtggaatacagggacattgagattgatgattacaacctgcccatgcagatactgaagccagcaaccttcaccgacaccacccactaccctctgctcctggtggtggatggcaccccaggcagccagagtgtggctgagaagttcgaggtgagctgggagacggtgatggtgagcagccacggcgcggtggtggtaaagtgtgacggccgtggcagcggcttccaagggaccaagctcctgcacgaagtgaggcggcggctgggcttgctggaggagaaggaccagatggaggccgtgcggacgatgctgaaggagcagtacattgacaggacgcgcgtggccgtgtttgggaaggattacggtggctacctgagcacctacatcctcccagcaaagggagaaaatcaaggccagacattcacctgcggctctgctctctctccaataacagacttcaaactctatgcctctgcgttttccgagaggtacttgggcctccatggacttgacaacagagcatacgagatgaccaaggtagcccatcgagtctccgcgctggaagaacagcagttcctgatcattcatcccactgccgatgaaaaaattcatttccagcacacagcagaactcattacacaactaattaggggaaaggctaattacagcttacagatttacccggacgaaagccattactttaccagctccagcctcaaacagcatctgtaccggtccatcatcaacttcttcgtggaatgcttcaggatccaggacaaactgctgacagtcacagcgaaagaggacgaggaggaggactaagctcaggtcgctctaagcacaaacgtggctctttctacaaccagatgcaaccgagggatttccctgccctccctcttccctcggaggggcggggcggggcggggccgggtgttccatagcatgtgtgtctcggatgcggaaggcagttttgcttgggaaacaagctccttccccggggtcatcactcacggcctccatggcaccagggacaacgctgtccccgcagcagcgcctcctcccggcgcccgagagaccggcacgccacggcccctcccccaaggaacagagcaaaggatggtggccgcaggccccacgcgagcccacaggacaccggcccctagattccagccaccaagcggaagcatgagacccgcccacactagcctctgtgttcccgttagggacatcacaccctgtctcacgtcgcagtgccatggacgcagcagttacagcaccattgttttagcagtgcgtgttcatatatgggcttgctacttcctgtaatgaggacgttcaacatggtgaggggctacaagaaaacgcttttctgtacagagtcttactgtagctacgctaatggttaacctgatagaattaactcgtatttttctatggttttaacctgatgctccactgtctccgtcatggggttgttttgctgtttggggttgggccttgtttccctttcctttctccagtccacgtgtagactttgcgcttgatgaagaagcagatcggaagtaactgctccctcctcaaggttgtcttcagacgtcttggggacgttcctaaacactgagggggaagacagccaatagcacccattaaaagaaatacctaaataaaacctctctcccactcagctatgctagggcttggctgtaggtgtgcactgtctatttacatccgtccttacaaccatccttgtcctccttggtaccgtatcaagctctttcccatgacatttggtttaaaaaaaaaaaaaaaaaaaaaaaaaaaacagaaaaaagacaaagcgtcaactccacccacaggcccgctgtgtgtgctcgggccacgggagtcctgagggttctgtgggcctgcgcgcatccctctcccatcgtgggggtggctccgtgaccttcctgccacgagcaggaggttgatgatgtgctacgttagccttgtaagatacacccccaccaaatgtgcagccggtgttcccagtgtatatttcattctcttgtatataaaggaagcaatgtgtgtcaggcctctgtgcagtcaacccagcctcctcccgccagtgctaaccccgtgttgagcctgcatgctgacactgtggccgatctggactctagaagtgctagtttgaaatatatccattactgtcatttccttttgagcttgtggacaagctgaatgtcaggactgacttcgccagctcccagccctgcgggggtgtccttggcatcccatcagcagaggagatgcgtccctgttgcattttggcgtttggggctttgggtttatccacatgagctctgaacgtccgttatagttagggtgattggaaggtctccatcactgggtgttttaaaggtgattcaccaccatttgtgaaaggaccaacgtgctgataaacaggaccgatccgagtgctacatgactgtgcgtttgctatttcaatgggcctgaacgactacaaagccagctaggtctggaaggggaagccagctctggccacgacatctggtcggagggaagtggggatgtggcatggtagcgtctgttcatccatggaataaaacattattttaccaaaaaaaaaaa

SEQ ID NO: 614 - DNA, 1449 bp, Homo sapiens
atgtcctcccgcagcccccggcccccgccccgccgtagccgccgccgcctgccgcgcccctcctgctgctgctgctgctgccgccgttcgcacctcaacgaggacaccggccgcttcgtgctgctggcggcgctcatcggcctctacctggtggcgggtgccacagtcttctcggcgctcgagagccccggcgaggcggaggcgcgggcgcgctggggcgccacgctgcgcaacttcagcgctgcgcacggcgtggccgagccagagctgcgcgccttcctccggcactacgaggccgcgctggccgccggcgtccgcgccgacgcgctgcgcccgcgctgggacttccccggcgccttctacttcgtgggcaccgtggtgtcaaccataggtttcggcatgaccacccccgcgacggtgggcgggaaggccttcctcatcgcctacgggctgttcggctgcgctgggaccatcctgttcttcaacctcttcctggagcgcatcatctcgctgctggccttcatcatgcgcgcctgccgggagcgccagctgcgccgcagcggcctgctgcccgccaccttccgccgcggctccgcgctctcggaggccgacagcctggcgggctggaagccctcggtgtaccacgtgctgctcatcctgggcctgttcgccgtgctgctgtcctgctgcgcctcggccatgtacaccagcgtggagggctgggactacgtggactcgctctacttctgcttcgtcaccttcagcaccatcggcttcggggacctggtgagcagccagcacgccgcctaccggaaccaggggctctaccgcctgggcaacttcctcttcatcctgctcggcgtgtgctgcatttactcgctcttcaacgtcatctccatcctcatcaagcaggtgctcaactggatgctgcgcaagctgagctgccgctgctgcgcgcgctgctgcccggctcctggcgcgcccctggcccggcgcaatgccatcaccccaggctcccggctgcgccgccgcctggccgcgctcggtgccgaccccgcggcccgcgacagcgacgccgagggccgccgcctctcgggcgagctcatctccatgcgcgacctcacggcctccaacaaggtgtcgctggcgctgctgcagaagcagctgtcggagacggccaacggctacccgcgcagcgtgtgcgtcaacacgcgccagaacggcttctcgggcggcgtgggcgcgctgggcatcatgaacaaccggctggccgagaccagcgcctccaggtagaccgcccgtccgcccgcgccggggaccctctccaggccgcggggccgccgggcgtggtttgcttctctcagtcactgctggcgctttcttaatctttatccaataaaatgaaacaaaaaaaatttttttaaaaaaaaaaaaaaaaaaaaaaaaaaa

SEQ ID NO: 615 - DNA, 2445 bp, Homo sapiens
gacagctggtgtctgaagccgctcgcgcccagggtgaccctgtttgcagcacgatgtctgaagaagaggcggctcagatccccagatccagtgtgtgggagcaggaccagcagaacgtggtgcagcgtgtggtggctctgcccctggtcagggccacgtgcaccgcggtctgcgatgtttacagtgcagccaaggacaggcacccgctgctgggctccgcctgccgcctggctgagaactgcgtgtgcggcctgaccacccgtgccctggaccacgcccagccgctgctcgagcacctgcagccccagctggccactatgaacagcctcgcctgcaggggcctggacaagctggaagagaagcttccctttctccagcaaccttcggagacggtggtgacctcagccaaggacgtggtggccagcagtgtcacgggtgtggtggacctggcccggaggggccggcgctggagcgtggagctgaagcgctccgtgagccatgctgtggatgttgtactggaaaaatcagaggagctggtggatcacttcctgcccatgacggaggaagagctcgcggcactggcggctgaggctgaaggccctgaagtgggttcggtggaggatcagaggagacagcagggctactttgtgcgcctcggctccctgtcagcacggatccgccacctggcctacgagcactctgtggggaaactgaggcagagcaaacaccgtgcccaggacaccctggcccagctgcaggagacgctggagctgatagaccacatgcagtgtggggtgacccccaccgccccggcctgccctgggaaggtgcacgagctgtggggggaatggggccagcgccctccggagagccgccgccggagccaggcagagctggagacgctggtgctgtcccgcagcctgacccaggagctgcagggcacggtagaggctctggagtccagcgtgcggggcctgcccgccggcgcccaggagaaggtggctgaggtgcggcgcagtgtggatgccctgcagaccgccttcgctgatgcccgctgcttcagggacgtgccagcggccgcgctggccgagggccggggtcgcgtggcccacgcgcacgcctgcgtggacgagctgctggagctggtggtgcaggccgtgccgctgccctggctggtgggacccttcgcgcccatccttgtggagcgacccgagcccctgcccgacctggcggacctggtggacgaggtcatcgggggccctgacccccgctgggcgcacctggactggccggcccagcagagagcctgggaggcagagcacagggacgggagtgggaatggggatggggacaggatgggtgttgccggggacatctgcgagcaggaacccgagacccccagctgcccggtcaagcacaccctgatgcccgagctggacttctgacccatgggccagtggaggcggggaggaaaggccacctgcacaccccgatccctgctgccccctggtggccacacgtaagctcgaggccttggccttgacccttctttggaatcaggcccaactccggatctctgaccacctttttggtattggactctcccattttttccttgaacacatggacaaagaggcccgggggagcagggcctcgaaccctattcaggccaacttgagccacaagctgggttcttcacctatgtcctgctccctggctccatgaagcgaatccaaatctttccaagaggctgggcacagtggctcacgcctgtaatcccagcactttgggagtctgaggcaggtggatcatctgaagtcaggagttcgggatcatcctggccaacatgatgaaaccctgtctctacttagaaagaaagaaaaaaaaaaaaaaagccaggtgtggtggtgtgcacctgtagtcccagctagttgtgaggctgacgcagaagaattgcttaaacccgagaggcgcggagcttgcagtgagcagagatcgcgccactgcacaccagcctgggtgacagagcgagactccatctaacaaaaaataatagtaacagcctcccgaagaaatacacattttgcccaatgccttctgtttggggctttgaaaagtgagccctgactgggtgtggtggttgacacctgttatcacagcactttgggaggccaaggtgggaggactgcttgagcccaggagttggaggctgcagtgagccatgatcttgcccctgcgctctcgcctgggtgacagagcaagactctatctcaaaaatgtttttaaaaaatacttcctagggaaacacacattttgccctatttggaactttgaaaagtgagccctcctctgcccatgggccgtgctgctcagcctgccatactcgcttgctttgctgtttgggatttgcctccagaataaaggtcctttttgttgttgaaaaaa

SEQ ID NO: 616 - DNA, 5307 bp, Homo sapiens
aatgctgtgagttccttgttaggcctctccttccgatgaaaagagaaaggaagaatggactacagccaccaaacgtccctagtcccatgtggacaagataaatacatttccaaaaatgaacttctcttgcatctgaagacctacaacttgtactatgaaggccagaatttacagctccggcaccgggaggaagaagacgagttcattgtggaggggctcctgaacatctcctggggcctgcgccggcccattcgcctgcagatgcaggatgacaacgaacgcattcgaccccctccatcctcctcctcctggcactctggctgtaacctgggggctcagggaaccactctgaagcccctgactgtgcccaaagttcagatctcagaggtggatgccccgccggagggtgaccagatgccaagctccacagactccaggggcctgaagcccctgcaggaggacaccccacagctgatgcgcacacgcagtgatgttggggtgcgtcgccgtggcaatgtgaggacgcctagtgaccagcggcgaatcagacgccaccgcttctccatcaacggccatttctacaaccataagacatccgtgttcacaccagcctatggctctgtcaccaacgtccgcatcaacagcaccatgaccaccccacaggtcctgaagctgctgctcaacaaatttaagattgagaattcagcagaggagtttgccttgtacgtggtccatacgagtggtgagaaacagaagctgaaggccaccgattacccgctgattgcccgaatcctccagggcccatgtgagcagatctccaaagtgttcctaatggagaaggaccaggtggaggaagtcacctacgacgtggcccagtatataaagttcgagatgccggtacttaaaagcttcattcagaagctccaggaggaagaagatcgggaagtaaagaagctgatgcgcaagtacaccgtgctccggctaatgattcgacagaggctggaggagatagccgagaccccagcaacaatctgagccatgagaacgaggggatctgggcaccccaggaaccgccattgcccataagacccccaggaagctaggcactttctttccatggaaacatttagacacaaacctccccagctccggccaagccatcatttgctacctggagctggatgtagaagtcagcagacagctccctatccctggacccctgccctccttttttctgctcacaaggacttttgattttagttataaggaggacccaaaatgtgtgtgtgtacatgtgtgtgcacacatggtacgtgtccatgtgcctacctgatactttcacatgtaattaaattccaggcaaccagcacaagagccgtgagcttggcacatgtgctgctcgtgagcaggaaaatcagaggagccactgatctgagtggtatttaggttgaaggaaagatttctcctctcaagtgccagggagcagccacacgtctgtctgtgtttagagagggaagagggttctccaggttcaccatttgggttgtttatatgttggtagaaattctccctgtatgcctagaaggatcagtgaatgtaagagccttggaaattaacaaaataacagccacataaccttgcggcaagtctgatggaaagaaaaagataaaccatccgtggggtagatgcaataagcccacgtatttttacactggaaacgttgattgttttaaatgacaaagacatatgtgatgttctatgtggaaacctgtgaagagtggattctgcctccatctctgcctccatggctacctttaggagacagagaagatcctgtgtgtttctctgtacccagctgacagcctgtctctatggcgcttccttgagtggaaggaaatgtctcaagaaacaaagatctcgctggtgcgtacacagtgctgaccagctagtgtggccagggcctggtggcctggtggccaggaagtttcaggttgaagggaaatgtcgaggctacctgcagatatgacaggtgccttgaacgcagcccatcttcatgtcatcaaaggtcttcctgcacttgaagctggggcgatgtttgcagtcaagaccattctttccaacctctgggttcttgcaagttgccctcaccttgtgtgtggagatgcattccaagaatgaagcctcatcttgctactgagtgtggggttcagggaagctctttaggccacctggtgaaggtgcatggggaggatggagcttctcctcagctcctctgagcagccacctatgtgatctttaaatccaaccccaatgggagaaaagggcaagaacagtctgtgccctgggactcctatcaggaagcttgacaggcagctgggcatcagtgcagctgatatcgtttgaggagggagacagatgcttggacctgggtgcctggctatggagattgaccaagcaagatcaggagctcctgatagcaggcgtctttgagcctagctggggtagaggcactgcccatctcttctccaccttctctccacagaatgtttgcagagctgggcagttgaggaaaggacagcccctggttggtgcctccaaaggaaggtggacttttttggtggagacgtttctgccctgggcaccctcctgcccccgattcatacctatggcttcttgagaaggctcacagctgtggtcttaacgtagactgcagaaagatggcatgcggcccctggcatttcgccaagggttttatagcaagtctccttcctccatagggacagcagcaccagccctgtggggcatggagtggaagcccagaagggcttctgcaagctgcacagaactggggtaagaagacaaagagtagccaccgggagaggcttcctttgttacagctgggaaagaacagttctgtgaatgcaaacacctcctgagttttgcaattgagaaaatgatttggagaacttctcttctggtaatttttattttgaatgttcagggccttagttggccccagtaattctccttggaggacttgggagaagaatttccacaaagcaaactactaaccactagctcttactggacagcgatttctggcttataagagttctctttgatttgcactagcactacgatagtgttagatggggaaatactgcaacatgtccagttggccagatcactttccaagggagcgatactaaggcagactcagctttttaaagatgggaggtcaggaggtggaagtgagaggagatcccatctcacacaacacacttccacgtaatgcagaccacacttttccattttgtcctgccctcttgagaggtcatttctcacgtcctaagaacctgatcagaaattttggaagggttctttgaaatagcagcagttgaaacagagacactttgccacagtgtggagcagattttctcactggtatcacatggtcttgcagttttgaactcttcgaccgatttgtgggagtttatgtaattgcgtgcaatgaacctgaaattgtgtaaaggacaaaagaccagtttatagggttgggttttttttccaacttgtgaaaagcagtttagctgcatctgtctccccaccacccccaccccgggaggggcttatgttacaaggtgatcaagtgaaggaaaaacctgagcctatctggctgggatggtggaattaagcacaaggtcacattctctgtgatcacatgagagggaaggtgatgacttaaatggcagggggtggggattatcttggggagaggctgaaaagcacaaaagatagtcttccctgtacgtattggtgaagaacgtgcacaaggctggatggacttcaacttggagttgagttgaggcaagaggatttctggatattagtcacccatctgcaagaaaaatgctgaggcctcgggtcaagattttgatctgagacatgctgatgcttcaaggagaaatattttcacaatcctctcttccctcaccagaagagaacagtactctctcctagaaacctctaggtaaacacattttatcctaatatcggtagcatataatgccccccccaaaatatctgttttccatgcaaaaaagtctcaacaagaagtctgtggagttgagtggttacttcaaagtgtcaggagagtgaagaaattggccacagaagagcaagaagctctcttaagaaaagggaattctctttaaagaaaccaccaccaacaacaaaacaaccaaaaaccatgttttatgtcaaagctctgtagcacagagaatgtggtgtcacagatacatcgccgagagaggtttctttctttcttttttttttttttgagacagagtctggttctgtttcccaggctggagtgcagtggtgggatctcagctcactgcaacatccgcctctggggttcaagtgattctcctgtctcagcctcccaagtagctggaattacagggacccgccaccacgcccggctaatttttttgtgtggttttagtagaggtggggtttcaccatcttggccaggctggtcttgaactcctgacctcgtgatccacccgcctaggcctcccaaagtgttgggattacaggcgtgagccactgtgcccagccaaaagagaaatttctacatgaacaaggcaatttcagtgtcttacagcggccaaaccatgacgtgaagaatgagataggagacaggagatcaccataagcgtccctgatatagcagcacacattttcacgtttccacttaaatcgttttgcacaaagtcttgcttcgctcagatgagatgagatatgatttcctagagatgtaaaaataagaatgaatgtggcgcccccttcttccagatgtaatagaaagctctgccctatcacaaggggggtgttgaagcgccccttgtgttttaactgtatttaactgagcacaagatgcacaagctgtggtgggaaaccctcagtttacctttggagtcttccctgcagatcgcagacctgtttccaggctgatgtttctggtgtgtaattgctagcgtttctgaagggttttcccaattgttttagccttgtgaagtattcttaattataacttgcctttcagcgatggtacatgacttgattcaacgtttggttctgaacttacacactgatgcgtttactcatctaacataatctgacagggcctcagcaagggagccatacatttttgtaacattttgatatgttttaatgcatctgacttagatcttactgaaataaagcacttttcaaagagaaaaaaaaaaaaaaaaaaaaaaa

SEQ ID NO: 617 - DNA, 2300 bp, Homo sapiens
aggaaagtggagggggaggcggtggcgacgtccagcctgagaacctcaagagagggaggtgacgggacgctgagaggaagagacctgggaaattaagtttcttgcggagtacggtggggattgcagctgctgagcagggattctggaaagcattgcgtacctgagcccccagcatggcgggcctaaagcggcgggcaagccaggtgtggccagaagagcatggtgagcaggaacatgggctgtacagcctgcaccgcatgtttgacatcgtgggcactcatctgacacacagagatgtgcgcgtgctttctttcctctttgttgatgtcattgatgaccacgagcgtggactcatccgaaatggacgtgacttcttattggcactggagcgccagggccgctgtgatgaaagtaactttcgccaggtgctgcagctgctgcgcatcatcactcgccacgacctgctgccctacgtcaccctcaagaggagacgggctgtgtgccctgatcttgtagacaagtatctggaggagacatcaattcgctatgtgacccccagagccctcagtgatccagaaccaaggcctccccagccctctaaaacagtgcctccccactatcctgtggtgtgttgccccacttcgggtcctcagatgtgtagcaagcggccagcccgagggagagccacacttgggagccagcgaaaacgccggaagtcagtgacaccagatcccaaggagaagcagacatgtgacatcagactgcgggttcgggctgaatactgccagcatgagactgctctgcagggcaatgtcttctctaacaagcaggacccacttgagcgccagtttgagcgctttaaccaggccaacaccatcctcaagtcccgggacctgggctccatcatctgtgacatcaagttctctgagctcacctacctcgatgcattctggcgtgactacatcaatggctctttattagaggcacttaaaggtgtcttcatcacagactccctcaagcaagctgtgggccatgaagccatcaagctgctggtaaatgtagacgaggaggactatgagctgggccgacagaaactcctgaggaacttgatgctgcaagcattgccctgacctattccctcttctcactttggggactgttcccatcacccacctctggagcttacactgttctggggtttgttctctacccttccaaccaatcacacccctgcctttttttttttttttttaaagaaaaagacaaaagaaagtggaagtggtattccccacccctccctgcacccatgtgcctgggcttcccctttatttcccttttccatttaccccgtaatgtgtctctacagctaccttaccactgagccgtaagacaaatgtataggaagaagcaaagtctacagcacatagtctttgtaagggattgatgtgaacacttttttttggatgcactaaggagttatcaatacttctggctttatgagagctcttaaattttgtctaaaaaaccaaagggctgtgagtaagggagctatgtggaaagtgggactctgaagtgtattttgaaaattaatcgccaccctcttccaaattatagaattttttaaaaacaagctgtggccctttccactctctcctggcctctggtgctgctcctctctgccgcctttcctccattccatggcttgaaacctctgcctgatgtggctccttcctttttcccatttgtcaaaccctcttcaaaggaggaacagataagactgggtcagcctagtcatgcctcccaactgtggtggtatatgtgtacacacatacacagggtggatggagaagaggttgctgattaaaatacactccccctataaaggggaagggggagtgtgacactttctttccatgttcaagtgaaaataaataatgtaccctgcagcccttttcccctttgctttcttctggcttgggcaaagggcatcataggtgtaagtgaagtaattcctttttccttccccctcctccactcctacgcccactcccatgcttgggagaatggggctgggacatgcactgagtgttgcacttttatttaggtagggaggcatgttgaatgagccaggaggtctagaactggagcttagtccagctggtacaataccaactccccttctagttcccaaaggcgatgtccagacacagactttatgattattatatttttcaatgccagtgctgctcagccctcagcagaacttcagtttccatgaaataaacaatgactatataaaa

SEQ ID NO: 618 - DNA, 1398 bp, Homo sapiens
agcggaggggcgccctaacgaacccgggatacggtctgttcctagtccgctccggaaatgcaactgcgtacgggctggccgcgtaatcgtgacgacagcgcgccagcgccggctagccggacgccctaggcttccgcgagatcttcggtgggggtacgggtgttttacgccaggacgctgatgcgtttgggttctcgtctgcagaccctctggacctggtcacgattccataatgtaccacaacagtagtcagaagcggcactggaccttctccagcgaggagcagctggcaagactgcgggctgacgccaaccgcaaattcagatgcaaagccgtggccaacgggaaggttcttccgaatgatccagtctttcttgagcctcatgaagaaatgacactctgcaaatactatgagaaaaggttattggaattctgttcggtgtttaagccagcaatgccaagatctgttgtgggtacggcttgtatgtatttcaaacgtttttatcttaataactcagtaatggaatatcaccccaggataataatgctcacttgtgcatttttggcctgcaaagtagatgaattcaatgtatctagtcctcagtttgttggaaacctccgggagagtcctcttggacaggagaaggcacttgaacagatactggaatatgaactacttcttatacagcaacttaatttccaccttattgtccacaatccttacagaccatttgagggcttcctcatcgacttaaagacccgctatcccatattggagaatccagagattttgaggaaaacagctgatgactttcttaatagaattgcattgacggatgcttaccttttatacacaccttcccaaattgccctgactgccattttatctagtgcctccagggctggaattactatggaaagttatttatcagagagtctgatgctgaaagagaacagaacttgcctgtcacagttactagatataatgaaaagcatgagaaacttagtaaagaagtatgaaccacccagatctgaagaagttgctgttctgaaacagaagttggagcgatgtcattctgctgagcttgcacttaacgtaatcacgaagaagaggaaaggctatgaagatgatgattacgtctcaaagaaatccaaacatgaggaggaagaatggactgatgacgacctggtagaatctctctaaccatttgaagttgatttctcaatgctaactaatcaagagaagtaggaagcatatcaaacgtttaactttatttaaaaagtataatgtgaaaacataaaatatattaaaacttttctattgttttctttccctttcacagtaactttatgtaaaataaaccatcttcaaaagagctagaataaaaaaaaaaaaaa

SEQ ID NO: 619 - DNA, 2823 bp, Homo sapiens
gcgcggcgctgctgggttctccgaggcgacctggccgccggccgctcctccgcgcgctgttccgcacttgctgccctcgcccggcccggagcgccgctgccatgcggctggcgctgctctgggccctggggctcctgggcgcgggcagccctctgccttcctggccgctcccaaatataggtggcactgaggagcagcaggcagagtcagagaaggccccgagggagcccttggagccccaggtccttcaggacgatctcccaattagcctcaaaaaggtgcttcagaccagtctgcctgagcccctgaggatcaagttggagctggacggtgacagtcatatcctggagctgctacagaatagggagttggtcccaggccgcccaaccctggtgtggtaccagcccgatggcactcgggtggtcagtgagggacacactttggagaactgctgctaccagggaagagtgcggggatatgcaggctcctgggtgtccatctgcacctgctctgggctcagaggcttggtggtcctgaccccagagagaagctataccctggagcaggggcctggggaccttcagggtcctcccattatttcgcgaatccaagatctccacctgccaggccacacctgtgccctgagctggcgggaatctgtacacactcagaagccaccagagcaccccctgggacagcgccacattcgccggaggcgggatgtggtaacagagaccaagactgtggagttggtgattgtggctgatcactcggaggcccagaaataccgggacttccagcacctgctaaaccgcacactggaagtggccctcttgctggacacattcttccggcccctgaatgtacgagtggcactagtgggcctggaggcctggacccagcgtgacctggtggagatcagcccaaacccagctgtcaccctcgaaaacttcctccactggcgcagggcacatttgctgcctcgattgccccatgacagtgcccagctggtgactggtacttcattctctgggcctacggtgggcatggccattcagaactccatctgttctcctgacttctcaggaggtgtgaacatggaccactccaccagcatcctgggagtcgcctcctccatagcccatgagttgggccacagcctgggcctggaccatgatttgcctgggaatagctgcccctgtccaggtccagccccagccaagacctgcatcatggaggcctccacagacttcctaccaggcctgaacttcagcaactgcagccgacgggccctggagaaagccctcctggatggaatgggcagctgcctcttcgaacggctgcctagcctaccccctatggctgctttctgcggaaatatgtttgtggagccgggcgagcagtgtgactgtggcttcctggatgactgcgtcgatccctgctgtgattctttgacctgccagctgaggccaggtgcacagtgtgcatctgacggaccctgttgtcaaaattgccagctgcgcccgtctggctggcagtgtcgtcctaccagaggggattgtgacttgcctgaattctgcccaggagacagctcccagtgtccccctgatgtcagcctaggggatggcgagccctgcgctggcgggcaagctgtgtgcatgcacgggcgttgtgcctcctatgcccagcagtgccagtcactttggggacctggagcccagcccgctgcgccactttgcctccagacagctaatactcggggaaatgcttttgggagctgtgggcgcaaccccagtggcagttatgtgtcctgcacccctagagatgccatttgtgggcagctccagtgccagacaggtaggacccagcctctgctgggctccatccgggatctactctgggagacaatagatgtgaatgggactgagctgaactgcagctgggtgcacctggacctgggcagtgatgtggcccagcccctcctgactctgcctggcacagcctgtggccctggcctggtgtgtatagaccatcgatgccagcgtgtggatctcctgggggcacaggaatgtcgaagcaaatgccatggacatggggtctgtgacagcaacaggcactgctactgtgaggagggctgggcaccccctgactgcaccactcagctcaaagcaaccagctccctgaccacagggctgctcctcagcctcctggtcttattggtcctggtgatgcttggtgccagctactggtaccgtgcccgcctgcaccagcgactctgccagctcaagggacccacctgccagtacagggcagcccaatctggtccctctgaacggccaggacctccgcagagggccctgctggcacgaggcactaagtctcaggggccagccaagcccccacccccaaggaagccactgcctgccgacccccagggccggtgcccatcgggtgacctgcccggcccaggggctggaatcccgcccctagtggtaccctccagaccagcgccaccgcctccgacagtgtcctcgctctacctctgacctctccggaggttccgctgcctccaagccggacttagggcttcaagaggcgggcgtgccctctggagtcccctaccatgactgaaggcgccagagactggcggtgtcttaagactccgggcaccgccacgcgctgtcaagcaacactctgcggacctgccggcgtagttgcagcgggggcttggggaggggctgggggttggacgggattgaggaaggtccgcacagcctgtctctgctcagttgcaataaacgtgacatcttgggagcgttcaaa

SEQ ID NO: 620 - DNA, 1538 bp, Homo sapiens
ggacttccggcgggtgacgcgcccgggttcggctacaaaagaggacggctgcggcgcgccgggcggaactttccagaacgctcggtgagaggcggaggagcggtaactaccccggctgcgcacagctcggcgctccttcccgctccctcacacaccggcctcagcccgcaccggcagtagaagatggtgaaagaaacaacttactacgatgttttgggggtcaaacccaatgctactcaggaagaattgaaaaaggcttataggaaactggctttgaagtaccatcctgataagaacccaaatgaaggagagaagtttaaacagatttctcaagcttacgaagttctctctgatgcaaagaaaagggaattatatgacaaaggaggagaacaggcaattaaagagggtggagcaggtggcggttttggctcccccatggacatctttgatatgttttttggaggaggaggaaggatgcagagagaaaggagaggtaaaaatgttgtacatcagctctcagtaaccctagaagacttatataatggtgcaacaagaaaactggctctgcaaaagaatgtgatttgtgacaaatgtgaaggtagaggaggtaagaaaggagcagtagagtgctgtcccaattgccgaggtactggaatgcaaataagaattcatcagataggacctggaatggttcagcaaattcagtctgtgtgcatggagtgccagggccatggggagcggatcagtcctaaagatagatgtaaaagctgcaacggaaggaagatagttcgagagaagaaaattttagaagttcatattgacaaaggcatgaaagatggccagaagataacattccatggtgaaggagaccaagaaccaggactggagccaggcgatattatcattgtgttagatcagaaggaccatgctgtttttactcgacgaggagaagaccttttcatgtgtatggacatacagctcgttgaagcactgtgtggcttccagaagccaatatctactcttgacaaccgaaccatcgtcatcacctctcatccaggtcagattgtcaagcatggagatatcaagtgtgtactaaatgaaggcatgccaatttatcgtagaccatatgaaaagggtcgcctaatcatcgaatttaaggtaaactttcctgagaatggctttctctctcctgataaactgtctttgctggaaaaactcctacccgagaggaaggaagtggaagagactgatgagatggaccaagtagaactggtggactttgatccaaatcaggaaagacggcgccactacaatggagaagcatatgaggatgatgaacatcatcccagaggtggtgttcagtgtcagacctcttaatgggccagtgaataacactcactgctggcatttaatgtgcagtagtgaatgagtgaaggactgtaatcataatatgctcactacttgctcttgtttttgttttaataaactatagtagtgttttaaaaagttaaatgaagaataaacgcaaatataaaagc

SEQ ID NO: 621 - DNA, 983 bp, Homo sapiens
agaattcgagggggtggggctatgcccggacagaggatcgcctcgctggcctactctctcctcccgtacggcgccggaatcccagctccacttaccaggccgcggctaccccgccgtcccccccgactcccgccaccccgctctctcaggctcttcaggatccaagtccgtaggccctttaaggggtctagttgccgtttgcgaggccctgggactttggtcccagacagcggggatccggatggcttccgtgcggatccgagaggccaaggagggagactgtggagatatcctgaggctgattcgggagctagccgaattcgaaaaactctcggatcaggtgaagatcagtgaagaagccctgagagcagatggctttggagacaatcctttctatcactgtttggtagcagagattcttccagcgcccgggaagctactggggccctgcgtggtgggctatgggatatactatttcatctacagtacatggaagggacgcaccatttatctggaggatatctatgtgatgccggaatatcggggtcaagggattggttccaaaataatcaaaaaggtggctgaggtggccttggataagggctgctcccaattccgcctggccgtcctggactggaaccagagggccatggacttgtacaaggccctaggagcccaagatctgacggaagctgagggctggcacttcttctgctttcaaggagaggcaacgagaaagttggcaggaaagtgacgccatccctaggaggatctctgtcttgagtttctccttccccatcagctgaagcactcttcagagactacgtccacagacactgatgctgaggcctccctggaggaaggagggttaggggtgcctatcctcaagtattggaagagcagaattgagggagagacctttcttccttgttgagggtgaaaaataaataagaattacatgtcaaaaaaaaaaaaaaaaaaaa

SEQ ID NO: 622 - DNA, 5015 bp, Homo sapiens
tcttgcatctcctgcgtgggatgtgcgtgggatggcgccaacccgctagtatataaggactcgacctgggcgcctccagggaaacgctaagggggcttcggaagcgctggagcttgagaggtcagagagggtccttgcccccagcctgggactccggagttgcgtttctacccgtgcttcagggtctagcccagccgaatccgcgtcgggctgtaactcgagtgccagtttcagctgtgagttcaacatggaggcaaatcagtgccccctggttgtggaaccatcttacccagacctggtcatcaatgtaggagaagtgactcttggagaagaaaacagaaaaaagctgcagaaaattcagagagaccaagagaaggagagagttatgcgggctgcatgtgctttattaaactcaggaggaggagtgattcgaatggccaagaaggttgagcatcccgtggagatgggactggatttagaacagtctttgagagagcttattcagtcttcagatctgcaggctttctttgagaccaagcaacaaggaaggtgtttttacatttttgttaaatcttggagcagtggccctttccctgaagatcgctctgtcaagccccgcctttgcagcctcagttcttcattataccgtagatctgagacctctgtgcgttccatggactcaagagaggcattctgtttcctgaagaccaaaaggaagccaaaaatcttggaagaaggaccttttcacaaaattcacaagggtgtataccaagagctccctaactcggatcctgctgacccaaactcggatcctgctgacctaattttccaaaaagactatcttgaatatggtgaaatcctgccttttcctgagtctcagttagtagagtttaaacagttctctacaaaacacttccaagaatatgtaaaaaggacaattccagaatacgtccctgcatttgcaaacactggaggaggctatctttttattggagtggatgataagagtagggaagtcctgggatgtgcaaaagaaaatgttgaccctgactctttgagaaggaaaatagaacaagccatatacaaactaccttgtgttcatttttgccaaccccaacgcccgataaccttcacactcaaaattgtgaatgtgttaaaaaggggagagctctatggctatgcttgcatgatcagagtaaatcccttctgctgtgcagtgttctcagaagctcccaattcatggatagtggaggacaagtacgtctgcagcctgacaaccgagaaatgggtaggcatgatgacagacacagatccagatcttctacagttgtctgaagattttgaatgtcagctgagtctatctagtgggcctccccttagcagaccagtgtactccaagaaaggcctggaacataaaaaggaactccagcaacttttattttcagtcccaccaggatatttgcgatatactccagagtcactctggagggacctgatctcagagcacagaggactagaggagttaataaataagcaaatgcaacctttctttcggggaattttgatcttctctagaagttgggctgtggacctgaacttgcaggagaagccaggagtcatctgtgatgctctgctgatagcacagaacagcacccccattctctacaccattctcagggagcaagatgcagagggccaggactactgcactcgcaccgcctttactttgaagcagaagctagtgaacatggggggctacaccgggaaggtgtgtgtcagggccaaggtcctctgcctgagtcctgagagcagcgcagaggccttggaggctgcagtgtctccgatggattaccctgcgtcctatagccttgcaggcacccagcacatggaagccctgctgcagtccctcgtgattgtcttactcggcttcaggtctctcttgagtgaccagctcggctgtgaggttttaaatctgctcacagcccagcagtatgagatattctccagaagcctccgcaagaacagagagttgtttgtccacggcttacctggctcagggaagaccatcatggccatgaagatcatggagaagatcaggaatgtgtttcactgtgaggcacacagaattctctacgtttgtgaaaaccagcctctgaggaactttatcagtgatagaaatatctgccgagcagagacccggaaaactttcctaagagaaaactttgaacacattcaacacatcgtcattgacgaagctcagaatttccgtactgaagatggggactggtatgggaaggcaaaaagcatcactcggagagcaaagggtggcccaggaattctctggatctttctggattactttcagaccagccacttggattgcagtggcctccctcctctctcagaccaatatccaagagaagagctcaccagaatagttcgcaatgcagatccaatagccaagtacttacaaaaagaaatgcaagtaattagaagtaatccttcatttaacatccccactgggtgcctcgaggtatttcctgaagccgaatggtcccagggtgttcagggaaccttacgaattaagaaatacttgactgtggagcaaataatgacctgtgtggcagacacgtgcaggcgcttctttgataggggctattctccaaaggatgttgctgtgcttgtcagcaccgcaaaagaagtggagcactataagtatgagctcttgaaagcaatgaggaagaaaagggtggtgcagctcagtgatgcatgtgatatgttgggtgatcacattgtgttggacagtgttcggcgattctcaggcctggaaaggagcatagtgtttgggatccatccaaggacagctgacccagctatcttacccaatgttctgatctgtctggcttccagggcaaaacaacacctgtatatttttccgtggggtggccattaggaagaactccaaatcaaaatgctatgtaaatgtctatgggtgacagtctgctgatggtagaaacctttctttttagttcacaagtcagagatttggacggagctgacacaaagagtttggagctcccccatttctggctctcctttcaggggttccttccccaaccctttcagcagcggtggctgccccccattctgacccctgactcttccagccagaaagatggtggttttctaaaggaactttagctgtcctgcacaatgccgatctgtgtcttgcattttgggtaaaagccataaaaataagaaactcagcctgtggcctttctttcttccaaggctgggcttctttttttaagtgacttcatgcagtttgttgcttttaaaaatttgtccagaatcgttttctgcagaagcatggtctgttaggagcttactggccgtagcagaagcaattgtttcctgaattcttgacatttatctttgctgtattcatttagggcttgggagagtccgaagataattcagtcactgtcagattaataattttgtcaggacaaagaataccgttatgattatttaatcctttaaaattgtggtctccagagcttgttctcagaatggcccagaccaagccttaattgtgatagtgaatattaatggtcactttaaggagaaattataggccaagatgaaatgaacataaacctgtttgccctggctttcagtggaagatgatattagagaccaaaatctggttctgaaggtgtgtatcagccctaaggtgaaccagacttgggaaagattgtctttaaaaatcaatgagtttatgttttaacttctcagcttagttctatgcattgctctataacacacctagttaagttttatgttattcttgaactgtgattttttttctatttactttcatggtttggtgggccattgttatggactgaatgtttgtgtcccacccttcacccccaaattcccgtgttgaagccccaacctgcactgtggagctggggctgctaaggaagtaattaaggttacatgaagtcatggtggggctctgatctgctaaggttggtgtccttatagggagagaccccagagagcttgttccctccctccctgtgcatgcaaacaagagggcatgggagcacacagagagatggcagccacctacaagccaagaggagaagcctcacaatcaaactctcgctgctggcgagagtcttggactctgtcttggacttccagcctccagactgtgagaaacaaatttctgttgtttcagcttctcagtctctggtgttttgttattgcagcctgagaacacagctgtacgattatttgtcaaacagaaaacactgatacttaacaatgctaatgcaattatttatttgcttttcagtctctacaaaacgttctaaaacactaatctaaatattaacagtaaaatatttgcataactaatggaaactaagaaatcatatgaccaatatttcacttattggtaatcttactctactgatttccccccagactgtgatttttgaacttccttgcctttctcctgtctttctgtgtttattcatggaattccagttatctgggcttgaaattgcaggctctcctaacttaagcaaaatctgacagatcagcaaaatgagataaatgtttcttttttctttctgactgcattaaatcagatacaactcagcattaaaaagctatctttgtaaatgttgttactaataaattagtcttataagatccctggactttggagttgttgcaatgtctttgagagtaattctttaaaagtctaatttcgactggttgtatctctttatgatttattgccccactaacaatatttgaaacaatataatattttaaaatgtataaataattatgaatttttgtttagaacaaagaggattactgatatttgtttccctatgaatggcaaaaggtttagcttactactgcatttctgttttaaataaaaagttgagagtttgtgtctcattaaactgaaaaaaaaaaaaaaaaaa

SEQ ID NO: 623 - DNA, 2099 bp, Homo sapiens
aagtgcccatgaggaggtggagagaggctgcaggcaccgacctgccttcagcttccggcttggcaaactccgaaaactttcacttttcttttctcggaagcccggccccttactgcgtttgtcaaagcacagacttcctgttttgcctgctagcatctccctgtaactctcccaatcttgaggagtgatccctgtcccagcccctggaaaggggcaggaacgacaaactcaaagtccaggatgttcaccatgacaagagccatggaagaggctctttttcagcacttcatgcaccagaagctggggatcgcctatgccatacacaagccatttcccttctttgaaggcctcctagacaactccatcatcactaagagaatgtacatggaatctctggaagcctgtagaaatttgatccctgtatccagagtggtgcacaacattctcacccaactggagaggacttttaacctgtctcttctggtgacattgttcagtcaaattaacctgcgtgaatatcccaatctggtgacgatttacagaagcttcaaacgtgttggtgcttcctatgaacggcagagcagagacacaccaatcctacttgaagccccaactggcctagcagaaggaagctccctccataccccactggcgctgcccccaccacaaccccctcaaccaagctgttcaccctgtgcgccaagagtcagtgagcctggaacatcctcccagcaaagcgatgagatcctgagtgagtcgcccagcccatctgaccctgtcctgcctctccctgcactcatccaggaaggaagaagcacttcagtgaccaatgacaagttaacatccaaaatgaatgcggaagaagactcagaagagatgcccagcctcctcactagcactgtgcaagtggccagtgacaacctgatcccccaaataagagataaagaagaccctcaagagatgccccactctcccttgggctctatgccagagataagagataattctccagaaccaaatgacccagaagagccccaggaggtgtccagcacaccttcagacaagaaaggaaagaaaagaaaaagatgtatctggtcaactccaaaaaggagacataagaaaaaaagcctcccaggagggacagcctcatctagacacggaatccaaaagaagctcaaaagggtggatcaggttcctcaaaagaaagatgactcaacttgtaactccacggtagagacaagggcccaaaaggcgagaactgaatgtgcccgaaagtcgagatcagaggagatcattgatggcacttcagaaatgaatgaaggaaagaggtcccagaagacgcctagtacaccacgaagggtcacacaaggggcagcctcacctgggcatggcatccaagagaagctccaagtggtggataaggtgactcaaaggaaagacgactcaacctggaactcagaggtcatgatgagggtccaaaaggcaagaactaaatgtgcccgaaagtccagatcgaaagaaaagaaaaaggagaaagatatctgttcaagctcaaaaaggagatttcagaaaaatattcaccgaagaggaaaacccaaaagtgacactgtggattttcactgttctaagctccccgtgacctgtggtgaggcgaaagggattttatataagaagaaaatgaaacacggatcctcagtgaagtgcattcggaatgaggatggaacttggttaacaccaaatgaatttgaagtcgaaggaaaaggaaggaacgcaaagaactggaaacggaatatacgttgtgaaggaatgaccctaggagagctgctgaagagtggacttttgctctgtcctccaagaataaatctcaagagagagttaaatagcaagtgaatttctactaccctctcagtcaccatgttgcagactttccctgtctggaggctcaccttagagcttctgagtttccaagctctgagtcacctccacatttgggcatggcatcttcaaaacaattaatttgcatagttaatttgggatggggaagcaaatgactctaaaataaaaattaaatgaaaaagctcaaaaaaaaaaaaaaaaaa

SEQ ID NO: 624 - DNA, 4236 bp, Homo sapiens
agttccggccaggcagacaaaagtttgggagagaagttcggtctgtggctagcgtgagagctaggggggcgggggccggggagagtggggcagtcgggcgagtcgacgcgtgaacagatagacctgcggactggacagccgcggccagagaccctgctagccccgctcagccccagatgcgcggggggacgcagcccctcccgctgggggatgctgtgggattcctggcgcagggcatccaggccgcccgctaagcccctgtgcctcccctgtgcccctggggaaccagagtccggctgcagggaaagagaaccggccgccgagacgccgcagggtgccaggcggggagggggcgagaggccccaggcccgagggcatggagcggttaggagagaaagccagtcgcctgctggagaagttcggccgcagaaagggtgaatctagccggtctgggtctgacgggacccccgggccgggcaaggggcgcctaagtgggttggggggacctaggaagtcagggccccgaggagctactgggggacctggggatgagccgttggagccggcccgggagcaaggttccctggacgctgagcgaaatcagcgcggctcctttgaggcgccgcgctacgaaggctcttttcccgcggggccgccgcccacccgggccttgcctctacctcagtcgttgccccccgattttcggctggagcccacggccccggccctcagcccccgctctagcttcgccagtagctcggccagcgacgcgagcaagccgtccagcccccggggcagcctgctgctggacggggcgggggctggcggagctggaggtagccggccctgcagcaatcgcaccagcggcatcagcatgggctacgaccagcgccacgggagccccttgccagcggggccgtgcctgtttggcccacccctggccggagcaccggcaggctattctcccggaggggtcccgtccgcctacccggagctccacgccgccctggaccgattgtacgctcagcggcccgcggggttcggctgccaggaaagccgccactcgtatcccccggccctgggcagccctggagctctagccggggccggagtgggagcggcggggcccttggagagacggggggcgcaacccggacgacactctgtgaccggctacggggactgcgccgtgggcgcccggtaccaggacgagctaacagctttgcttcgcctgacggtgggcaccggtgggcgagaagccggagcccgcggagaaccctcggggattgagccgtcgggtctggaggagccaccaggtcctttcgttccggaggccgcccgggcccggatgcgggagccagaggccagggaggactacttcggcacctgtatcaagtgcaacaaaggcatctatgggcagagcaatgcctgccaggccctggacagcctctaccacacccagtgctttgtttgctgctcttgtgggcgaactttgcgttgcaaggctttctacagtgtcaatggctctgtgtactgtgaggaagattatctgttttcagggtttcaggaggcagctgagaaatgctgtgtctgtggtcacttgattttggagaagatcctacaagcaatggggaagtcctatcatccaggctgtttccgatgcattgtttgcaacaagtgcctggatggcatccccttcacagtggacttctccaaccaagtatactgtgtcaccgactaccacaaaaattatgctcctaagtgtgcagcctgtggccaacccatcctcccctctgagggctgtgaggacatcgtgagggtgatatccatggaccgggattatcactttgagtgctaccactgtgaggactgccggatgcagctgagtgatgaggaaggctgctgctgtttccctctggatgggcacttgctctgccatggttgccacatgcagcggctcaatgcccgacaaccccctgccaactatatctgagctgcaatcactgctgctgctgtcaccctgcagacaaactgctgtggccagtgggcccctctgaggccagccaaggcaaagaatgcactctgcaggcctggcagaagagtcctctggggaggaccccaagggccggagacccaaagatcatgatattccaaatggattgtggaagagaaaccttatatttaccagggtgggggcgactggcctttttcccatgtgtgcagtctgagcttaggcacacacaggagggttccaggactttctgaacatctgattctgtatcttcagtatatatattttgtttgttttagagatgggatctcaccatgttgcccaggctagtcttgaactcctgggctcgaatgatcctcccaccttggcctcccaaagtgctgggattataggcgtaagccactgtgtctggcctagtgtatgattatgcatgagtcacgcaatgttctggtcctggattccaggagtagaggacctagctttaaatcaattagtttcagctaaactgactagaaccaggtcaaagtgtaattctccctccagctcccccaaaccccagagttttggggttgtggttgatgcagtgtgggatgtccctgagaggtagcaagtctagggtggtgagttcctgctaggcaaccaaatttaagctcctcactttttgtgacacatggtgtcagatatggggtcccgcacctatatctggatgaagaggtagaaactctggacctcattaatgagttatttcttggccttcttctaaggactaggagagctccttatctgtctgagaatggggaccagctctgagtggggttgctgcctgtattccctgtttctcaggaacttacatgggtctggggaggctaggtaggtgattgtacgtggttgctcttctccttggctgggggaggtaatgagcagatctctgtgggtgtggagcttgttggggggatgtctaggaagcttcagcttagccacattcccaagtttaggtgcactgagccatatagcccagtgtatgcatgtgtgggtgtgttcatgcacacacacactctctctcttgtctctctgtctctctctcactctttcttactctcttctcaggtcacttgtacacttggtttcctagtagaagctcacttgccacctctcagaggggtcccggattgcatccatcacaatcccaaaactagagttggggggaactggagggagcaaaacactgatttgatactagtcagtttgcttgaaactagttcacctaaagctagatctcttaaaaccaatttactgaaaacttgtttgcttaaagttaatgacttaatgactaatttgccaaaagctcaattcctattttggtgtgtttatatccatttaggtgtcctattcttttttgtcatgctttggatatttcaaggatttatatctattcatccaagagtacttctgagctattatcagcaacataaatttatcaaatttgcagcactttgtaaatgatgagattgcttcctacctttatggatgtctttttctatgttatctaccattcaaaaacttttttaaaaagtttaaagtttctagcaataaatacaattggtacagacattttgtgtatcatttttttgtttcttaatccaatattcctttacaaattaaatgccttgaaaaatataatggagttcaatgtgattttgatgctttggtctaacttctacattcctactgttaaaaaggccagtatatcttaaacaaatgaataggcatgaggcatattcagttgacttacaatgaaaagttatacagacaacagtaataactaaaagggtgaatctgctaaatccttttgaaatgctgcagatttgataaatatttattttagactaattggttttaggtgaattggttttaggcaaattaatttagtaatctttgatctttagtcttcattttctgtcactcagtgagtttcttactggaaatgatgactcctgacaacagaatttccacatttgggggctattctaaggtgactatgccagccaacctgggaaatacataaaagagatctctgagtgagagggaaagaggtcagatttatacaactgagcgccagaggggaaaatgcaccttgttggagtgagaaatgttctgaaactgaattacttcttgtacagctgagatagcttcttctgaactattattaaataagtgaatacaaa

SEQ ID NO: 625 - DNA, 4580 bp, Homo sapiens
gtagttttctggacccacgggacgggcaggagctggagctccgtgccgcctgtactcccgccttcatttcccatcgtgctgaggcgggtggcatggcggagaaggatgacaccggagtttgacgaagaggtggtttttgagaattctccactttaccaatacttacaggatctgggacacacagactttgaaatatgttcttctttgtcaccaaaaacagaaaaatgcacaacagagggacaacaaaagcctcctacaagagtcctaccaaaacaaggtatcctgttaaaagtggctgaaaccatcaaaagttggatttttttttctcagtgcaataagaaagatgacttacttcacaagttggatattggattccgactcgactcattacataccatcctgcaacaggaagtcctgttacaagaggatgtggagctgattgagctacttgatcccagtatcctgtctgcagggcaatctcaacaacaggaaaatggacaccttccaacactttgctccctggcaacccctaatatttgggatctctcaatgctatttgccttcattagcttgctcgttatgcttcccacttggtggattgtgtcttcctggctggtatggggagtgattctatttgtgtatctggtcataagagctttgagattatggaggacagccaaactacaagtgaccctaaaaaaatacagcgttcatttggaagatatggccacaaacagccgagcttttactaacctcgtgagaaaagctttacgtctcattcaagaaaccgaagtgatttccagaggatttacactggtcagtgctgcttgcccatttaataaagctggacagcatccaagtcagcatctcatcggtcttcggaaagctgtctaccgaactctaagagccaacttccaagcagcaaggctagctaccctatatatgctgaaaaactaccccctgaactctgagagtgacaatgtaaccaactacatctgtgtggtgccttttaaagagctgggccttggacttagtgaagagcagatttcagaagaggaagcacataactttacagatggcttcagcctgcctgcattgaaggttttgttccaactctgggtggcacagagttcagagttcttcagacggttagccctattactttctacagccaattcacctcctgggcccttacttactccagcacttctgcctcatcgtatcttatctgatgtgactcaaggtctacctcatgctcattctgcctgtttggaagagcttaagcgcagctatgagttctatcggtactttgaaactcagcaccagtcagtaccgcagtgtttatccaaaactcaacagaagtcaagagaactgaataatgttcacacagcagtgcgtagcttgcagctccatctgaaagcattactgaatgaggtaataattcttgaagatgaacttgaaaagcttgtttgtactaaagaaacacaagaactagtgtcagaggcttatcccatcctagaacagaaattaaagttgattcagccccacgttcaagcaagcaacaattgctgggaagaggccatttctcaggtcgacaaactgctacgaagaaatacagataaaaaaggcaagcctgaaatagcatgtgaaaacccacattgtacagtagtacctttgaagcagcctactctacacattgcagacaaagatccaatcccagaggagcaggaattagaagcttatgtagatgatatagatattgatagtgatttcagaaaggatgatttttattacttgtctcaagaagacaaagagagacagaagcgtgagcatgaagaatccaagagggtgctccaagaattaaaatctgtgctgggatttaaagcttcagaggcagaaaggcagaagtggaagcaacttctatttagtgatcatgccgtgttgaaatccttgtctcctgtagacccagtggaacccataagtaattcagaaccatcaatgaattcagatatgggaaaagtcagtaaaaatgatactgaagaggaaagtaataaatccgccacaacagacaatgaaataagtaggactgagtatttatgtgaaaactctctagaaggtaaaaataaagataattcttcaaatgaagtcttcccccaaggagcagaagaaagaatgtgttaccaatgtgagagtgaagatgaaccacaagcagatggaagtggtctgaccactgcccctccaactcccagggactcattacagccctccattaagcagaggctggcacggctacagctgtcaccagattttaccttcactgctggccttgctgcagaagtggctgctagatctctctcctttaccaccatgcaggaacagacttttggtggtgaggaggaagaacaaataatagaagaaaataaaaatgagatagaagaaaagtaagaaccaagattcatatgaagtgatattagattgttccttttacaaaagtgtttagcttcaagactggaaagggaatatgagtgtaagtttactatatataaagctaagatgtggatttacaggaagaaccctggtttgaataactgatctgaaattagtagttacctgtaaatggcagatcttttaggaaaataagagaaaggtaagggctcttttgaataaactgctgttttatttgtggcacaactgatcaatcttggaaattctttaagtatttttaataagaaatgaattatcatttcttgccagaatttgctaccttaaggtgattgggaaaattctgttgcaagaacattaacatttagtatgactcctttttactgtattcttgcagttaataactgcagctattatgttaataacaagttgtttgtattttatttttgtttataccagtcttaaagatccaggttctgaataaaaaaattaattgatacaattgatgtgtgctggggtttggaactaaaagtagtttcaacagtgcgtgggttatgacatttcttatgtttctttgttcatgtgtgtatttagtagttaattttaagatgtcctagtgatctttaaaagaaaaatattgtaccattttttagaattacactttcacctttctttttgcaattgaaagtgatgatgtcaaagtgggatttctgtactccaaggccccacccccaatttagcaagcagaaaaacgttccttgtatcactttaccttggataattgggtgccattaacacaaacaggtcacaatcctgctgttttctagccctgtccaccataatgagattcaggaaacatcctgtcagcctcctggaaagcatccttgtctccttagtatttcatttacaaactacctcttaacagagactgcttttcaaattggccaatcttacctgttttgtgttgtgattgcattttcaaagagtaattattttcagcatatacagttttgaaacctgtagctcctatgcaataacatagttctatagacattatttgggggaaatgtagtaataactcaatctatgttgctgtcctagaaaggaaattgcatgatgaatctagattgtctttagagtaaagaaacacattcaaattcctgtaacttatcactttcagtgagtaaatttacttataccaaaggggattttttttctttcaggaatctaaggaaatttactttttaacctgagaaaaaaacttggttctgctttatataaacagtagagattattgtactataagtgattttgcctttttgccaaaatcctggaactcatctataattaacctcttcggagcaataccttaggttgggccttgctttactacttagaaatagctaaatttcaattttaaaaatctttgtgtgttataactgttaaattattcaataatacttagggtttactttcttatttaaatcacttatttagtttaccgacttcatttttctttggatttagaagaagcaattatggaaaaacttggtaatctctctcaacctataaccttacacaggaagaattagagtttaataatttttaattcttttattgtatgttacttttattacaccagtttgggggaaaatcttcataaaattgtatcagttttattcagtgttctctaaggtgataccttttaattttgaaagactaaataattttaatcgagaatttccagtctttcagtctgatctatttaattcactacttgttacataatccagtgaaaactctacttgttgaaattatgacataaagatcttgcagctttatttgagtatttgttcttttgtgtagtttccatcttttaaaatatttaaaatattttcaagataaagtattatcttctctgcaaaaattcctggagtaattttctctcataatatttgaagtcagtggttctcagttgtattagtggggtaactacatcaaaataaataaagtcttatttttaaaatgcaaattttagaccatactcccagtgattcttagttggtctttttggaatgagccataggtaatgtttatgtccaataaaatctaggaacctcaaaaaaaaaaaaaaaaaa

SEQ ID NO: 626 - DNA, 1870 bp, Homo sapiens
ctccgagacgggtggggccggagctccaagctggtttgaacaagccctgggcatgtttggcgggaagttggcttagctcggctacctgtggccccgcagttttgtagtccccgccttgtttctccccagaggcctctcaatcctccctccatgatcttcgcatagagcacagtaccccttcacacggaggacgcgatggctcccaagaaacgcccagaaacccagaagacctccgagattgtattacgccccaggaacaagaggagcaggagtcccctggagctggagcccgaggccaagaagctctgtgcgaagggctccggtcctagcagaagatgtgactcagactgcctctgggtggggctggctggcccacagatcctgccaccatgccgcagcatcgtcaggaccctccaccagcataagctgggcagagcttcctggccatctgtccagcaggggctccagcagtcctttttgcacactctggattcttaccggatattacaaaaggctgccccctttgacaggagggctacatccttggcgtggcacccaactcaccccagcaccgtggctgtgggttccaaagggggagatatcatgctctggaattttggcatcaaggacaaacccaccttcatcaaagggattggagctggagggagcatcactgggctgaagtttaaccctctcaataccaaccagttttacgcctcctcaatggagggaacaactaggctgcaagactttaaaggcaacattctacgagtttttgccagctcagacaccatcaacatctggttttgtagcctggatgtgtctgctagtagccgaatggtggtcacaggagacaacgtggggaacgtgatcctgctgaacatggacggcaaagagctttggaatctcagaatgcacaaaaagaaagtgacgcatgtggccctgaacccatgctgtgattggttcctggccacagcctccgtagatcaaacagtgaaaatttgggacctgcgccaggttagagggaaagccagcttcctctactcgctgccgcacaggcatcctgtcaacgcagcttgtttcagtcccgatggagcccggctcctgaccacggaccagaagagcgagatccgagtttactctgcttcccagtgggactgccccctgggcctgatcccgcaccctcaccgtcacttccagcacctcacacccatcaaggcagcctggcatcctcgctacaacctcattgttgtgggccgatacccagatcctaatttcaaaagttgtaccccttatgaattgaggacgatcgacgtgttcgatggaaactcagggaagatgatgtgtcagctctatgacccagaatcttctggcatcagttcgcttaatgaattcaatcccatgggggacacgctggcctctgcaatgggttaccacattctcatctggagccaggaggaagccaggacacggaagtgagagacactaaagaaggtgtgggccagacaaggccttggagcccacacatgggatcaagtcctgcaagcagaggtggcgatttgttaaagggccaaaagtatccaaggttagggttggagcaggggtgctgggacctggggcactgtgggactgggacacttttatgttaatgctctggacttgcctccagagactgctccagagttggtgacacagctgtcccaagggcccctctgtatctagcctggaaccaaggttatcttggaactaaatgacttttctcctctcagtgggtggtagcagagggatcaagcagttatttgatttgtgctcacttttgatatggccaataaaaccataccgactgagaaaaaaaaaaaaaaaaaaaaaa

SEQ ID NO: 627 - DNA, 783 bp, Homo sapiens; identical to SEQ ID NO: 136

SEQ ID NO: 628 - DNA, 1070 bp, Homo sapiens
aataggggaaaataagccagatggataaaggaagtgctggtcaccctggaggtgcactggtttggggaaggctcctggcccccacagccctcttcggagcctgagcccggctctcctcactcacctcaacccccaggcggcccctccacagggcccctctcctgcctggacggctctgctggtctccccgtcccctggagaagaacaaggccatgggtcggcccctgctgctgcccctactgcccttgctgctgccgccagcatttctgcagcctagtggctccacaggatctggtccaagctacctttatggggtcactcaaccaaaacacctctcagcctccatgggtggctctgtggaaatccccttctccttctattacccctgggagttagccacagctcccgacgtgagaatatcctggagacggggccacttccacaggcagtccttctacagcacaaggccgccttccattcacaaggattatgtgaaccggctctttctgaactggacagagggtcagaagagcggcttcctcaggatctccaacctgcagaagcaggaccagtctgtgtatttctgccgagttgagctggacacacggagctcagggaggcagcagtggcagtccatcgaggggaccaaactctccatcacccaggggaacccttccaaaacacagaggagccatatgagaatatcaggaatgaaggacaaaatacagatcccaagctaaatcccaaggatgacggcatcgtctatgcttcccttgccctctccagctccacctcacccagagcacctcccagccaccgtcccctcaagagcccccagaacgagaccctgtactctgtcttaaaggcctaaccaatggacagccctctcaagactgaatggtgaggccaggtacagtggcgcacacctgtaatcccagctactctgaagcctgaggcagaatcaagtgagcccaggagttcagggccagctttgataatggagcgagatgccatctctagttaaaaatatatattaacaataaagtaacaaatttaaaaagataaaaaaa

SEQ ID NO: 629 - DNA, 698 bp, Homo sapiens
ctcaggctcagctccgtctcgctcggtccctcgcttccccgccgggctctagccggccgtctggtggcccgaggtggcggcgggctgggcgcggggcgcgatgagcggcgcctgcacgagctacgtgagcgcagagcaggaggtggtgcgcggcttcagctgcccgcggccggggggcgaggcggccgctgtcttctgctgcggcttccgcgaccacaagtactgctgcgacgacccgcacagcttcttcccctacgagcacagctacatgtggtggctcagcattggcgctctcataggcctgtccgtagcagcagtggttcttctcgccttcattgttaccgcctgtgtgctctgctacctgttcatcagctctaagccccacacaaagttggacctgggcttgagcttacagacagcaggccctgaggaggtttctcctgactgccaaggtgtgaacacaggcatggcggcagaagtgccaaaagtgagccctctccagcagagttactcctgcttgaacccgcagctggagagcaatgaggggcaggctgtgaactccaaacgcctcctccatcattgcttcatggccacagtgaccaccagtgacattccaggcagccctgaggaagcctctgtacccaaccctgacctatgtggaccagtcccataaacattcaataaatgtctccatacca

SEQ ID NO: 630 - DNA, 4743 bp, Homo sapiens
cgcttcatgtggcccggcccgcgacggccggcggctgggagcggcgaggcggcggcggcggcgagtggcggcccgcgaggcccgggaggcggtggccgaggcccaggcggtggcggcggcggcccaggaggcggcggacggggagctgcgggagcaggcccggcctggctctctagcggccgcctggctgcagcatgcgcgcccgccgggggctgctgcggctgccgcgccgctcgctgctcgccgcgctcttcttcttttctctctcgtcctcgctgctgtacttcgtctatgtggcgcccggcatagtgaacacctacctcttcatgatgcaagcccaaggcattctgatccgggacaacgtgagaacaatcggtgctcaggtttatgagcaggtgcttcggagtgcttatgccaagaggaacagcagtgtaaatgactcagattatcctcttgacttgaaccacagtgaaaccttcctgcaaactacaacatttcttcctgaagacttcacctactttgcaaaccatacctgccctgaaagactcccttccatgaagggcccaatagacataaacatgagtgaaattggaatggattacattcatgaactcttctccaaagacccaaccatcaagctcggaggtcactggaagccttctgattgcatgcctcggtggaaggtggcgatccttatccccttccggaaccgccacgagcacctcccagtcctgttcagacacctgcttcccatgctccagcgccagcgcttgcagtttgcattttatgtggttgaacaagttggtacccaaccctttaatcgagccatgcttttcaacgttggctttcaagaggcaatgaaagacttggattgggactgtttgatttttcatgatgtagatcacataccggaaagtgatcgcaactattatggatgtggacagatgccgaggcattttgcaaccaaattggataagtatatgtatctgcttccttataccgagttctttggcggagtgagtggcttaacagtggaacaatttcggaaaatcaatggctttcctaatgctttctggggttggggtggagaagatgacgacctctggaacagagtacagaatgcaggctattctgtgagccggccagagggtgacacaggaaagtacaagtccattcctcatcaccatcgaggagaagtccagtttcttggaaggtatgctctgctgaggaagtcaaaagaacggcaagggctggatggcctcaacaacctgaactactttgcaaacatcacatacgacgccttgtataaaaacataactgtcaacctgacacccgagctggctcaggtgaacgagtactgagaggagagaatgtacgtttgctttacccaccgccaccaagaaagcagtccgatgagatttttttttggaggggggagggtctacacagcaagagaacagaaatactgtgtctcatgaaggatcacagagttcagggggaaaatgtgacagcacacgcacaaacgccttcactggatcagccgctggaactgagggagtgagcttggggacttccttcgtcagcactggctttctgttttcacaagacagacgtctgtcccgctgctctctccccatctcctaccccacatcctgtcttagccgcagtctccagaacccatgatgaactgtgatctgccgtggtcctgccgtggtcctgccgtggagcctgtccctacacatgaccttggagcctcttggccttcagagcagaggcaaacccaccacagggcagctgcgttttaggaagagcaaatgaaactccacaccattcttctagatctctggtgttctctttggtttcatttttttaaaaaattaccttctttgggtggggattgagggtggaggggagggtgtttgggaaagataaatagacataaatatataacaatcacttcttgaagaagtataattgtaaataagccatgtaaaatgcctttttaaaatttaattttctagctggctccaattcaaattgaggatttatgtattaggccacttacttggttggcaagtgcaggaactcagttaaaatgcagttgaagaatgtcatctcccgaattgctgtcactttggcgagggagtggatatagggcatgtcacaaaagaacaaaataacccgacctttattgctgggagctggcttctgtccctttcttcccccccccacgagtcttgcccttgacttctgctctggattcactcttccctgtcggccgcgcatgtgctcatcccactctccgctaagcgggaggctgctgttagagcaggctgcttcctgcctaaagcaggcccttcggggctcgctgcacacacatctctggctctccaggcttcgtgttctgtcttttcatcagcatggcggggcggggggcggggggcgggggtgtgtatgggaatccctccccctcttactttttctcttgtggaacttggccacagtttctgaacaatgtgcctacattaccagctggcttcagtgattcctctgtgtccctttttggtttctggaaagattctttgtcaacattagtaactgatacatagaaccaaggagcactcaaatagggagccaggagccagggagctggtgacacttgtgtgctgtggggcagctgggatccaggtaagaccggattgaagctttgaaattagactaacaaagctccagacagcaagagcccaggtgcactgctcacacccccacctgcattttgaagtcatattattttttgttttgttttttaagacggtctggctctgtcgcctaagctggagtgtggtggcacgatcacagctcactgcagcctccatctcctaggctcaagccattttcccacctcagcctcccgagtagctgggactacaggtgcacaccaccacacctggctaattttttgtatttttagtagagacaggggtttcttccatgttgcccaggctggtctcgaactcctggactcaagcaatccgcccaccttgacttcccaaagtgctgggattatgggcgggtgtgagccattgcgcccagccttgaagtcatgttctaaattgtatttgaatttgtgcctctttgtttttccccaaaccaaagccctcaaattgtagtctctgtcggcttctgcagaattctggaaaatgccagttttcctcccccgcccttgttttccataaaacatatttatatattgtgatgaggagtactttctgaagagtacttcgtatttttttttaattgccttgtttgccttcaacttccttgattttcatagtttacatgggtgtgtgtaggggtgtgtgtgtgtatgtgtgtgggttagggcttttttcgttgcatgtgatggttctgtggacatatgatccccacaaactgtgggagtgattggccaggccttgttttgtttgtttgtttgtttgtgtttttgttcttttgaagaatagagtggtatttagaaaataaattgcattgcaaagctcttatcggctcatatgagagagcaggttcctgcccttgaaaatgccggtaagctatagcatatgttttttaagacttaagcatttcatgctttaaaataccttcacaagtgaacattacacacagaagttcatttggttttcctttgttttatggtgcatatagcaataaagacccccctccaccctgcaacccccatcccccaccgggcctttgtccctgccttggcttttctccccttctcattctcctctcccctttcctcactgaaggctgtgagttgctttcaatgtgacaacactatgatgtcatttggaaggatttgccaggacagactgattctgagtcctgggtgccgtatgtgtatgcggcagtgttgtcaggcgatcttgtttgaagctctatgttgccataattaccatcaagtacacactgttggcaaaaggctaacacctgactttagaaaatgctgatttgagaacaaaaggaaaggtcttttttcactgcttaaagtggggtcactttgatacctttgcggtcatgtctgtgtctgatgagtgtagaatctctggatgtgcactgtcagtcatgtgtccaccaggcctcgaatatcatatgggaaatgtcatagttaaaaacgtacagccaggcccgtgtgctgttaatagtgtgaaattgtcatgttaaaaaaaaaaacaggaaccaaatgtgaccttgtgcatatattggtagctgaaaatcttcaaggctactgatgggtggccccttaatcttgtctttgattgctgtgtgcagggaaaggtgtccccgtttgttcatgctgttttggggggtgggggggtatttgcaagaatactcattttgacataataggtcctcttgtcagagatcctctaccacagacattaatagctgagcaggagccacatggattgattgtatccactcaccattgacgatggcattgagcgtagctagcttatttccatcactacgtgtttttgagcttgctcttacgttttaagaggtgccaggggtacatttttgcactgaaatctaaagatgttttaaaaaacacttttcacaaaaatagtcctttgtcattacattatttactcatgtgtttgtacatttttgtatgttaatttatgaatgattttttcagtaaaaaatacatattcaagaaccaaaaaaaaaaaaaaaaaa

SEQ ID NO: 631 - DNA, 2133 bp, Homo sapiens
cgggccaatcgttagtcagagtgggcggagccgcccgcgggcacctgcgcgttaagagtgggccgcgtcgctgaggggtagcgatgcgggctccggggatgaggtcgcggccggcgggtcccgcgctgttgctgctgctgctcttcctcggagcggccgagtcggtgcgtcgggcccagcctccgcgccgctacaccccagactggccgagcctggattctcggccgctgccggcctggttcgacgaagccaagttcggggtgttcatccactggggcgtgttctcggtgcccgcctggggcagcgagtggttctggtggcactggcagggcgaggggcggccgcagtaccagcgcttcatgcgcgacaactacccgcccggcttcagctacgccgacttcggaccgcagttcactgcgcgcttcttccacccggaggagtgggccgacctcttccaggccgcgggcgccaagtatgtagttttgacgacaaagcatcacgaaggcttcacaaactggccgagtcctgtgtcttggaactggaactccaaagacgtggggcctcatcgggatttggttggtgaattgggaacagctctccggaagaggaacatccgctatggactataccactcactcttagagtggttccatccactctatctacttgataagaaaaatggcttcaaaacacagcattttgtcagtgcaaaaacaatgccagagctgtacgaccttgttaacagctataaacctgatctgatctggtctgatggggagtgggaatgtcctgatacttactggaactccacaaattttctttcatggctctacaatgacagccctgtcaaggatgaggtggtagtaaatgaccgatggggtcagaactgttcctgtcaccatggaggatactataactgtgaagataaattcaagccacagagcttgccagatcacaagtgggagatgtgcaccagcattgacaagttttcctggggctatcgtcgtgacatggcattgtctgatgttacagaagaatctgaaatcatttcggaactggttcagacagtaagtttgggaggcaactatcttctgaacattggaccaactaaagatggactgattgttcccatcttccaagaaaggcttcttgctgttgggaaatggctgagcatcaatggggaggctatctatgcctccaaaccatggcgggtgcaatgggaaaagaacacaacatctgtatggtatacctcaaagggatcggctgtttatgccatttttctgcactggccagaaaatggagtcttaaaccttgaatcccccataactacctcaactacaaagataacaatgctgggaattcaaggagatctgaagtggtccacagatccagataaaggtctcttcatctctctaccccagttgccaccctctgctgtccccgcagagtttgcttggactataaagctgacaggagtgaagtaatcatttgagtgcaagaagaaagaggcgctgctcactgttttcctgcttcagtttttctcttatagtaccatcactataatcaacgaacttctcttctccacccagagatggcttttccaacacattttaattaaaggaactgagtacattaccctgatgtctaaatggaccaaagatctgagatccattgtgattatatctgtatcaggtcagcagaagaaggaactgagcagttgaactctgagttcatcaattgtaatatttggaaattatctacaatggaatcttccctctgttctctgataacctacttgcttactcaatgcctttaagccaagtcaccctgttgcctatgggaggaggtggaaggatttggcaagctcaaccacatgctatttagttagcatcagttgtcaccaacagtctttctgcaaagggcaggagagctttgggggaaaggaaaaggcttaccaggctgctatggtcaactcttcagaaattttcagagcaatctaaaagcgccaaaattcgctatgtttacagtgatactattaagaaaatgaatgtgattctgctctgtctttttaagtatgatcaaataaaaaatttgtacatcacaatcatttctaccaaaaaaaaaaaaaaaaaa

SEQ ID NO: 632 - DNA, 4707 bp, Homo sapiens
tcctctgaccgagcgagggctccccgtctgcggcgcggtcaggaccccgcactttcggcccggctcggggttctcggagtccgtcccaaggccgggccgcaccaccgctggggggcagcgaagcgagcctagaggagaaaaggcggtccccgccgagtgcacgccgggggcggggcacggcacgaaggctccgtggtcggacttctgggctgttcggaggccctggcccacctggagggccctggaagagtttccagcgcttcccgaggtaggcgtgagaagctcgacgcggaccacatctccctcatgcaccgcccgcacgtcccaggatgcgctgcgattaaggtactgccgcgcctcgtgtgcaaggacagacttccggggtcgagaactacaacttccgacttgcatcactgcggtggcgctaaacagcgtcagcgaggcggtgcccgacgatttccctgtcttccagttccgctccctgggatcagcggcgagaagcggggcggagtctgaggcccgagccaagatggcggctgcgaagccaaccctcacggactcgctctcgttctgcctcgcgcagctcgcggcggcggccggggaggctctgggtggggaaaaggacccagcgaccaacgagacacccctgagccgcgcgctcctagccctccgcacgcgccacatcaaggcagcggggggaatcgagcgcttccgggcacgcggcgggctccgccccctactcgcgctgctacggcgagcggctgcagcgggttccgccccgtcccaggcaggccccggctccgccccctcgtcggccgcgtcgggagcttctagccccgcccccgcgtcgggccccgccccctccgctgtgtcgtcgtctagtcctacgccgccagtgcgcctgcgcaagacgctggacttggcgctcagcatcctagccgattgctgtacggaaggggcgtgccggaccgaagtgcgcagactcggaggcatactccctttggtgaccattcttcagtgcatgaagacagacagcatccagaaccgaacggcccgtgccctggggaacttagccatggaacctgagagctgtggggacatccactgtgctggtgctgttcccctgcttgtggagagcctgacagcctgccaggactcgcagtgcctacagagcgtggtgcgtgccctccgtaacctggcagactcaccccagcaccgcctggccttggcacagcagggagcagtgcgtccgctggccgagctcctggccactgccccagatgctgcactgaccttagccctcgtccgtgccctcctggaactcagccgaggctgctcccgggcctgtgctgagcagctaagtctgggtgggggattgggcccactcgtcagcctggcttcccaccccaagcgggcagtacgcgagggaaccattctgatcctcgccaacctgtgtgcccagggcctgattcggcctgcactgggcaatgctggtggcgtggaggtgctggtagatgagctccggcagcgccgggatcctaatggagctagcccaacctcccagcagcccctggtgcgggctgtgtgcctcctatgtcgtgaggccatcaaccgggcccgactgcgggatgctggtggcttggatctactgatgggcctgctgcgggaccctcgtgcaagcgcatggcaccctcgtattgtggctgcccttgtggggtttctgtatgacactggggccctgggccggctgcaggctctgggacttgtgcctctcctggctgggcagctgtgtggtgaggctggtgaggaggaagaagagggaagagaagctgcttcctgggactttcctgaggagaggacccctgagcgggcacagggtggaagcttccggagcctcaggtcgtggctgatctccgagggctatgccacaggccctgatgacatctcccccgactggtctcctgagcagtgtccgccggagcccatggagccggccagccccgccccgaccccgacctcgctgcgggcaccacgcacccaacgcactccgggccgcagccccgccgccgccatcgaggagccttggggacgcgaagggccagccctgctgctgctgtcgcgcttttcccaggcccctgacccaagtggggcacttgtgaccggcccggcgctgtacggcctgctgacctatgtgaccggcgcaccgggcccgcccagcccacgtgcactgcgcattctgtcacgcctcacctgcaaccctgcctgcctcgaggccttcgtgcgcagctatggcgcggcgctgctgcgggcctggctggtgctgggggtggcgcctgacgattggccggcaccacgtgcccggcccactctccacagccggcaccgagagctgggtgagttcccatacccacccgtctccttgcccccatgtgagtccccatcctcccccatggcttccatgggcccagaacctcaccttcccactcacctgtcctccccagcccgtcctccagacaacctgtcaccagagtggggtggggagcagggcgttccagtccctccatgggcccacaggcagagttctgctgtgtcctctgccctagccctgggacccagataccctaactctagatgcagccccgcgcccaggatctgggctggtctgtgcttctttcctggctctgccattggttcagcactgtcctgactgctccccaccagcacgctgacctgtgaaccccagcctcaccatcacccccagcactgccagggactgccctgtctgctgtgccctgaccacaggctgcttcatggcgttactgctagaccaaggagcccttctgctggccctgtccgggcataacagaaggctcgcactcttgtcttctggtcacacctcactatgtcccctcagctcctatctctgtatggcctggtttttcccaggttatgattatagagcgaggattattacaatattgggataaagagtaattactacaaactaatgattaatgatattcatatatctctaagatctatatctggtataactattcttgttttatattgtattatactggaacagctcgtgtcctccgtctcttgcctcggcgcctgggtggcttgccgcccacacttcaggggcccagacttacaccctgactgtcccaccttctgtccttgtcctggacctcaggttcccagcgtcccgagcccagcactgtctcttcagtgccctgatttctcacccagaggtttcaccctccttcatctcacgggcccagagccctgtctcactcaccccacctgtcttagaccccagttcccagcctgacaagctttccactcacaggggagaggctactgcagaacctgacggttcaggctgagtcgccctttggggttggggccctgacgcacctgctgctctctgggagccctgaggaccgagtggcctgcgcgctgaccctgcccttcatctgccggtgagtgggaagtgggtgccttgcggggttgggggaggagtgctgtgtttcccaggcccgttgcccaccttttgaaaggccctctcttccctgtaggaagccctctctgtggcgccggctgcttctggagcagggtggtctccggctcctccttgcggcgctgacccggccggccccacacccgctcttcctcttctttgccgcggactccctttcctgcctccaagacctggtgtctcccactgtgagcccagctgtcccacaggcagtccccatggacctagactcaccttccccttgcctctatgaacctctgctgggcccagcccctgtcccagctcccgacctgcacttcctgctggactcaggcctccagctccctgcccagcgagcggcctcagccaccgcctcccctttcttccgggccctgctgtcaggcagctttgcagaagcccagatggacctggtgcccctgcgaggtctgtcgcctggtgcagcctggcctgtcctgcatcatttgcatggttgtcgggggtgtggggctgccctggggcccgtgcccccaccaggccagcccctgctgggttcagaggccgaggaggcactggaggctgctggccgtttcctactgcctgggctggaggaggagctggaagaggccgtgggccgcatccacctgggaccccagggtggcccggagtcagtgggtgaggtgttccgcctgggccggccccggctggctgcccactgtgcccgctggacactggggtcagagcagtgcccgaggaagcggggtctggccctggtggggcttgtggaggcagcaggtgaagaggcagggcccctgacggaggctttgctggctgtggtgatggggattgagttgggggcaagggtccctgcctagactgttgacgtcccctgggaaggggacccaaggatgaattggctgtgaaggatcctccctgagactggcaagggaggaggctgagcagaaggagtcatcatggaggagcggtgagaacatggaaccggactccaagatgacgatctaaagacccgggagcgagaagccaaggccaggttctgggtgtagggcccagagaagcagaacagcccagagccccaggtgcctggcctggcctagacctctggaattgagattaaacaatttggagttggataaaaaaaaaaaaaaaaaaaaaaaaaaaaaaaaaaa

SEQ ID NO: 633 - DNA, 3925 bp, Homo sapiens
agcccggccctcctcctccccgccgcccctcccgcgcgcgtccaccggctccccggctcgcgccgctccatgtagccccggctccccgggcggccgcggaggagggggcgaccacaagatggcggacctctcgctgcttcaggaggacctgcaggaggacgcagacggatccctggactttgtctcacaagatgaaatgttgacgcccctggggagattggacaagtatgctgcaagtgagaacatatttaacagacaaatggtggcccggagtttgctcgataccttgagggaagtctgcgatgatgaaagagattgtattgctgttttggaaagaattagcagattggccgatgattcagaaccaactgtgagagcggagctgatggaacaggtgcctcacatcgcactgttttgtcaagaaaaccggccttcaataccatatgctttttcaaaattcttactacctattgtggttagataccttgcagatcagaataatcaggtgaggaaaacaagtcaggcagctttgctggctctgttggagcaggagctcattgaacgatttgatgtggagaccaaagtgtgccctgtcctcatagagctgacagccccagatagcaatgatgatgtgaaaacagaagctgtggctataatgtgcaaaatggctcccatggttgggaaggatattacagagcgtcttatcctccctaggttttgtgagatgtgctgcgattgcagaatgtttcacgttcgaaaggtctgtgctgccaattttggagatatttgcagtgtagttggccagcaagctactgaagaaatgttgctgcccagatttttccagctttgttctgataatgtatggggagtccgaaaggcttgtgctgaatgcttcatggcggtttcatgtgcaacatgtcaagaaatccgacggaccaaattatcagcactttttattaatttgatcagtgatccttcacgttgggttcgccaagcagcttttcagtctctgggacctttcatatctacttttgctaatccatctagctcaggccagtattttaaagaagaaagcaaaagttcagaagagatgtcagtagaaaacaaaaataggaccagagatcaagaagccccagaggatgtacaagtcaggccagaggatactccttcagatctcagtgttagtaattccagtgtcatactggaaaacacgatggaagaccatgctgctgaggcatccgggaagcctctaggtgaaattagtgttccactggacagctctttactttgtactttgtcctcagaatctcaccaggaagcagctagtaatgagaatgataaaaaacctggtaactacaaatctatgttacgaccagaggttggcaccacttcacaagattcagctctcttagatcaggaattgtataactccttccatttctggaggactcctcttcctgaaatagatctagacatagagcttgaacagaactctgggggaaaacccagcccagagggaccagaggaagaatctgagggccctgtgcccagttctccaaacatcaccatggccaccagaaaggaactggaagaaatgatagaaaatctagagccccacattgatgatccagatgttaaagcacaagtggaagtgctgtccgctgcactacgtgcttccagcctggatgcacatgaagagaccatcagtatagaaaagagaagtgatttgcaagatgaactggatataaatgagctaccaaattgtaaaataaatcaagaagattctgtgcctttaatcagcgatgctgttgagaatatggactccactcttcactatattcacagcgattcagacttgagcaacaatagcagttttagccctgatgaggaaaggagaactaaagtacaagatgttgtacctcaggcgttgttagatcagtatttatctatgactgacccttctcgtgcacagacggttgacactgaaattgctaagcactgtgcatatagcctccctggtgtggccttgacactcggaagacagaattggcactgcctgagagagacgtatgagactctggcctcagacatgcagtggaaagttcgacgaactctagcattctccatccacgagcttgcagttattcttggagatcaattgacagctgcagatctggttccaatttttaatggatttttaaaagacctcgatgaagtcaggataggtgttcttaaacacttgcatgattttctgaagcttcttcatattgacaaaagaagagaatatctttatcaacttcaggagtttttggtgacagataatagtagaaattggcggtttcgagctgaactggctgaacagctgattttacttctagagttatatagtcccagagatgtttatgactatttacgtcccattgctctgaatctgtgtgcagacaaagtttcttctgttcgttggatttcctacaagttggtcagcgagatggtgaagaagctgcacgcggcaacaccaccaacgttcggagtggacctcatcaatgagcttgtggagaactttggcagatgtcccaagtggtctggtcggcaagcctttgtctttgtctgccagactgtcattgaggatgactgccttcccatggaccagtttgctgtgcatctcatgccgcatctgctaaccttagcaaatgacagggttcctaacgtgcgagtgctgcttgcaaagacattaagacaaactctactagaaaaagactatttcttggcctctgccagctgccaccaggaggctgtggagcagaccatcatggctcttcagatggaccgtgacagcgatgtcaagtattttgcaagcatccaccctgccagtaccaaaatctccgaagatgccatgagcacagcgtcctcaacctactagaaggcttgaatctcggtgtctttcctgcttccatgagagccgaggttcagtgggcattcgccacgcatgtgacctgggatagctttcgggggaggagagaccttcctctcctgcggacttcattgcaggtgcaagttgcctacacccaataccagggatttcaagagtcaagagaaagtacagtaaacactattatcttatcttgactttaaggggaaataatttctcagaggattataattgtcaccgaagccttaaatccttctgtcttcctgactgaatgaaacttgaattggcagagcattttccttatggaagggatgagattcccagagacctgcattgctttctcctggttttatttaacaatcgacaaatgaaattcttacagcctgaaggcagacgtgtgcccagatgtgaaagagaccttcagtatcagccctaactcttctctcccaggaaggacttgctgggctctgtggccagctgtccagcccagccctgtgtgtgaatcgtttgtgacgtgtgcaaatgggaaaggaggggtttttacatctcctaaaggacctgatgccaacacaagtaggattgacttaaactcttaagcgcagcatattgctgtacacatttacagaatggttgctgagtgtctgtgtctgattttttcatgctggtcatgacctgaaggaaatttattagacgtataatgtatgtctggtgtttttaacttgatcatgatcagctctgaggtgcaacttcttcacatactgtacatacctgtgaccactcttgggagtgctgcagtctttaatcatgctgtttaaactgttgtggcacaagttctcttgtccaaataaaatttattaataagatctatagagagagatatatacacttttgattgttttctagatgtctaccaataaatgcaatttgtgacctgtattaatgatttaaagtggggaaactagattaaaatatttgtcttttaactaaaaaaaaaaa

SEQ ID NO: 634 - DNA, 2652 bp, Homo sapiens
cgagagcctgaattcactgtcagctttgaacactgaacgcgaggactgttaactgtttctggcaaacatgaagtcaggcctctggtatttctttctcttctgcttgcgcattaaagttttaacaggagaaatcaatggttctgccaattatgagatgtttatatttcacaacggaggtgtacaaattttatgcaaatatcctgacattgtccagcaatttaaaatgcagttgctgaaaggggggcaaatactctgcgatctcactaagacaaaaggaagtggaaacacagtgtccattaagagtctgaaattctgccattctcagttatccaacaacagtgtctctttttttctatacaacttggaccattctcatgccaactattacttctgcaacctatcaatttttgatcctcctccttttaaagtaactcttacaggaggatatttgcatatttatgaatcacaactttgttgccagctgaagttctggttacccataggatgtgcagcctttgttgtagtctgcattttgggatgcatacttatttgttggcttacaaaaaagaagtattcatccagtgtgcacgaccctaacggtgaatacatgttcatgagagcagtgaacacagccaaaaaatctagactcacagatgtgaccctataatatggaactctggcacccaggcatgaagcacgttggccagttttcctcaacttgaagtgcaagattctcttatttccgggaccacggagagtctgacttaactacatacatcttctgctggtgttttgttcaatctggaagaatgactgtatcagtcaatggggattttaacagactgccttggtactgccgagtcctctcaaaacaaacaccctcttgcaaccagctttggagaaagcccagctcctgtgtgctcactgggagtggaatccctgtctccacatctgctcctagcagtgcatcagccagtaaaacaaacacatttacaagaaaaatgttttaaagatgccaggggtactgaatctgcaaagcaaatgagcagccaaggaccagcatctgtccgcatttcactatcatactacctcttctttctgtagggatgagaattcctcttttaatcagtcaagggagatgcttcaaagctggagctattttatttctgagatgttgatgtgaactgtacattagtacatactcagtactctccttcaattgctgaaccccagttgaccattttaccaagactttagatgctttcttgtgccctcaattttctttttaaaaatacttctacatgactgcttgacagcccaacagccactctcaatagagagctatgtcttacattctttcctctgctgctcaatagttttatatatctatgcatacatatatacacacatatgtatataaaattcataatgaatatatttgcctatattctccctacaagaatatttttgctccagaaagacatgttcttttctcaaattcagttaaaatggtttactttgttcaagttagtggtaggaaacattgcccggaattgaaagcaaatttattttattatcctattttctaccattatctatgttttcatggtgctattaattacaagtttagttctttttgtagatcatattaaaattgcaaacaaaatcatctttaatgggccagcattctcatggggtagagcagaatattcatttagcctgaaagctgcagttactataggttgctgtcagactatacccatggtgcctctgggcttgacaggtcaaaatggtccccatcagcctggagcagccctccagacctgggtggaattccagggttgagagactcccctgagccagaggccactaggtattcttgctcccagaggctgaagtcaccctgggaatcacagtggtctacctgcattcataattccaggatctgtgaagagcacatatgtgtcagggcacaattccctctcataaaaaccacacagcctggaaattggccctggcccttcaagatagccttctttagaatatgatttggctagaaagattcttaaatatgtggaatatgattattcttagctggaatattttctctacttcctgtctgcatgcccaaggcttctgaagcagccaatgtcgatgcaacaacatttgtaactttaggtaaactgggattatgttgtagtttaacattttgtaactgtgtgcttatagtttacaagtgagacccgatatgtcattatgcatacttatattatcttaagcatgtgtaatgctggatgtgtacagtacagtactgaacttgtaatttgaatctagtatggtgttctgttttcagctgacttggacaacctgactggctttgcacaggtgttccctgagttgtttgcaggtttctgtgtgtggggtggggtatggggaggagaaccttcatggtggcccacctggcctggttgtccaagctgtgcctcgacacatcctcatccccagcatgggacacctcaagatgaataataattcacaaaatttctgtgaaatcaaatccagttttaagaggagccacttatcaaagagattttaacagtagtaagaaggcaaagaataaacatttgatattcagcaactgaaaaaaaaaaa

SEQ ID NO: 635 - DNA, 1578 bp, Homo sapiens
agtgtggtactttgtcttgaggagatgtcctggactcacacggaaacttagggctacggaatgaagttctcactcccattaggtgacaggtttttagagaagccaatcagcgtcgccgcggtcctggttctaaagtcctcgctcacccacccggactcattctccccagacgccaaggatggtggtcatggcgccccgaaccctcttcctgctgctctcgggggccctgaccctgaccgagacctgggcgggctcccactccatgaggtatttcagcgccgccgtgtcccggcccggccgcggggagccccgcttcatcgccatgggctacgtggacgacacgcagttcgtgcggttcgacagcgactcggcgtgtccgaggatggagccgcgggcgccgtgggtggagcaggaggggccggagtattgggaagaggagacacggaacaccaaggcccacgcacagactgacagaatgaacctgcagaccctgcgcggctactacaaccagagcgaggccagttctcacaccctccagtggatgattggctgcgacctggggtccgacggacgcctcctccgcgggtatgaacagtatgcctacgatggcaaggattacctcgccctgaacgaggacctgcgctcctggaccgcagcggacactgcggctcagatctccaagcgcaagtgtgaggcggccaatgtggctgaacaaaggagagcctacctggagggcacgtgcgtggagtggctccacagatacctggagaacgggaaggagatgctgcagcgcgcggacccccccaagacacacgtgacccaccaccctgtctttgactatgaggccaccctgaggtgctgggccctgggcttctaccctgcggagatcatactgacctggcagcgggatggggaggaccagacccaggacgtggagctcgtggagaccaggcctgcaggggatggaaccttccagaagtgggcagctgtggtggtgccttctggagaggagcagagatacacgtgccatgtgcagcatgaggggctgccggagcccctcatgctgagatggaagcagtcttccctgcccaccatccccatcatgggtatcgttgctggcctggttgtccttgcagctgtagtcactggagctgcggtcgctgctgtgctgtggagaaagaagagctcagattgaaaaggagggagctactctcaggctgcaatgtgaaacagctgccctgtgtgggactgagtggcaagtccctttgtgacttcaagaaccctgactcctctttgtgcagagaccagcccacccctgtgcccaccatgaccctcttcctcatgctgaactgcattccttccccaatcacctttcctgttccagaaaaggggctgggatgtctccgtctctgtctcaaatttgtggtccactgagctataacttacttctgtattaaaattagaatctgagtataaatttactttttcaaattatttccaagagagattgatgggttaattaaaggagaagattcctgaaatttgagagacaaaataaatggaagacatgagaacttt

SEQ ID NO: 636 - DNA, 2487 bp, Homo sapiens
cctttcccctcccgccggacctgccaggaggtgggctggcgcggagggagggccctgtcccctgtccctttaaggaggagggccaaacgccggcctagagtgcggcgtagcccccacccgccgtgccctcaccccagagcagctgcagcctcagccggccgcccctccgccagccaagtccgccgctctgacccccggcagcaagtcgccaccatggtgaagatcgtgacagttaagacccaggcgtaccaggaccagaagccgggcacgagcgggctgcggaagcgggtgaaggtgttccagagcagcgccaactacgcggagaacttcatccagagtatcatctccaccgtggagccggcgcagcggcaggaggccacgctggtggtgggcggggacggccggttctacatgaaggaggccatccagctcatcgctcgcatcgctgccgccaacgggatcggtcgcttggttatcggacagaatggaatcctctccacccctgctgtatcctgcatcattagaaaaatcaaagccattggtgggatcattctgacagccagtcacaacccagggggccccaatggagattttggaatcaaattcaatatttctaatggaggtcctgctccagaagcaataactgataaaattttccaaatcagcaagacaattgaagaatatgcagtttgccctgacctgaaagtagaccttggtgttctgggaaagcagcagtttgacttggaaaataagttcaaacccttcacagtggaaattgtggattcggtagaagcttatgctacaatgctgagaagcatctttgatttcagtgcactgaaagaactactttctgggccaaaccgactgaagatccgtattgatgctatgcatggagttgtgggaccgtatgtaaagaagatcctctgtgaagaactcggtgcccctgcgaactcggcagttaactgcgttcctctggaggactttggaggccaccaccctgaccccaacctcacctatgcagctgacctggtggagaccatgaagtcaggagagcatgattttggggctgcctttgatggagatggggatcgaaacatgattctgggcaagcatgggttctttgtgaacccttcagactctgtggctgtcattgctgccaacatcttcagcattccgtatttccagcagactggggtccgcggctttgcacggagcatgcccacgagtggtgctctggaccgggtggctagtgctacaaagattgctttgtatgagaccccaactggctggaagttttttgggaatttgatggacgcgagcaaactgtccctttgtggggaggagagcttcgggaccggttctgaccacatccgtgagaaagatggactgtgggctgtccttgcctggctctccatcctagccacccgcaagcagagtgtggaggacattctcaaagatcattggcaaaagtatggccggaatttcttcaccaggtatgattacgaggaggtggaagctgagggcgcaaacaaaatgatgaaggacttggaggccctgatgtttgatcgctcctttgtggggaagcagttctcagcaaatgacaaagtttacactgtggagaaggccgataactttgaatacagcgacccagtggatggaagcatttcaagaaatcagggcttgcgcctcattttcacagatggttctcgaatcgtcttccgactgagcggcactgggagtgccggggccaccattcggctgtacatcgatagctatgagaaggacgttgccaagattaaccaggacccccaggtcatgttggccccccttatttccattgctctgaaagtgtcccagctgcaggagaggacgggacgcactgcacccactgtcatcacctaagaagacaggcctgatgtggtacgtccctccacccccggacccatccaagtcatctgattgaagagcatgacagaaacaaaatgtattcaccaagcattttaggatttgactttttcactaaccagttgacgagcagtgcatttacaaggcactgccaaacaagatgcccttgggagctgtgagggaaagaggacctgcgggcttagatcaatctcaattccttttcatgccctcctgcattgctgctgcgtgggtatttgtctccttagccatcaggtacagtttacactacaatgtaagctataggtggagcatcagcagtgagtgaggccattcttcatccttaggatgtggcaatgaaatgatggtgcaagttcctttctcttttgtgaatctttccccccatttcctgtttacatgtaacccaacaaaatgcaatttctagtgccttctgtccaatcagttctttcctctgagtgagacgtacttggctacagatttctgccttgttttgcgacattgtcccattcacacagatattttgggataataaaggaaaataagctacaaaaaaaaaaaaaaaaa

SEQ ID NO: 637 - DNA, 1640 bp, Homo sapiens
cccaggcccccggaggctccgcgcggggcgggtcggtctccggcctgggcagcgccccagaagcctcatagattgtttctcccccagacgtttatcttcaccgacggggacgaccctgagctcgagctccagggcggcgaccgtgtcatcaacaccaactgctcggcggtgcgcactcgtcaggccctctgctgcaagatgtccgtggagtatgacaagttcattgagtccgggcgcaagtggttttgccacgtggatgatgacaattatgtgaacgcaaggagcctcctgcacctgctctccagcttctcacccagccaggacgtctacctggggcggcccagcctggaccaccccattgaggccaccgagagggtccagggtggcagaactgtgaccacggtcaagttctggtttgctactggtggggccgggttctgcctcagcagaggccttgccctcaagatgagcccatgggccagcctgggcagcttcatgagcacagctgagcaggtgcggctgccggatgactgcacagttggctacatcgtggaggggctcctgggcgcccgcctgctgcacagccccctcttccactctcacctggagaacctgcagaggctgccgcccgacaccctgctccagcaggttaccttgagccatgggggtcctgagaacccacagaacgtggtgaacgtggctggaggcttcagcctgcatcaagaccccacacggtttaagtctatccattgtcttctgtacccagacacggactggtgtcccaggcagaaacagggcgccccgacctctcggtgacaccaaccaccccgacccagggctgcctggctctgtcccaggcgcggggaaccagagccccctatgggctcagtgggctccctcaggtgccacggccacaccagtgagatgcaggcacctggcagaccctctggctagcctgcagccccccctctcccagcccctggtgggctgcggtgatgggtgttttgggagaacgaagacagccaggctgatggccagggccgcagtgcccctccccccgacccagccccaaggttgatcccacgggaacaggcttccaccccagcacttgcgcacctgggagggagctgccatccgggctccattacctgttgctgaaggcgggtgctaggctggctgggtgtcaaggagcaggctccaggccaaggtcctggcccagccacggccattgcaagggctcagcctggcaggctttgtgggggacgccgccctctctgccgcaggctgggtgcacggccgggcaccacagtgggactcaggcccgggaaggtcatgttctcgaccagagctttgctcccagtccaggcgcctcattcggaggcctcttgactgggaccacagagatgttttctccgctctgacttgtggctcaggactactttctgggtcgtgctcctgccccactgtgcctgggcccataaacaacaggagccttttgttccgctgacctgcccatcccagcagacccacctccccgcctggtgccttccatggagggaaatgggacaggggccgtcatctcccctctgcctcctgctttgctgttgccgagcacgagtaaagcttttgttcttacttca

SEQ ID NO: 638 - DNA, 1543 bp, Homo sapiens
ggaaaatgggctcctgcgcgcgcgcactcgccgagtcttccggcgggtccgcccagttccgttcctgctccgcttgaggagaagcgccaagtgcgcatggggacgctatagcaattcgtttgctgtccttcctctccttcgaagatgacaaggcctaccatcgtttcttcctgcctttgggccgtcaggcagttggttgggacccgctccaaccctcggttcttcctgcaatacagtggatacaatttgtcatggctactctgagataagaccacttttttatctgagcttctgtgacctgctcctgggactttgctggctcacggagacacttctctatggagcttcagtagcaaataaggacatcatctgctataacctacaagcagttggacagatattctacatttcctcatttctctacaccgtcaattacatctggtatttgtacacagagctgaggatgaaacacacccagagtggacagagcacatctccactggtgatagattatacttgtcgagtttgtcaaatggcctttgttttctcaagcctgatacctctgctattgatgacacctgtattctgtctgggaaatactagtgaatgtttccaaaacttcagtcagagccacaagtgtatcttgatgcactcaccaccatcagccatggctgaacttccaccttctgccaacacatctgtctgtagcacactttatttttatggtatcgccattttcctgggcagctttgtactcagcctccttaccattatggtcttacttatccgagcccagacattgtataagaagtttgtgaagtcaactggctttctggggagtgaacagtgggcagtgattcacattgtggaccaacgggtgcgcttctacccagtggccttcttttgctgctggggcccagctgtcattctaatgatcataaagctgactaagccacaggacaccaagcttcacatggccctttatgttctccaggctctaacggcaacatctcagggtctactcaactgtggagtatatggctggacgcagcacaaattccaccaactaaagcaggaggctcggcgtgatgcagatacccagacaccattattatgctcacagaagagattctatagcaggggcttaaattcactggaatccaccctgacttttcctgccagtacttctaccattttttgaaactacaatactggaacatccaggaactggagttattctacgctaatggattggaaagaatgttgggaaaggacatcttaaatcttttctaactatgccctaaactgcagaactcaaaggaaatatagtgccattgttagtagtcattctagatgaattgggagtatctctccagttattcccagattcactagtgatccttaaagtctctattcagggagaggaagacactttccatctcagagatagactcgtgttaccttgatggatattggatttgtctaagtctcttctagaaaaaataaattctagattattatttatatgtgtcatttcaaaaaa

SEQ ID NO: 639 - DNA, 3162 bp, Homo sapiens
tctagtgccacgaaggcctcctgcctgggttgtccttatggcgcctgtgagtttagttctagaaaagatatttgtattttaacttttccatctaacaaacagtagcacaggcatcttagtctggacaacaacgtacaagctgaattcctggctagttccctcattatcaaaccctgacacagtagtaggcgcgagtcaggcagtgtggggacagccccgagttgccgaaagtccccggcccgttttcctcctgtgaagacatagctgcgggtggctgtgctggtggcgttcaagatgtcgaccaagaatttccgagtcagtgacggggactggatttgccctgacaaaaaatgtggaaatgtaaactttgctagaagaaccagctgtaatcgatgtggtcgggagaaaacaactgaggccaagatgatgaaagctgggggcactgaaataggaaagacacttgcagaaaagagccgaggcctatttagtgctaatgactggcaatgtaaaacttgcagcaatgtgaattgggccagaagatcagagtgtaatatgtgtaatactccaaagtatgctaaattagaagaaagaacaggatatggtggtggttttaatgaaagagaaaatgttgaatatatagaaagagaagaatctgatggtgaatatgatgagtttggacgtaaaaagaaaaaatacagagggaaagcagttggtcctgcatctatattaaaggaagttgaagataaagaatcagagggagaagaagaggatgaggatgaagatctttctaaatataagttagatgaggatgaggatgaagatgacgctgatctctcaaaatataatcttgatgccagtgaagaagaagatagtaataaaaagaaatctaatagacgaagtcgctcaaagtctcgatcttcacattcacgatcttcatcacgctcatcctccccctcaagttcaaggtctaggtccaggtcccgttcaagaagttcttccagttcgcagtcaagatctcgttccagttccagagaacgttcgagatctcgtgggtcgaaatcaagatccagctccaggtcccacaggggctcttcttccccacgaaaaagatcttattcaagttcatcatcttctcctgagaggaacagaaagagaagtcgttctagatcttcttcatctggtgatcgcaaaaaaagacgaacaagatcacggtcacccgaaagccaggtgattggtgaaaacactaaacaaccctgagcccagggccaacccctacggaacaccactactttacccagacgccacaggtcatcatctggatcatcccattctggttcccgttcaagttcaaaaaagaaataatgtattaaaatttacatcttaaaaaaatccagtacagtgcatgaagcatatttttaaagaagttggtgtcttacttggtcagaagtgctaaatctgctagtagaggtgcatgcctttcattgcttttcaaaacaatacagctgtgtttatttgtgaagttaaaagtaaatagcattttaagccataatgtcccaaaatagatgttctgtcattcattatttacaaccatttgcttcatttaaaaccatttcagctataacaaagtactttgcttcctaatttaaacccatttttgtcatttccaaatacatcctgtccattggctaagacaggattacctaggcttgcctgaactttgggcatggaagaaagactggaaactagttggaaacaacatacttatggaaaagaaagtcagcctttttatgctgttaacagatgtcagagtgattctcaccaaaaaaagttaaactatgttgtaagcagccaactgtaaatgtctattttgaaattccctatgctaagggtgccttagaatcattgtgtctcttttatccagctttacttttttgctccacatttaatgcaaaagaatcttgtgatgtctacaaggagagaagtgggatatattttcctttctgacacataatttggggcaaaaaagaaagtcttaagagtttatcttttctctgctgatacggttgcttgataaagacatctcaaaatgtttaccaatgttttaagaagctttgtgtgatattcttccaaatgtagttaccaaatataatatggtagaaaaggctaaatcatacttaatgagcaaattgaagtaagcttttaaagtatatttctcttttggtgaaaggccaatggagacattgtgaatttaagtgaacatttgcctcaagatgttaactataaacacactgcatacaattttcttctgaataacaaatgaatgcttattgctgcatgatgtaagcaaaagtcattatttttcctattcatttgaaataagttatggcttaaaatgcttttggagtttatttctcaaaattaaaatctggtcacatgagctttagtttgttttctggtttaaaaaataaaaaggtttctcttaacagtatttccagtgacaatgcaaggtaagtatatcaaaggaaatcaacagttgtgcttgggggctttttgttatgggatattgatttcttgttttttttccgtaacattgtctgctgcaatttaaataaaaattacgacattttaagatatttcatagacaaaccaaacaaaaatatatgtttttactttaaagtgaatgtttttctcttcagctgatctaaaaatgaaagcaagatatcttatgtagaaatattttgataatatttttacagtgagctttcccatgtttttatgtcttaagtttctttgctgcgtttatgtaggttgcacaagaacttttactcacttgtaattgtgcctcagactttttgaaagtctaccttctaaattgccccgacgatctagattctacatgttaccattggtttattcttgtgctttctgtatttaaaactttggctgtactaagcaaatgcaaggttataatttagctaatagtagtttacagacaattctgatgattatgatttcatttggtttaactaagctgtactagttcatttcataaggaaatgatactgtagacaaatgtaaataaagcctgtgagtcaagcatcaagtggtgtttgttagaaataaactagagatttttaaactctgaaaaaaaaaaaaaaaaaa

SEQ ID NO: 640 - DNA, 5160 bp, Homo sapiens
aaaacccggaggagcgggatggcgcgctttgactctggagtgggagtgggagcgagcgcttctgcgactccagttgtgagagccgcaagggcatgggaattgacgccactcaccgacccccagtctcaatctcaacgctgtgaggaaacctcgactttgccaggtccccaagggcagcggggctcggcgagcgaggcacccttctccgtccccatcccaatccaagcgctcctggcactgacgacgccaagagactcgagtgggagttaaagcttccagtgagggcagcaggtgtccaggccgggcctgcgggttcctgttgacgtcttgccctaggcaaaggtcccagttccttctcggagccggctgtcccgcgccactggaaaccgcacctccccgcagcatgggcaccagcctcagcccgaacgacccttggccgctaaacccgctgtccatccagcagaccacgctcctgctactcctgtcggtgctggccactgtgcatgtgggccagcggctgctgaggcaacggaggcggcagctccggtccgcgcccccgggcccgtttgcgtggccactgatcggaaacgcggcggcggtgggccaggcggctcacctctcgttcgctcgcctggcgcggcgctacggcgacgttttccagatccgcctgggcagctgccccatagtggtgctgaatggcgagcgcgccatccaccaggccctggtgcagcagggctcggccttcgccgaccggccggccttcgcctccttccgtgtggtgtccggcggccgcagcatggctttcggccactactcggagcactggaaggtgcagcggcgcgcagcccacagcatgatgcgcaacttcttcacgcgccagccgcgcagccgccaagtcctcgagggccacgtgctgagcgaggcgcgcgagctggtggcgctgctggtgcgcggcagcgcggacggcgccttcctcgacccgaggccgctgaccgtcgtggccgtggccaacgtcatgagtgccgtgtgtttcggctgccgctacagccacgacgaccccgagttccgtgagctgctcagccacaacgaagagttcgggcgcacggtgggcgcgggcagcctggtggacgtgatgccctggctgcagtacttccccaacccggtgcgcaccgttttccgcgaattcgagcagctcaaccgcaacttcagcaacttcatcctggacaagttcttgaggcactgcgaaagccttcggcccggggccgccccccgcgacatgatggacgcctttatcctctctgcggaaaagaaggcggccggggactcgcacggtggtggcgcgcggctggatttggagaacgtaccggccactatcactgacatcttcggcgccagccaggacaccctgtccaccgcgctgcagtggctgctcctcctcttcaccaggtatcctgatgtgcagactcgagtgcaggcagaattggatcaggtcgtggggagggaccgtctgccttgtatgggtgaccagcccaacctgccctatgtcctggccttcctttatgaagccatgcgcttctccagctttgtgcctgtcactattcctcatgccaccactgccaacacctctgtcttgggctaccacattcccaaggacactgtggtttttgtcaaccagtggtctgtgaatcatgacccactgaagtggcctaacccggagaactttgatccagctcgattcttggacaaggatggcctcatcaacaaggacctgaccagcagagtgatgattttttcagtgggcaaaaggcggtgcattggcgaagaactttctaagatgcagctttttctcttcatctccatcctggctcaccagtgcgatttcagggccaacccaaatgagcctgcgaaaatgaatttcagttatggtctaaccattaaacccaagtcatttaaagtcaatgtcactctcagagagtccatggagctccttgatagtgctgtccaaaatttacaagccaaggaaacttgccaataagaagcaagaggcaagctgaaattttagaaatattcacatcttcggagatgaggagtaaaattcagtttttttccagttcctcttttgtgctgcttctcaattagcgtttaaggtgagcataaatcaactgtccatcaggtgaggtgtgctccatacccagcggttcttcatgagtagtgggctatgcaggagcttctgggagatttttttgagtcaaagacttaaagggcccaatgaattattatatacatactgcatcttggttatttctgaaggtagcattctttggagttaaaatgcacatatagacacatacacccaaacacttacaccaaactactgaatgaagcagtattttggtaaccaggccatttttggtgggaatccaagattggtctcccatatgcagaaatagacaaaaagtatattaaacaaagtttcagagtatattgttgaagagacagagacaagtaatttcagtgtaaagtgtgtgattgaaggtgataagggaaaagataaagaccagaaattcccttttcaccttttcaggaaaataacttagactctagtatttatgggtggatttatccttttgccttctggtatacttccttacttttaaggataaatcataaagtcagttgctcaaaaagaaatcaatagttgaattagtgagtatagtggggttccatgagttatcatgaattttaaagtatgcattattaaattgtaaaactccaaggtgatgttgtacctcttttgcttgccaaagtacagaatttgaattatcagcaaagaaaaaaaaaaaagccagccaagctttaaattatgtgaccataatgtactgatttcagtaagtctcataggttaaaaaaaaaagtcaccaaatagtgtgaaatatattacttaactgtccgtaagcagtatattagtattatcttgttcaggaaaaggttgaataatatatgccttgtataatattgaaaattgaaaagtacaactaacgcaaccaagtgtgctaaaaatgagcttgattaaatcaaccacctatttttgacatggaaatgaagcagggtttcttttcttcactcaaattttggcgaatctcaaaattagatcctaagatgtgttcttatttttataacatctttattgaaattctatttataatacagaatcttgttttgaaaataacctaattaatatattaaaattccaaattcatggcatgcttaaattttaactaaattttaaagccattctgattattgagttccagttgaagttagtggaaatctgaacattctcctgtggaaggcagagaaatctaagctgtgtctgcccaatgaataatggaaaatgccatgaattacctggatgttctttttacgaggtgacaagagttggggacagaactcccattacaactgaccaagtttctcttctagatgattttttgaaagttaacattaatgcctgctttttggaaagtcagaatcagaagatagtcttggaagctgtttggaaaagacagtggagatgaggtcagttgtgttttttaagatggcaattactttggtagctgggaaagcataaagctcaaatgaaatgtatgcattcacatttagaaaagtgaattgaagtttcaagttttaaagttcattgcaattaaacttccaaagaaagttctacagtgtcctaagtgctaagtgcttattacattttattaagctttttggaatctttgtaccaaaattttaaaaaagggagtttttgatagttgtgtgtatgtgtgtgtggggtggggggatggtaagagaaaagagagaaacactgaaaagaaggaaagatggttaaacattttcccactcattctgaattaattaatttggagcacaaaattcaaagcatggacatttagaagaaagatgtttggcgtagcagagttaaatctcaaataggctattaaaaaagtctacaacatagcagatctgttttgtggtttggaatattaaaaaacttcatgtaattttattttaaaatttcatagctgtacttcttgaatataaaaaatcatgccagtatttttaaaggcattagagtcaactacacaaagcaggcttgcccagtacatttaaattttttggcacttgccattccaaaatattatgccccaccaaggctgagacagtgaatttgggctgctgtagcctatttttttagattgagaaatgtgtagctgcaaaaataatcatgaaccaatctggatgcctcattatgtcaaccaggtccagatgtgctataatctgtttttacgtatgtaggcccagtcgtcatcagatgcttgcggcaaaaggaaagctgtgtttatatggaagaaagtaaggtgcttggagtttacctggcttatttaatatgcttataacctagttaaagaaaggaaaagaaaacaaaaaacgaatgaaaataactgaatttggaggctggagtaatcagattactgctttaatcagaaaccctcattgtgtttctaccggagagagaatgtatttgctgacaaccattaaagtcagaagttttactccaggttattgcaataaagtataatgtttattaaatgcttcatttgtatgtcaaagctttgactctataagcaaattgcttttttccaaaacaaaaagatgtctcaggtttgttttgtgaattttctaaaagctttcatgtcccagaacttagcctttacctgtgaagtgttactacagccttaatattttcctagtagatctatattagatcaaatagttgcatagcagtatatgttaatttgtgtgtttttagctgtgacacaactgtgtgattaaaaggtatactttagtagacatttataactcaaggataccttcttatttaatcttttcttatttttgtactttatcatgaatgcttttagtgtgtgcataatagctacagtgcatagttgtagacaaagtacattctggggaaacaacatttatatgtagcctttactgtttgatataccaaattaaaaaaaaattgtatctcattacttatactgggacaccattaccaaaataataaaaatcactttcataatcttgaaaaaa

SEQ ID NO: 641 - DNA, 3917 bp, Homo sapiens
agaagtctgtccgcgagctgtcagcgcgggcgggaacgccgcggggcgcggggtgggcgcggccgacctggtccctgagccggccggcgaccccggacctcccgcgcgccccgcacccgaccggctcagccggccggcagcgtaacacgccctacgctcgcttgctcgccggcctcagggcaggcaggcgggcgcgggagaccccgccggggccgagacttggggcgggcgacgaggaccaggttacggcctcctcgccatgtcctcggcctgcgacgcgggcgaccactaccccctgcacctcctagtctggaaaaacgactaccggcagctcgagaaggagctgcagggccagaatgtggaggctgtggacccacgaggtcgaacattattgcatcttgctgtttccttgggacatttggaatctgctcgagtcttactccgacataaagcagatgtgacaaaagaaaatcgccagggatggacagttttacatgaggctgtgagcactggcgatcctgagatggtgtacacagttctccaacatcgagactaccacaacacatccatggcccttgagggagttcctgagctgctccaaaaaattctcgaggctccggatttctatgtgcagatgaaatgggaattcaccagctgggtgcccttggtttctagaatatgcccaaatgatgtctgtcgcatctggaaaagtggtgccaaactgcgcgtcgatatcacattgctgggatttgaaaacatgagctggataagagggaggcgtagttttatatttaagggagaagacaactgggcggagttaatggaagtcaaccatgatgacaaagtggtcaccaccgaacgcttcgacctttcccaagaaatggagcgcctcactctggacttgatgaagccaaaaagcagggaagttgagcggcggctcacaagccctgtcattaacaccagcctcgatactaaaaatattgcttttgaaagaactaaatccggattctggggctggaggacagataaagcagaagttgttaatggttacgaagcaaaggtttacacagtaaacaatgtgaatgtgatcaccaaaatacgcacagaacatctgaccgaggaggaaaaaaagagatataaagcagacaggaacccgctggaatctttgctgggaactgtggaacaccaatttggtgcacaaggggacctcaccacggaatgtgctactgcaaacaaccccacagccatcacgcctgatgagtacttcaatgaagagtttgatctgaaagacagggacattggaaggccgaaagagctgacgattagaacacagaagtttaaagcaatgttgtggatgtgtgaagagtttcccctctctctggtggagcaggtcattcccatcattgacctaatggctcgaacgagtgctcattttgcaagactgagagatttcatcaaattggaattcccacctggatttcctgtcaaaatagaaattcccttgtttcatgtcttaaatgcacggattacatttggaaatgttaatggctgtagcactgccgaagaatctgtatctcaaaatgtggaagggacccaggctgattcagcttcccacatcacaaactttgaggttgatcaatctgtgtttgaaattcccgaatcttactatgttcaagacaatggcagaaatgtgcatttgcaagatgaagattacgagataatgcagtttgccatccagcaaagtctgctggagtccagcaggagccaggaactttcaggaccagcttcgaatggagggatcagccagacaaacacctatgacgcccagtatgagagggccatccaggagagcctcctcaccagcacagaaggcctgtgccccagcgccctgagcgagacaagccgttttgataatgacttgcagctagccatggagctctctgccaaagagctggaggaatgggagctccggctccaggaggaagaggctgagctccagcaagtcttacagctgtcactcactgacaaatagacctttcagcctgtgagcctctgcacaaagcagaggctgtgggctgtcacagatgctgtgtcaaccagggccctagggctaagggcctgcaccttgcgtgcatgcagcaggcaacaactgccccttctttatgcagaggtgcagaaccagggactcctgggcccatccaggctgctccctggggtggagaagggaccagggattgcaggccccatctccaggctaaggggaggagagcatcatcactttccattagctgtattggcttgcaggtcacatttttactaccagctttagacaaaaccccaatccccgcaggtttgtagataaatttttatcaaggagtgataacaagacaagttattgcagagtcagggtgcttttatatataagagcagcagccgcctttgtaaagtgtgatctatgagaattggagacacttctttactgttcaccaaagaaatgggtaatctgtgctgatctccttatttttacctttttacagggtttctaggacattgtcattattcttcctccatctatctgattccattccttccacacccagctaaagttagaggagatacatatagaatctattttagattattgttaactatttgcatcaaattaagatacacaaatggccatggatgttgccttagccttaaacattactaatagtttcacatcacctcactgcacgcatcgaaggatctgatttgaatttgtaaaggcaattcttttgagagcaggattctccaggctaaatcaaaggcagctaatcctgtccctgaaggagcagctaggggaacctgaggcttgttcttgaagtgggcaagctggccaaaatattggaacacacagaaccaaaccaggtgtgttctacacctgcatgagtgaaggatttccacgtagacacctaggaagagcccgcatgccctagactcactccagaggaaggattgatttgcaaccagaaagggagctgaaaaccacggagctccatggctcttcattcaaaagggaaaataatgattccacgttgctttttagagttcaaatcaacatctttctggataaatctattttttaacaatctttttattatttgtaaaagatataaaaacaactcccatcagtagcaatacaaggttatacattttaaccagattttctcaggccttttttggatacctttagtagttaactctcttttgtcaaaccctcttgtatataaccatcgcacaacatacagaaccctggggaatacagccaagggcactgctcactgtggcccgtgtattcattcccacaggctgcactgaaataacctggtaaacaacaccctcctccattttgcgtctatttcttctattgtgcttctttggggataggaagagaaacataactactgttccaggtaacgtctgtatcatacagttagtgttgccagtgaaacgttcccagatacaaagaattgtgcttttaattccatttcacaatctgttttgttttttttttttgtcattgtctgaccaaaattccttctgcacatgaggccagtataggcaacgtcacatttgtttgtttcaaatatgcagtgtggtattttgtttactttgcatttaccgtgagcaaagatacttcttggaatggctgcagtgaggccgtgtcattggctcacaaaagtgactcataggtaatttctgtgtttgcattccactgctctgctccctaaggtccttgactttctccccaggaattcacttaaaaagggactgagcattgtgtcaacctgttgcagtgtttttcatatatgtgttcactctaaaaatgcaaataaagactgcttccttagagggtgctcatacaaaaaaaaaaa

SEQ ID NO: 642 - DNA, 3210 bp, Homo sapiens
agtctgcggtgggcagcggaggagtcgtgtcgtgcctgagagcgcagctgtgctcctgggcaccgcgcagtccgcccccgcggctcctggccagaccacccctaggaccccctgccccaagtcgcagccatgaactacctgcggcgccgcctgtcggacagcaactttatggccaatctgccaaatgggtacatgacagacctgcagcgtccgcagccgcccccaccgccgcccggtgcccacagccccggagccacgcccggtcccgggaccgccactgccgagaggtcctccggggtcgccccagcggcctctccggccgcccctagccccgggtcctcggggggcggtggcttcttctcgtcgctgtccaacgcggtcaagcagaccacggcggcggcagctgccaccttcagcgagcaggtgggcggcggctctgggggcgcaggccgcgggggagccgcctccagggtgctgctggtcatcgacgagccgcacaccgactgggcaaaatacttcaaagggaaaaagatccatggagaaattgacattaaagtagaacaggccgaattctctgatctcaaccttgtggcccatgccaatggtggattctctgtggatatggaagttcttcggaatggggtgaaggtcgtgcggtctctgaagccggattttgtgctgatccgccagcacgccttcagcatggcacgcaacggagactaccgcagtttggtcattgggctgcagtatgctggaatccccagtgttaactccttgcattctgtctacaacttctgtgacaagccctgggtgtttgcccagatggttcgactgcataagaaactggggacagaagaattccctctaattgatcagaccttctaccccaatcacaaagaaatgctcagcagtacaacgtaccccgtggttgtgaagatggggcacgcacactctgggatgggcaaggtcaaggttgacaaccagcatgacttccaggacatcgcaagtgtcgtggcactgaccaagacgtatgccactgccgagcccttcatcgatgccaaatatgacgtgcgtgtccagaagattgggcagaactacaaggcctacatgaggacgtcagtgtcagggaactggaagaccaatactggctctgcgatgctggagcaaattgccatgtctgacagatacaagctgtgggtggacacgtgctcagagatttttgggggactggacatctgcgcagtggaagcgctacatggcaaggacggaagggatcacatcattgaggtggtgggttcctccatgccgctcattggtgaccaccaggatgaagacaaacagctcatcgtagagctcgtggtcaacaagatggctcaggccctgccccggcagcgacagcgggatgcctcccctggcaggggctcccatggccagactccgtccccaggggccctgcccttgggccgccagacctcccagcagcccgcagggcccccggctcagcagcgacccccaccacagggcggccctccacagccgggtccaggcccccagcgccagggacccccattgcagcagcgcccgcccccgcagggccagcagcacctttcaggccttggacccccagctggcagccccctgccccagcgccttccaagtcccacctcagcgccccagcagcccgcgtcccaggccgcgccgccgacccagggtcaaggccgccaatcccggccagtggcgggaggccccggggcgcctccagcagcccgcccgcccgcctctccgtctccccagcgccaggcgggccccccacaggctacccgtcagacatccgtctctggcccggctccgccaaaggcctctggggccccaccgggcgggcagcagcgccagggcccgccccagaaacccccaggcccagccggccccacacgccaggccagccaggcgggtcccgtgccccgcactgggccacccaccacgcagcagcctcggcccagcggcccgggccccgctggacgtcccaaaccacagctggcccagaaacccagccaggacgtgccgccacccgccaccgccgctgcagggggacctccgcacccccagctcaacaaatcccagtctctgaccaatgccttcaaccttccagagccagccccgcccaggcccagccttagccaggacgaggtgaaagctgagaccatccgcagcctgaggaagtctttcgccagcctcttctccgactgataccccactctgagaaccccaaaatccctgggcaacccttctctgggccctgaatccatttctcacttttggagtctccaaatcccttgagaacccatctcccggttctccaagattccacctctcattcctcaagatccccgagtaccttgagaaacctgactcctcctggccctaaatccggttctcacatgtggaatccccaagtccttttagaaccccactcgtggtcacttcaggatctacttctgttttagaacctccacattcctgaagacctccgcccctggtttccccagagggcgttttccttcctggaagtgcccaaataccaggcaacccattgcagaatcccttcctggagccctgaagttcctggaaaaccctatttttggtcccaaatctctccagcacacctatttcccatcataattttccaaatcctcaagaaacccctactgttgagccccttcccatggatcttccatccctctgaagatccacatcttcaaatgccacccaacacctagccccacaaggatttcccttcaccagctcccctcaacctcattcaataccttgggagcccctcccacttccaggacccctcggttcccccagggaccccctccccagtttcctgcctctgacagctgtctttaaatatgcaaactccacccatcttcccagaatcctttgcacacggaaggccagtggtctccgcttccccacctttgctgtggtgtctgtgtctgtgactgacgtggcctccttttgtgccgtgcttggcatatgtggtcctcgttcatcgtgccgcctgtggtgatgcgtgcagtgacgctgtttatgtggtccgcacctccccctgaccttcactccttgcctggactcaccccacccctcagcggctctgaaccccaagagaagagtcgggaaacaaaataaacaagcaaaggcccagca

SEQ ID NO: 643 - DNA, 2975 bp, Homo sapiens
gcagggagatgcgcgcctgcgccggccctcgcctcggagcagccatgatggaaggcctggacgacggcccggacttcctctcagaagaggaccgcggacttaaagcaataaatgtagatcttcaaagtgatgctgctctgcaggtggacatttctgatgctcttagtgagcgggataaagtaaaattcactgttcacacaaagagttcattgccaaattttaaacaaaacgagttttcagttgttcggcaacatgaggaatttatctggcttcatgattcctttgttgaaaatgaagactatgcaggttatatcattccaccagcaccaccaagacctgattttgatgcttcaagggaaaaactacagaagcttggtgaaggagaagggtcaatgacgaaggaagaattcacaaagatgaaacaggaactggaagctgaatatttggcaatattcaagaagacagttgcgatgcatgaagtgttcctgtgtcgtgtggcagcacatcctattttgagaagagatttaaatttccatgtcttcttggaatataatcaagatttgagtgtgcgaggaaaaaataaaaaagagaaacttgaagacttctttaaaaacatggttaaatcagcagatggagtaatcgtttcaggagtaaaggatgtagatgatttctttgagcacgaacgaacatttcttttggagtatcataaccgagttaaggatgcatctgctaaatctgatagaatgacaagatcccacaaaagtgctgcagatgattacaatagaattggttcttcattatatgctttaggaactcaggattctacagatatatgcaagttttttctcaaagtttcagaactgttcgataaaacaagaaaaatagaagcacgagtgtctgctgatgaagacctcaaactttctgatcttttaaaatattacttaagagaatctcaagctgctaaggatctcctgtatcgaaggtctaggtcactagtggattatgaaaatgctaataaagcactggataaagcaagagcaaaaaataaagatgttctacaggccgaaacttcccaacaattatgttgtcagaaatttgaaaaaatatctgagtctgcaaaacaagaacttatagattttaagacaagaagagttgctgcattcagaaaaaatttagtggaactggcagagttagaactgaagcatgcaaagggtaatctacagttgctgcagaactgcctggcagtgttaaatggagacacataagccacactccgccttcctgttaaaaagggctgccttccttcaaattttatttttgttttcttaatgatgttaagcatttatgctcactggaaacaaacaaaaagcagctgaaaaagtgcatcaactcctctttttctgagaaacatggagcagcgcacgcccaggcgatgccagtctgtgtgccgtgatgccgcactgtgttccccatgacagtggtccatcatcgtgcactcgtcatactcagaagtccaaagttcattcttctttaaagtagcctctataactctgtttattttataaatagtattccttatggctgccactcttatttacctttaaataatttctgaaatttaaccttttcagaatgcattgttgaaacaagataaagattgccttttttgaattttttaaattttgtttttaaaagcatataccaccttagttcattcatgtatcctggtaaagcatcttaatcagacttatttttaattactgaatatttcttagacgttttgggacagattttatgtaatctttataagtatgatttctgaagaaaagcaaatgcattagtatgtttgccttaaacttgtagactaaaccaagtattgtaaaataaacagcgataacagtgatagtttttaactctatggtcattgtatcactctggaaaatgtggagtagctgtaataaatctactcctgtattatgctttacagtgcaggtcttagtttttcttttttctcatttcttttgaaatggcatctcgaacaaagtccaccaatccctttacaaaagaatgaactgctcctctgtgtgtacttcatagaaggtggaatcggacagaggcaggttagtgacagttattcctgaaatacaggagcagagtacagtctgttgtggtttcccggattccgcgcctagctcagccaattaagcatgagacataggccattgagccacttagtagttatgcgagtggatagattggtatgtagagggaaagaggtctgctgtaaagaacaacacttgtttgtctgtggggaaagaaaagcagaatacttgagatgaaagttggcatacaaataggatactatcgccagtagttatattacaaacattatcggcctttctagtgtgaatgaacattagacacattattgtcattcctagtttaaagttaaggttgcgtggttggatttttccactatctttttctaatttttctaccatttggagaccgtaggcatttgggcctgtcaccccttggatgggttcctagtttgtttacattttcctgaaccctcctgagcgcccgttcttggtctaatccccagtcgtgatgattccacacttcctcagccgcatgttgtcttgcctcattcatgagctggtcagcgtttcgtctctttaactgacatgttccccagtgctgtttgaactgttgagtttccgttgctggctgagtgcgttttgtccttcacgtaaccttcgctggtaaaaataagcccatgtgatgtccaccagtggatgaatgctggaccgagagccctagcttctggatccaggtctaggcccttcatctgctgctctgtggcccagggcaggtttgcttgacctctgcctcagttctcgactctaaaggacatactgacctacctcacaggggtgttgtgaggattaataaatgttggtactctgctttgg

SEQ ID NO: 644 - DNA, 3790 bp, Homo sapiens
agcaacaaagaaggtggtgattggctggattcttgctcatggctcctggcagatctgacaaatcctcttgcttttgctctaatctctgtctggatacttttaggaaaagaaccttgttattatgtactaaagtgaataatttgtgctcttagagtaggagttggaactataggacttgaaggcaagagcaggtatcttatcaaggatctactcactcagtttccctaaagctctctctccagatcggattcaaccgcacatcatgacagatgttccggctacatttacccaggctgagtgtaatggggataaaccacctgaaaacggtcaacaaacaatcactaaaatcagtgaggaattgactgatgtggacagccccctgccacactacagggtagaacccagtctggaaggtgcactcaccaaaggaagtcaggaggaaagaagaaaattacaagggaacatgctgctcaactcatccatggaggacaaaatgctaaaagaaaacccagaagagaaactctttattgttcataaggctatcacagatctttctctccaagaaactagtgctgatgaaatgacattcagagaagggcatcagtgggagaagattcctctgagtggcagtaaccaggaaataagaagacagaaggagaggattactgagcagcctctcaaagaggaagaagatgaggacaggaagaacaaaggtcaccaggcagctgaaattgaatggctgggatttcgaaaacctagccaagctgacatgttacattctaaacatgatgaggagcagaaggtttgggatgaagaaattgatgatgatgatgatgataattgcaataatgatgaagatgaagttcgagtgatagaatttaagaaaaaacatgaagaggtttctcaatttaaagaggaaggtgatgcaagtgaggactccccactgagcagtgccagttcccaagctgtgacacctgatgagcagccaaccttagggaagaagagtgatatctccagaaatgcttattccagatacaatacaatatcctatcggaaaatcagaaagggaaataccaagcaaagaattgatgaattcgagtctatgatgcatttataaactaactggaactgagaaattctcatgcccactaaaggaaaagctaattctattgccccagggtgcatatttctatgccttatttgagttatcacttggagggaggtggaagttgactctctttttcactgtagaataatgtggaaataaccctagataaaaattcagtctgataacctcaaatcaaaaagctttaaataaattcttgggcatttatcttttaaaacttcactaatatagcattgtgtgataagcactaagcagtcagtcccctgggggaatctggcataattcggctataaatgtagcaatgcttggaaaggtagtcatcaaatgagactatttgaggggactatttgaaatgattctggtatttcttttggtatctttcttcctgtacattggagtgatggaaagtctggtattaaaacctctcttacttttaaacttgattttgcagactctggcaataagccttccaaaattctgtgccttttctattatcaccaaacaatatgttaagtggctttccttggcatctacagagaaaacattctatagccctccttcctaggtgttaccattcactgaatcttctctcagagggagatgagcaattgtcagtcaggataattctgtttgctaaatgttgcctttatgctttcaaactgaattaaacccattgtgaggttgacactgggaggggctagaagattggtgggcagcagactaaagagttatgttggatagttttatttctgtggctgaaaataaaatcttgtctagcacagttaaagtcattaaaaataaaaatgacagctttagcacaattttaagaaaatgcccctctctattaccacattttctcttattaacagtatctcagaataattttctttccttagaaacctgagagaatgctagtcataactgtactagttactatgaaaatggaaataattatcttagaatattttcaaagtagagcgtgagcatgtatttttagtgggagagctctgatagttgttgggaatatataatttactggacctcagcccaaatcaagatgcttaaaattgtacttgtggagcttcactcaaaccaatgtgtcaaataacgtattgaatatttatgaaaagagagactatatttatattcttagatagtttgttccacaatttttcatttcatgcttccatatatattaccctgaactttctatcaccacagataaagattttgttttgccctgcaaataaaaagacaattccttattgtctgaatgtaatacagtcttcattgtactattcaaccctttgtttctttctttttcattttgtgaaaaactccatgttagtcctcttagatgactgcttatttatgtgtaacataaatcccacatattctaatgacaacttctttaatccttccgggtcatatattatatttccatagtatcacatactattatttagttgtttacaagactccaatttgaattcaggattacagtgctcctttcattctttcaaacagataacataaaagttctgttaccctcattctatacaacctatggatttcatgtgttacaatatcagtttccagaataaagtgagggaaatcaggtctttattgataaagttagggagaagattgatgcaataggacaatttccaatttaatttagatcctctaatctttctacatggacaagctgttttcttttctaggttactgataacccctacaattttcgacttaacttcaaaacacagtattgtgttatctatcacataacaggaccatgtttttaacctaccatcaagagcctgtattttgagttattccaacagagatgatggattcctgtagaactagaggtgggtgacctatggttatgtggcacggcaaagcaagtacctcttaagggactctaatatatgctaacgctggtcctcttagctctgtgctctcaccagacaatgaatgaactatgaaagatttagtcaacagaaactattttagggtatgtttagttggtaaatgcttcatgttcatggatgacacaatgtttttgcaaaaaaaccctgaaactattctttggcattggtgtccatggccctataccgccatcttacacgaaagccacagagttgaaagccacagagttgaaagccacagagttaagtgacctcaggtaacataatggtgatggttggccatttgagtctttgtaacctaggaaagacaaaggtctgattcagattgcatgggggatttttaacatatttgaaactcagggggaacatgattaagaacacaaactggtagctacacatgaaggtttacttgagcttttgtgattcaaagttcaggggtggtaaggactctggtaccagggaagagggagaattaatttattgtgcaaatgctggtatttcttacatgattttttgttttcctctgttgctagataaatagaaactaataatagctctatttctctgccaatataaaatctacctttcatataatgctacattgaaggcacagaatttgctaccatctctctctccccctacctaccaaactatccacaatttaaataaagaactgctgtgtctgacttactctcaataaaagtgtgtgtctttaaaaaaaaaaaaaaaa

SEQ ID NO: 645 - DNA, 1951 bp, Homo sapiens
gagcccggagcaggccgggctcaagaaagaggaaagttgaggacgccccacctcggagaggcggcgcccctgagtaggccaggagcctctcttgcaacttctgccaccgcgggccaccgcggccgcctgatcccgcagaggaaggtcgcggccgtggagcgatgacccgcggcggtccgggcgggcgcccggggctgccacagccgccgccgcttctgctgctgctgctgctgctgccgctgttgttagtcaccgcggagccgccgaaacctgcaggagtctactatgcaactgcatactggatgcctgctgaaaagacagtacaagtcaaaaatgtaatggacaagaatggggacgcctatggcttttacaataactctgtgaaaaccacaggctggggcatcctggagatcagagctggctatggctctcaaaccctgagcaatgagatcatcatgtttgtggctggctttttggagggttacctcactgccccacacatgaatgaccactacacaaacctctacccacagctgatcacgaaaccttccatcatggataaagtgcaggattttatggagaagcaagataagtggacccggaaaaatatcaaagaatacaagactgattcattttggagacatacaggctatgtgatggcacaaatagatggcctctatgtaggagcaaagaagagggctatattagaagggacaaagccaatgaccctgttccagattcagttcctgaatagtgttggagatctattggatctgattccctcactctctcccacaaaaaacggcagcctaaaggtttttaagagatgggacatgggacattgctccgctcttatcaaggttcttcctggatttgagaacatcctttttgctcactcaagctggtacacgtatgcagccatgctcaggatatataaacactgggacttcaacgtcatagataaagataccagcagtagtcgcctctctttcagcagttacccagggtttttggagtctctggatgatttttacattcttagcagtggattgatattgctgcagaccacaaacagtgtgtttaataaaaccctgctaaagcaggtaatacccgagactctcctgtcctggcaaagagtccgtgtggccaatatgatggcagatagtggcaagaggtgggcagacatcttttcaaaatacaactctggcacctataacaatcaatacatggttctggacctgaagaaagtaaagctgaaccacagtcttgacaaaggcactctgtacattgtggagcaaattcctacatatgtagaatattctgaacaaactgatgttctacggaaaggatattggccctcctacaatgttcctttccatgaaaaaatctacaactggagtggctatccactgttagttcagaagctgggcttggactactcttatgatttagctccacgagccaaaattttccggcgtgaccaagggaaagtgactgatacggcatccatgaaatatatcatgcgatacaacaattataagaaggatccttacagtagaggtgacccctgtaataccatctgctgccgtgaggacctgaactcacctaacccaagtcctggaggttgttatgacacaaaggtggcagatatctacctagcatctcagtacacatcctatgccataagtggtcccacagtacaaggtggcctccctgtttttcgctgggaccgtttcaacaaaactctacatcagggcatgccagaggtctacaactttgattttattaccatgaaaccaattttgaaacttgatataaaatgaaggagggagatgacggactagaagactgtaaataagataccaaaggcactattttagctatgtttttcccatcagaattatgcaataaaatatattaatttgtcactttaaaaaaaaaaaaaaaaaaa

SEQ ID NO: 646 - DNA, 6678 bp, Homo sapiens
gagttccgagcgaccgatggagatggcggctgcggctgagtgacggacggtggaggcccagagcccgggcctgaagggggggacaaacctgggtgcccgcaggagcccggcagggtactgtgctaaaccctggggagacggcgaagtggaaaacatatagagtctgtgccctcccagattttacagtcttacttggtcacttcacgtatgtacctgcggttataaattgagatgagtgctgtgaaggagaagtccattctgatgctctgagtgtcttacaagtatcaagaacttactatatgtggttgaataaacaatcaaggtaaagagcatcaagtaaaaacttctgcttgttgataagtacttcagacattcccccagtggctgaagtggcatatgaattatgaagttggatcatttggaatgaatgtaagagaattgccaagggctcctcctactccagagaggaaacctcatccagggccatgaagccacttcctcaccatctgtgtgctgcttaagctaatgctgcgggaaccatggttccttgggaggaatcaagctgactcttggcatgagattcctgccttcctagggttgagagcggcactgccatggcttctctggacgacccaggggaagtgagggagggcttcctctgccctctgtgcctgaaggatctgcagtctttctatcagcttcactcacattacgaggaagaacactcaggggaagaccgtgatgtcaaagggcaaattaaaagtcttgtccagaaggctaaaaaagcaaaggacaggttgttgaaacgagaaggggatgatcgagcagagtcagggacccaaggatatgagtctttcagctatggaggggttgatccttacatgtgggaaccccaggagcttggtgctgtgagaagccatctttccgacttcaaaaaacaccgagctgctagaattgaccactatgttgtggaagtcaataaactaataatcaggttagagaagctcactgcatttgacagaacaaatactgagtctgcaaagattcgagcaatagaaaagtctgtggtgccttgggtcaacgaccaggatgtccctttctgtccagactgtgggaataagttcagcatccggaaccgccgccaccactgccgcctctgcgggtctattatgtgcaagaagtgtatggagctcatcagccttcccttggcaaacaagctcaccagtgccagcaaggagtccctgagcacccacaccagccccagccagtcacccaacagtgtccatggctcccgccgaggcagcatcagcagcatgagcagtgtcagctcggtcctggatgagaaggacgatgaccggatccgctgctgtacacactgcaaggacacgctgctcaagagagagcagcagattgatgagaaggagcacacacctgacatcgtgaagctctacgagaaattacgactttgcatggagaaagttgaccagaaagctccagaatacatcaggatggcagcatcattaaatgctggggagacaacctacagtctggaacatgccagtgaccttcgagtggaagtgcagaaagtgtatgagctgatagacgctttaagtaagaagatcttaaccttgggcttgaaccaggaccctccaccacatccaagcaatttgcggctgcagagaatgatcagatactcagctacactttttgtgcaggaaaagttgcttggtttgatgtcactgccaaccaaagaacagtttgaggaactgaaaaagaaaaggaaggaggaaatggagaggaagagggccgtggagagacaagctgccctggagtcccagcgaaggcttgaggaaaggcagagtggcctggcttctcgagcggccaacggggaggtggcatctctccgcaggggccctgcccccttgagaaaggctgagggctggctcccactgtcaggaggtcaggggcagagtgaggactcagacccgctcctccagcagatccacaacatcacatcattcatcaggcaggccaaggccgcgggccgcatggatgaagtgcgcactctgcaggagaacctgcggcagctgcaggacgagtatgaccagcagcagacagagaaggccatcgagctgtcccggaggcaggctgaggaggaggacctgcagcgggaacagctgcagatgttgcgtgaacgggagttggaacgagaaagggagcagtttcgggtggcatccctgcacacacggactcggtccctggacttcagagaaatcggcccttttcagctggagcccagcagagagcctcgcacccaccttgcttatgctttggatctaggctcttccccagttccaagcagcacagctcccaagaccccttcacttagctcaactcaacccaccagagtgtggtctgggcccccagccgttggccaggagcgcttaccccagagcagcatgccacagcaacatgaggggccctccttaaacccctttgatgaggaagacctctccagccccatggaagaggccactactggtcctcctgctgcaggggtttccttagacccttcagcccgcatcctgaaagagtacaatcctttcgaggaagaggacgaggaggaggaagcagtggcagggaatccattcattcagccagacagcccagctcctaaccccttcagtgaggaagacgaacatccccagcagaggctctcaagccctctggttcctggtaacccctttgaggaacccacctgtatcaacccctttgagatggacagtgacagtgggccagaggctgaggagcccatagaggaagagctcctcctgcagcagatcgataacatcaaggcatacatctttgatgccaagcagtgcggccgcctggatgaggtagaggtgctgacagagaatctgcgggagctgaagcacaccctggccaagcagaaggggggcactgactgaccagcagtggagagggcacctttgggcccaggggtctggcaggagccagtggagcaggacagagggcaggcaggatggatggggaaggtggcagggtgagaactcagatgcacacaggtgaggggcaggaatctgctgttttgtgttgcgcactttgaggtatttccactacagttgaataataaaatagaaactagaacagggagaatcagcattcagttgctgcttttcctgtttattattactatcttttgtaatcggaggtttaccccttttgaagggactttacatttttactaccgagatataactaaatgcagctctgttgggcccagggcagaaatggctgctgtgtacctcttgggtccatttgctactgcctagtcttggttccttatgcagtattatagggcagcctttttagagcccttcctttagccaagacagagaagatagattccactgagctctattctgctctgacagaagtccatccctagtaggctgtgagttccatttcacctggggccgcctctcccctgctctgcacttcctgtctgtacaatagaagggggaggtgctgctatgaaggggagagtttagacccaggagagcccagcacctctttttaaggtggggtgatgggaatatttcaccagggtctattttctcagtttaagttcttttttgtctctttcaggaagttaagctcccagtgcagggtatcaatgtgaatctggtcctgagctttttagaaaataagagtggtggccgggcgcgctggctcacgcctgtaatcgcaacactttgggaggccgaggcaggcagatcacaaggtcaggagatcgagaccaccctggctaacacagtgaaatcccgtctctactaaaaatacaaaaaattagccaggcgtggtggtgggtgcctgtagtcccagctactttggaggctgaggcaggagaatgctgtgaacccgggaggcagagcttgcagtgagccgagatcgcaccactgcactccagcctgggcagtgagagtgagactccgtctcaaaaaaaaataagagtggttaactttttggttgatattagtattatttgtgagaagagtttccccacccttcttctgatagaacaattgtctgtcactggagaaatctccctccagagctttggcaaagttactctgatctgggtctgtttaaaaggccgggtctctaatttaggaatcggtgatttggaagcttttgcagaacatcaccagaagaagggaagcttcccagagtcagaagctaaattaaaataatttccaaggctatttgatcagccttcttcctttttggttcattgtgtcctgacttggggcactgatgagattttttattttttttgagacagagtttcactttgttgcccaggctggagtgtagtggcatgatctcagctcactgcaacctccacctccctggttcaagtgatatttgtgcctcagccccctgaatagctaggattacaggcgtgggccaccacgcctggttaatctctgtatttttagtagaggtagagtttcaccattttggccaggctggtttcgaactcctggcctcaagtgatctgccaccttggcctcccaaagtgctgggaatacaggcgtgagccactgtgcccgccctgatgagatattttattaccaatgttagtattgagaaactgaaatgtttgaagaagcacaacccaggatcgtgctggtagcaccacagtacttaaactgttggtcaattaaggccagaaagggaaattgttaatttagctctggtgctttggtttacaggaacataactcttaactgacatctgacatcatgatagccatatgtgctcagctctgggtagagtttctgcagttactcatctgaactaatgaacaataactgaccactagtcactttatgccgtgtaactagctctaggccatactttcactggttactggtgtgaaagctgaaattcattttgttacattctggtgaagacccctcttgataatgggaatgttttaactctcttgatgaaaaaataatctgtatttgtgttgatgttcacatttctgtagcacatttcttatccttttggttgaatgaaaagatcttgtataggggtgtggagatggggagtgggtagaagtgtgtgaaggacgctttgcatttgggatctgttcacaaacagccatatgagtgtgttaatgaatgtcagccagttaccaaccctgctggttgttatgggttgttttgagaagttggcaaccaggcatctaagatgttgcctggtacaggcctcttttcttccctgaggcccatgacatttctctgttactctagagggtttctcagatggccagtaggctcctccctgcttagggtctcatttctctgaaaagaggatgaactgaaaagcaggtagttccagaagctaattgctgctttccatcataattatttttcttgtgagaacatttctcttttaattagctagtgattttgattaagactaattcactaaacatacccttccctcaaatcacctcaggtagcaatctgtaagtaactaaaagcattgaaaaacacacaagaaacatttttaaaaactatttttaaaggcctggccgggtgcagtggctcactcctgtaatcccagcactttgggaggccgagacgggtggatcacctgaggtcaggaatttgagactagcatggccaacatggtgaaaccccgtgtctactaaaaatacaaaaattagctgggcgtggtggcagacgcctgtaatcccagctactcagggaggctgaggcacgagaatcgcttgaacctgggaggcggaggttgcagtgagccaagattgcgccactgcactccaacctgggtgacaagagcaagactccgtctcacaaaaaacaaacaaaactgactgattgaatatactaaaccaaactaaaatcatattcttttgattaagtttatccatggctgtattcttctatgaattcttccatttaattcttccacgattatcttctcctgtaaatacatcacaggagttagaattctctacccatcagctgtaccatgtcgcagaattcatgcaggcacaaagttggagttacagagatgggttgacagcaggcaaacttggcctatgtattataaccacaacttcaagttcttacctcatgtgaatattcaccctttctttagtcttccaaggcaaacagccccgtctcatcaccagatgagcaaggtcttgatatggcatagcagatctccctagacacagatcatgagaaaagatggaagagacttagggattcaggcatcagatgaagttggcttttcccttttatgccttgtttgtatttaccctgtctaatacactaaggatacttactcattgtacttgcagctcaatatgtctttgctgttcagatactaaaatgtacctctgagtcattgtgagctgtgtggtaggttggacattggcatagttggtgatgggactcaaaatgaaaaggtggtctctttaccaggtcacagactgtagcagattgtgcttgttatctgacaatgactgtcactttgagggtcgttgatttgcatgcactactctggggccttgtattggagccttttttaaaaaaaataaaatctgagatagag

SEQ ID NO: 647 - DNA, 4530 bp, Homo sapiens
ctcctttccgtggtgtgtagccggcttggcgtgaccctcgcctgatccagttgttagagttggaagcttggcagttggcctcccttcttcccatggaggacgggggcttaacagcctttgaagaggaccagagatgcctttcccagagcctccccttgccagtgtcagcagagggcccagctgcacagaccactgctgagcccagcaggtcgttttcctcagcccacagacacctgagcagaaggaatgggctttccagactctgccagagcaggacagcgctctctgaagacagatggagctcctattgtctatcatcactggctgcccagaatatttgtacaagtaaactgcactgccctgctgcccctgagcacacggacccgtccgaaccgcggggcagtgtgtcctgctgctccctgctgcggggactgtcctcagggtggtcctcacctctgcttccggcccctgtgtgcaaccctaacaaggccatcttcacggtggatgccaagaccacagagatcctggttgctaacgacaaagcttgcgggctcctggggtacagcagccaggacctgattggccagaagctcacgcagttctttctgaggtcagattctgatgtggtggaggccctcagcgaggagcacatggaggccgacggccacgctgcggtggtgtttggcacggtggtggacatcatcagccgtagtggggagaagattccagtgtctgtgtggatgaagaggatgcggcaggagcgccgcctatgctgcgtggtggtcctggagcccgtggagagggtctcgacctgggtcgctttccagagcgatggcaccgtcacgtcatgtgacagtctctttgctcatcttcacgggtacgtgtctggggaggacgtggctgggcagcatatcacagacctgatcccttctgtgcagctccctccttctggccagcacatcccaaagaatctcaagattcagaggtctgttggaagagccagggacggtaccaccttccctctgagcttaaagctgaaatcccaacccagcagcgaggaggcgaccaccggtgaggcggcccctgtgagcggctaccgggcatctgtctgggtgttctgcaccatcagtggcctcatcaccctcctgccggatgggaccatccacggcatcaaccacagcttcgcgctgacactgtttggttacggaaagacggagctcctgggcaagaatatcactttcctgattcctggtttctacagctacatggaccttgcgtacaacagctcattacagctcccagacctggccagctgcctggacgtcggcaatgagagtgggtgtggggagagaaccttggacccgtggcagggccaggacccagctgaggggggccaggatccaaggattaatgtcgtgcttgctggtggccacgttgtgccccgagatgagatccggaagctgatggaaagccaagacatcttcaccgggactcagactgagctgattgctggaggccagctcctttcctgcctctcacctcagcctgctccaggggtggacaatgtcccagaaggaagcctgccagtgcacggtgaacaggcgctgcccaaggaccagcaaatcactgccttggggagagaggaacctgtggcaatagagagccccggacaggatcttctgggagaaagcaggtctgaaccagtggatgtgaagccatttgcttcctgcgaagattctgaagctccagtcccagctgaggatgggggcagtgatgctggcatgtgtggcctgtgtcagaaggcccagctagagcggatgggagtcagtggtcccagcggttcagacctttgggctggggctgccgtggccaagccccaggccaagggtcagctggcggggggcagcctcctgatgcactgcccttgctatgggagtgaatggggcttgtggtggcgaagccaggacttggcccccagcccctctgggatggcaggcctctcgtttgggacacctactctagatgagccgtggctgggagtggaaaacgaccgagaagagctgcagacctgcttgattaaggagcagctgtcccagttgagccttgcaggagccctggatgtcccccacgccgaactcgttccgacagagtgccaggctgtcaccgctcctgtgtcgtcctgcgatctgggaggcagagacctgtgcggtggctgcacgggcagctcctcagcctgctatgccttggccacggacctccctgggggcctggaagcagtggaggcccaggaggttgatgtgaattcgttttcctggaacctcaaggaactctttttcagtgaccagacagaccaaacgtcatcaaattgttcctgtgctacgtctgaactcagagagacaccctcttccttggcagtgggctccgatccagatgtaggcagtctccaggaacaggggtcgtgtgtcctggatgacagggagctgttactactgaccggcacctgtgttgaccttggccaaggccgacggttccgggagagctgtgtgggacatgatccaacagaaccgcttgaggtttgtttggtgtcctctgagcattatgcagcaagcgacagagaaagcccaggacacgttccttccacgttggatgctggccctgaggacacgtgcccatcagcagaggagccaaggctgaacgtccaggtcacctccacgcccgtgatcgtgatgcgcggggctgctggcctgcagcgggagatccaggagggtgcctactccgggagctgctaccatcgagatggcttacggctgagtatacagtttgaggtgaggcgggtggagctccagggccccacacctctgttctgctgctggctggtgaaagacctcctccacagccaacgcgactcagccgccaggacccgcctgttccttgccagcctgcccggctccacccactctaccgctgctgagctcaccggacccagcctggtggaagtgctcagagccagaccctggtttgaggagccccccaaggctgtggaactggaggggttggcggcctgtgagggcgagtactcccaaaagtacagtaccatgagcccgctgggcagtggggccttcggcttcgtgtggactgctgtggacaaggaaaaaaacaaggaggtggtggtgaagtttattaagaaggagaaggtcttggaggattgttggattgaggatcccaaacttgggaaagttactttagagatcgcaattctatccagggtggagcacgccaatatcatcaaggtattggatatatttgaaaaccaagggttcttccagcttgtgatggagaagcacggctccggcctagacctcttcgctttcatcgaccgccaccccaggctggatgagcccctggcgagctacatcttccgacaactagtgtcagcagtgggatacctgcgcttgaaggacatcatccaccgtgacatcaaggatgagaacatcgtgatcgccgaggacttcacaatcaagctgatagactttggctcggccgcctacttggaaaggggaaaattattttatactttttgtgggaccatcgagtactgtgcaccggaagttctcatggggaatccctacagagggccggagctggagatgtggtctctgggagtcactctgtacacgctggtctttgaggagaaccccttctgtgagctggaggagaccgtggaggctgccatacacccgccatacctggtgtccaaagaactcatgagccttgtgtctgggctgctgcagccagtccctgagagacgcaccaccttggagaagctggtgacagacccgtgggtaacacagcctgtgaatcttgctgactatacatgggaagaggtgtttcgagtaaacaagccagaaagtggagttctgtccgctgcgagcctggagatggggaacaggagcctgagtgatgtggcccaggctcaggagctttgtgggggccccgttccaggcgaggctcctaatggccaaggctgtttgcatcccggggatccccgtctgctgaccagctaaacaccaatttcttcctgcttttctccacttggtttggaaaatcacacagttttcaggctccatctgtttggagaaaatacattctgaagcatccccaattcaccttctaaaaactcatgtgcaggtttgataaacaccagaacagaagacagtgatgctgtattattttagatttattacatagatttggaattcacttttttcatgacctagaaaaaaacattccagtgttcaactgttttatattattaaagggcttttaatttgtgaacttctgaaggcatgagtgttttctctttctacttttgtatatgtgcatgttttgtttcctctgacttggtatatgctcatctgagtgacggatatgtgaaatttgtagaactggttagtcaaatggccagactatttcattaatttatttcctcaaatgcttttcaaattaaagcacctttgttagtaaacagtt

SEQ ID NO: 648 - DNA, 3656 bp, Homo sapiens
gcccgcgctgcgagccttccatggtgcagcgcatgtgggccgaggcggccgggcctgctggcggcgccgagccgctgtttccgggctcccggcggagccgcagcgtgtgggacgccgtgcgcctggaggtgggcgtccccgacagctgcccggtggtgctgcacagcttcacgcagctagaccccgacctgccgcgcccggagagctccacgcaggagatcggtgaggagctgatcaacggagtcatctactccatctccctgcgcaaggtgcagctgcaccacggaggcaacaaggggcagcgctggctcgggtatgagaatgagtcggccctgaacctttatgagacttgcaaggtgcggaccgtgaaggctggcacgctggagaagctggtggagcacctggtgccagccttccagggcagcgacctctcctacgtcaccatcttcctgtgtacctatagagccttcaccaccacccaacaggtcctggacctgctgttcaaaaggtacggtagatgtgacgccctcacggcctcctctagatacggctgcatcctcccctattccgacgaggatggtggaccccaggaccaacttaaaaatgccatctcctccatcctgggcacctggctggaccagtactcggaggatttctgtcaacctccggactttccctgcctcaagcagctggtggcctacgtgcagctcaacatgccaggctcagacctggagcgccgtgcccaccttctcctggcccagctggagcactcggaacccattgaggcagagcctgaggctctgtcaccagtgccagctctaaaaccaactccagagctcgagctagctctaacaccagctcgagcacccagcccagtgccggctccagccccggagccagagccagctccaacaccagctccaggttcagagctagaagtagctccagcaccagctccggagctccagcaggctccagagccagctgtgggactagaatcggctccagcgccagctctggaactagagccagctccagaacaggatccagctccctcacaaactctagagctggagccagctccagcaccagttccatcattacagccttcctggccttcacctgtggttgcagagaacgggctgagtgaggagaagcctcacctcttggtgttccctccagatctggtggcagagcagtttacactgatggatgcggaactgttcaagaaggtggtgccctaccactgcctgggctccatctggtcccagcgggacaagaagggcaaggagcacctggcgcccaccatccgcgccactgtcacccagttcaacagtgtggccaactgtgtcatcaccacctgcctcgggaaccgaagcacgaaagccccagacagggccagggtggtggagcactggatcgaggtggccagggagtgccggatcctcaagaacttctcgtcactgtatgccatcctctctgccctgcagagcaactccatccaccgtctgaagaagacgtgggaagacgtttccagggacagtttccggatctttcagaagctgtcagagatcttctcagatgagaacaactactcattgagccgggagctgctcatcaaggagggcacctccaagtttgccaccctggagatgaaccccaagagagcccagaaacggccgaaggagacgggcatcatccagggcaccgttccctacctgggcacgttcctcaccgacctggtgatgctggacactgccatgaaggactatctgtatggcagactcatcaactttgagaagaggaggaaggagttcgaggtgatcgcccagatcaagctgctgcagtcggcctgcaacaactacagcatcgcgccagatgagcaatttggggcctggttccgggccgtggagcggctcagcgagactgagagctacaacctgtcgtgcgagctggagcccccatccgagtcagccagcaacaccctcaggaccaagaagaacacagccattgtcaagcgctggagcgaccgccaggcccccagcactgagctcagtaccagtggcagctcccactccaagtcctgtgaccagctcaggtgtggcccctacctcagcagcggggacatcgctgacgcgctcagcgtgcactcggccggctcctctagctccgacgtggaggagatcaacatcagcttcgtcccggagtctcctgatggccaggaaaagaagttctgggaatcagcctcacagtcatccccggagacctccggcatcagctcagcctccagcagcacctcgtcctcctcagcctccaccacgcccgtggctgccacacgcacccacaagcgctctgtctcagggctctgcaactccagctccgcgctgccgctctacaaccagcaggtgggcgactgctgtatcatccgcgtcagcctggacgtggacaatggcaacatgtacaagagcatcctggtgaccagccaagataaggctccggctgtaatccgcaaggccatggacaaacacaacctggaggaggaggagccggaggactatgagctgctgcagattctctcagatgaccggaagctgaagatccctgaaaacgccaacgtcttctatgccatgaactctaccgccaactatgactttgtcctcaagaagcggaccttcaccaagggagtgaaggtcaagcacggagccagctccaccctccctcgcatgaagcagaaaggactcaagattgccaagggcatcttctgagggcatcctcccagggtctggctggctggtagccaagcacttatggaccagagtggcccaggccagctgggcgccttcctcccacctgccagcccagggtaccccagactccagtttcatcctgaacctctcccgctgctgggattgacgcctgccattggtcaggctgacctggcctcccgtggaccactcgctgccttaggtgccttctgctctctggaaccagaggactagctgacttttgccaaggagcagtgccaacgggcatggcatggtgccctgcctgcccccgggcgccacctctgtacacttccctgacaccttcccaggtgtgggtcactgccacctgtgcccatgggcaccccagagcacccactgtgaccactgcagttctctcatgcccacaggcactggcctgtgaccttcgcaggggtcccggcccctcccaccactctagcctttctcaggctgcaccaaagattccatcatcagggccaactgagagtgagggagtctcacccaccgcttaccccagccctcccctgggagcagagagagaaaccctcttcatggaccagactctgcacccggtgagtgaggacagtcccagctgagtcccatcgatgttgaatctcatgccactgcaagtgccattcaccactgcgtcctgggctttacgagaccatgcaagacgggggttagtgaggaaggaggatttggggtgggggtggggtgattgaatatttgtataaaaagcaaaaagaaaaaaaaaatgtttgtttactgattggggaggggcaatatttatttgttgtaaatagcaaatgctagacttgaatattatattaaaatcctgtttctactataaaaaaaaaaaaaaaaaaaaaaaaa

SEQ ID NO: 649 - DNA, 1286 bp, Homo sapiens
ctctttcttcctgtctgcttggaaagatggcgtcccgcaaggaaggtaccggctctactgccacctcttccagctccaccgccggcgcagcagggaaaggcaaaggcaaaggcggctcgggagattcagccgtgaagcaagtgcagatagatggccttgtggtattaaagataatcaaacattatcaagaagaaggacaaggaactgaagttgttcaaggagtgcttttgggtctggttgtagaagatcggcttgaaattaccaactgctttcctttccctcagcacacagaggatgatgctgactttgatgaagtccaatatcagatggaaatgatgcggagccttcgccatgtaaacattgatcatcttcacgtgggctggtatcagtccacatactatggctcattcgttacccgggcactcctggactctcagtttagttaccagcatgccattgaagaatctgtcgttctcatttatgatcccataaaaactgcccaaggatctctctcactaaaggcatacagactgactcctaaactgatggaagtttgtaaagaaaaggatttttcccctgaagcattgaaaaaagcaaatatcacctttgagtacatgtttgaagaagtgccgattgtaattaaaaattcacatctgatcaatgtcctaatgtgggaacttgaaaagaagtcagctgttgcagataaacatgaattgctcagccttgccagcagcaatcatttggggaagaatctacagttgctgatggacagagtggatgaaatgagccaagatatagttaaatacaacacatacatgaggaatactagtaaacaacagcagcagaaacatcagtatcagcagcgtcgccagcaggagaatatgcagcgccagagccgaggagaacccccgctccctgaggaggacctgtccaaactcttcaaaccaccacagccgcctgccaggatggactcgctgctcattgcaggccagataaacacttactgccagaacatcaaggagttcactgcccaaaacttaggcaagctcttcatggcccaggctcttcaagaatacaacaactaagaaaaggaagtttccagaaaagaagttaacatgaactcttgaagtcacaccagggcaactcttggaagaaatatatttgcatattgaaaagcacagaggatttctttagtgtcattgccgattttggctataacagtgtctttctagccataataaaataaaacaaaatcttgactgcttgctcatttgaaaaaaaaaaaa

SEQ ID NO: 650 - DNA, 1979 bp, Homo sapiens
gcagcgtgttctgattctttgcgggacggcgagcgcatttgtgctttgcccgccgcggcctaggaggccttttgaggccgcgtagtcggtgtttttgaactgactctacagcttctggcaggccgtgcggcgccctgacccggcctcaccatgttggtgctgtttgaaacgtctgtgggttacgccatctttaaggttctaaatgagaagaaacttcaagaggttgatagtttatggaaagaatttgaaactccagagaaagcaaacaaaatagtaaagctaaaacattttgagaaatttcaggatacagcagaagcattagcagcattcacagctctgatggagggcaaaatcaataagcagctgaaaaaagttctgaagaaaatagtaaaagaagcccatgaaccgctggcagtagctgatgctaaactaggaggggtcataaaggaaaagctgaatctcagttgtatccatagtcctgttgttaatgaacttatgagaggaattcgttcacaaatggatggattaatccctggggtagaaccacgtgaaatggcagctatgtgtcttggattggctcacagcctgtctcgatatagattgaagtttagcgctgataaagtagacacaatgattgttcaggcaatttccttgttagatgacttggataaagaactaaacaactacattatgcgatgtagagaatggtatggctggcatttccctgaattaggaaaaattatttcagataatttaacatactgcaagtgtttacagaaagttggcgataggaagaactatgcctctgccaagctttctgagttgctgccagaagaagttgaagcagaagtgaaagcagctgcagagatatcaatgggaacagaggtttcagaagaagatatttgcaatattctgcatctttgcacccaggtgattgaaatctctgaatatcgaacccagctctatgaatatctacaaaatcgaatgatggccattgcacccaatgttacagtcatggttggggaattagttggagcacggcttattgctcatgcaggttctcttttaaatttggccaagcatgcagcttctaccgttcagattcttggagctgaaaaggcacttttcagagccctcaaatctagacgggatacccctaagtatggtctcatttatcatgcttcactcgtgggccagacaagtcccaaacacaaaggaaagatttctcgaatgctggcagccaaaaccgttttggctatccgttatgatgcttttggtgaggattcaagttctgcaatgggagttgagaacagagccaaattagaggccaggttgagaactttggaagacagagggataagaaaaataagtggaacaggaaaagcattagcaaaaacagaaaaatatgaacacaaaagtgaagtgaagacttacgatccttctggtgactccacacttccaacctgttctaaaaaacgcaaaatagaacaggtagataaagaggatgaaattactgaaaagaaagccaaaaaagccaagattaaagttaaagttgaagaagaggaagaagaaaaagtggcagaagaagaagaaacatctgtgaagaagaagaagaaaaggggtaaaaagaaacacattaaggaagaaccactttctgaggaagaaccatgtaccagcacagcaattgctagtccagagaaaaagaagaaaaagaaaaaaaagagagagaacgaggattaacagaaaggaattacgattatatcacccggacacacatcatgcttaagattcaactgggagcataccagggatgctctctaacgtaatcaagggaaggttcagtaagacaaagtgatttatcatctataacttcaaacctatttgtcttgacatcaactctgttaaccttatgtcatcatttcttagagtctttgatatacaaataaaattttctttgtattttaaaaaaaaaaaaaaaa

SEQ ID NO: 651 - DNA, 6952 bp, Homo sapiens
ttccagttacagctatatcagagaatgagttaatctcctcagaaatcactaaatactactctgaggggcttagaaattaacaggttgtttatataattggccttaaatgaggtgagagtgaagagactagagccatctctggaaaacatcattatcccattccccgggaagctaccctctggaactcaagatttgaccatatctgttttgaggattcattatgaacaaagaagtctcccaggtgtgaagtttttcaacatgagtggcctcggggacagttcatccgaccctgctaacccagactcacataagaggaaaggatcgccatgtgacacactggcatcaagcacggaaaagaggcgcagggagcaagaaaataaatatttagaagaactagctgagttactgtctgccaacattagtgacattgacagcttgagtgtaaaaccagacaaatgcaagattttgaagaaaacagtcgatcagatacagctaatgaagagaatggaacaagagaaatcaacaactgatgacgatgtacagaaatcagacatctcatcaagtagtcaaggagtgatagaaaaggaatccttgggacctcttcttttggaggctttggatggatttttctttgttgtgaactgtgaagggagaattgtatttgtgtcagagaatgtaaccagctacttaggttacaatcaggaggaattaatgaatacgagcgtctacagcatactgcacgtgggggatcatgcagaatttgtgaagaatctgctaccaaaatcactagtaaatggagttccttggcctcaagaggcaacacgacgaaatagccatacctttaactgcaggatgctaattcaccctccagatgagccagggaccgagaaccaagaagcttgccagcgttatgaagtaatgcagtgtttcactgtgtcacagccaaaatcaattcaagaggatggagaagatttccagtcatgtctgatttgtattgcacggcgattacctcggcctccagctattacgggtgtagaatcctttatgaccaagcaagatactacaggtaaaatcatctctattgatactagttccctgagagctgctggcagaactggttgggaagatttagtgaggaagtgcatttatgcttttttccaacctcagggcagagaaccatcttatgccagacagctgttccaagaagtgatgactcgtggcactgcctccagcccctcctatagattcatattgaatgatgggacaatgcttagcgcccacaccaagtgtaaactttgctaccctcaaagtccagacatgcaacctttcatcatgggaattcatatcatcgacagggagcacagtgggctttctcctcaagatgacactaattctggaatgtcaattccccgagtaaatccctcggtcaatcctagtatctctccagctcatggtgtggctcgttcatccacattgccaccatccaacagcaacatggtatccaccagaataaaccgccagcagagctcagaccttcatagcagcagtcatagtaattctagcaacagccaaggaagtttcggatgctcacccggaagtcagattgtagccaatgttgccttaaaccaaggacaggccagttcacagagcagtaatccctctttaaacctcaataattctcctatggaaggtacaggaatatccctagcacagttcatgtctccaaggagacaggttacttctggattggcaacaaggcccaggatgccaaacaattcctttcctcctaatatttcgacattaagctctcccgttggcatgacaagtagtgcctgtaataataataaccgatcttattcaaacatcccagtaacatctttacagggtatgaatgaaggacccaataactccgttggcttctctgccagttctccagtcctcaggcagatgagctcacagaattcacctagcagattaaatatacaaccagcaaaagctgagtccaaagataacaaagagattgcctcaattttaaatgaaatgattcaatctgacaacagctctagtgatggcaaacctctggattcagggcttctgcataacaatgacagactttcagatggagacagtaaatactctcaaaccagtcacaaactagtgcagcttttgacaacaactgccgaacagcagttacggcatgctgatatagacacaagctgcaaagatgtcctgtcttgcacaggcacttccaactctgcctctgctaactcttcaggaggttcttgtccctcttctcatagctcattgacagaacggcataaaattctacaccggctcttacaggagggtagcccctcagatatcaccactttgtctgtcgagcctgataaaaaggacagtgcatctacttctgtgtcagtgactggacaggtacaaggaaactccagtataaaactagaactggatgcttcaaagaaaaaagaatcaaaagaccatcagctcctacgctatcttttagataaagatgagaaagatttaagatcaactccaaacctgagcctggatgatgtaaaggtgaaagtggaaaagaaagaacagatggatccatgtaatacaaacccaaccccaatgaccaaacccactcctgaggaaataaaactggaggcccagagccagtttacagctgaccttgaccagtttgatcagttactgcccacgctggagaaggcagcacagttgccaggcttatgtgagacagacaggatggatggtgcggtcaccagtgtaaccatcaaatcggagatcctgccagcttcacttcagtccgccactgccagacccacttccaggctaaatagattacctgagctggaattggaagcaattgataaccaatttggacaaccaggaacaggcgatcagattccatggacaaataatacagtgacagctataaatcagagtaaatcagaagaccagtgtattagctcacaattagatgagcttctctgtccacccacaacagtagaagggagaaatgatgagaaggctcttcttgaacagctggtatccttccttagtggcaaagatgaaactgagctagctgaactagacagagctctgggaattgacaaacttgttcaggggggtggattagatgtattatcagagagatttccaccacaacaagcaacgccacctttgatcatggaagaaagacccaacctttattcccagccttactcttctccttctcctactgccaatctccctagccctttccaaggcatggtcaggcaaaaaccttcactggggacgatgcctgttcaagtaacacctccccgaggtgctttttcacctggcatgggcatgcagcccaggcaaactctaaacagacctccggctgcacctaaccagcttcgacttcaactacagcagcgattacagggacaacagcagttgatacaccaaaatcggcaagctatcttaaaccagtttgcagcaactgctcctgttggcatcaatatgagatcaggcatgcaacagcaaattacacctcagccacccctgaatgctcaaatgttggcacaacgtcagcgggaactgtacagtcaacagcaccgacagaggcagctaatacagcagcaaagagccatgcttatgaggcagcaaagctttgggaacaacctccctccctcatctggactaccagttcaaatggggaacccccgtcttcctcagggtgctccacagcaattcccctatccaccaaactatggtacaaatccaggaaccccacctgcttctaccagcccgttttcacaactagcagcaaatcctgaagcatccttggccaaccgcaacagcatggtgagcagaggcatgacaggaaacataggaggacagtttggcactggaatcaatcctcagatgcagcagaatgtcttccagtatccaggagcaggaatggttccccaaggtgaggccaactttgctccatctctaagccctgggagctccatggtgccgatgccaatccctcctcctcagagttctcttctccagcaaactccacctgcctccgggtatcagtcaccagacatgaaggcctggcagcaaggagcgataggaaacaacaatgtgttcagtcaagctgtccagaaccagcccacgcctgcacagccaggagtatacaacaacatgagcatcaccgtttccatggcaggtggaaatacgaatgttcagaacatgaacccaatgatggcccagatgcagatgagctctttgcagatgccaggaatgaacactgtgtgccctgagcagataaatgatcccgcactgagacacacaggcctctactgcaaccagctctcatccactgaccttctcaaaacagaagcagatggaacccaggacaagaagacagaagagttcttctctgtggtgactacagactagaggaatgctctacaggtgcaacaggttcaggtgtttgctgacgtccagtgtacagtgaatctggtaggcggggacccttacctgaaccagcctggtccactgggaactcaaaagcccacgtcaggaccacagaccccccaggcccagcagaagagcctccttcagcagctactgactgaataaccacttttaaaggaatgtgaaatttaaataatagacatacagagatatacaaatatattatatatttttctgagatttttgatatctcaatctgcagccattcttcaggtcgtagcatttggagcaaaaaaaaaaaaaaaaaaaaaaaaaggagtttgcttttgtcgggagattgaaagatgtttttgtttctttctttgtaaaggccttggatattgaaaaaataccaaggcagaacagttggacaatctatttcttgagccaaatttaattattcttatttttgtaatcagtcattggcttcttatctggatgaaggcttttggaggagaaccaaaacgacaagttccaagaagaagatgaagctccgcctccgccgcttagtcccaaccctgcccaggaagaagggcccgtggggctttgcctgtgcccgtccaccaaaggctgtcatgtgtctcgaaatcagcagccctccccatcccaatcccaggcagcttgtgtgtacaatcagcttctctagcaactctgtatctgttggcttcaagagaatattttgcctccacatatgtaccccttctcctttttttaaagatggatttaaaccaagatgcctccaggaaagaggacgaaatgagtatattcacagaggaatccaaaaaatacagtttgggggaaaatgcaataatttttgatgagatgggtgaaggacaagaagtgagttgtgtcaattattgtagatacaattttctgattaaatctggaaaaataaaaggcagcctgttttttctgcttttattgtattaacagctgaggtagctaaagttatttaaaataaaattaaatttatgatccaagtagcttatttttccctttaaatctcattgtaaatatatttgatttcttgtagaaattgatttccttctgtttaattttatgcttttattatactcttgatttttctaaatttgtgtgtgaaatataacattgattgaattgcagttacatttggttagtaatatttcattattttaataactgtgatgtcatgtatggatttactttggggttcaaatcaaaatgtcactgccagaaagagctgttccagctgatctagagcatactgccctagagtgtccctgggatcatctgaacagaagtgcacaggctacttgtacagagaaaaaattaatactcaaaggaaatcttcattttttagattgactttgggaatttgaattttcatcagtgcaaatataaatttctctatcctgctctgaggctaattggtaccatattttccctttgtgtcttgtgactctgccacatcccatctcatcctggcctctgagtcaagaacccagtgaactgactttctagttctagaagttccgctgcaaggccaggaaagcttgagaaaggtattgtggaagaagcaaaggtagacccccatcactcacctttgtctgcatccctgggcctgtgaatgatgacagcacctgacattctgcaccagctacctctgcctccatggcagagaaaaggccataagaacagtggaagaggagcatggactcagacttcaaggaagaagccatttccccaggtccttccttctgcatctcaccacccctagttacaaataactccattgaacagcatctattcagaaactatgccgaataaaaagattggtggaagggctcatgtggttagcaactatgaaacagaaataggacactcagttacaaacattatctcctttagtttttcagaaaatgcatccctgatttcattcatttccagcttgaaagccagccatattactctagtccctaccaaactgctctagaaggtcatttccattttgtttgtgatatttagacgcgcagacttcaggaagttcacctttaacttcagcattccagatgaagtttcctgactcagtgcttttgcataaggaactagaaaaaaaaagtaaggaaaattggagatgctaacatcctcccccatcccaactgcaccttaaaatatgcatgtcaccttcaaggttttataattgcactgtttgttttatgtatgtacagattaaaattattgctacatttgaggaaaataaaattgcttgcttctatgtaattcctgtcattccacaggaaattcacttttccagctactgaatagaatttgtttaacaacctcatgggttgcctcttcatttacagggaagaaatgaaatgtacatctgcagaaattgccaaagcccaaattaacgagtattataaaaggataataaagcatccctgaagccaaa

SEQ ID NO: 652 - DNA, 2251 bp, Homo sapiens
cgaagcactaggccgtttgaggatctccgctccgctttgcctgggaccaggaaaagacgcgagagacggaactcggcatcaggcactgcttggggcaggaggagagtaggggaaaccaaggaagagaacagaaaggtaagcaccagccacaaaaacctacaaaagaagggaaattactgtctttaaatattaaaaaaaaacaagatccatgagtgggcatcgatcaacaaggaaaagatgtggagattctcacccggagtccccagtgggcttcgggcatatgagtactacaggatgtgtattaaataaattgtttcagttaccaacaccaccattgtcaagacaccaactaaagcggctagaagaacacagatatcaaagtgctggacggtccctgcttgagcccttaatgcaagggtattgggaatggctcgttagaagagttccctcctggattgccccaaatctcatcaccatcattggactgtcaataaacatctgtacaactattttattagtcttctactgccctacagctacagagcaggcacctctgtgggcatatattgcttgtgcctgtggccttttcatttaccagtctttggatgctattgatgggaaacaggcaagaagaaccaatagtagttctcctctgggagaactttttgatcatggctgtgattcactatcaacagtttttgtggttcttggaacttgtattgcagtgcagctggggacaaaccctgattggatgtttttttgttgttttgcggggacatttatgttctattgtgcgcactggcaaacgtatgtttctggaacattgcgatttggaataattgatgtgactgaagtgcaaatcttcataataatcatgcatttgctggcagtgattggaggaccacctttttggcaatctatgattccagtgctgaatattcaaatgaaaatttttcctgcactttgtactgtagcagggaccatattttcctgtacaaattacttccgtgtaatcttcacaggtggtgttggcaaaaatggatcaacaatagcaggaacaagtgtcctttctccttttctccatattggatcagtgattacattagctgcaatgatctacaagaaatctgcagttcagctttttgaaaagcatccctgtctttatatactgacatttggttttgtgtctgctaaaatcactaataagcttgtggttgcacacatgacgaaaagtgaaatgcatttgcatgacacagcattcataggtccggcacttttgtttctggaccagtattttaacagctttattgatgaatatattgtactttggattgccctggttttctctttctttgatttgatccgctactgtgtcagtgtttgcaatcagattgcgtctcacctgcacatacatgtcttcagaatcaaggtctctacagctcattctaatcatcattaatgatgtaattggtatataggaacatcatgttttctgcaggaaagaaagtaacatattaaggagaatgggggtggataagaacaaatataatttataataatcaatgttgtataacttttattctttattattggtaacacgccctaactatcctgtgtgagaatgggaatttcaagtcccatcttgtaaattgtatatgttgtcatgcagggtttgggccaagaaagcatgcagaaaaaaatgccatgtgattgtaattatcctggattcagaataatactgtgatggggagccagatccgcagtggtggagagttctaatgttgactgtttgcaggccaaaagatgattgctttataattttaacaaatcattgtcttttagtaacatccttgtttagtgtcttctcaagctttctttactgaggaattcagcttgtgacacagatacatcccactagcttgtgaggtggaactagtaataaagaccttgaatttggattgaaaagtttcctatctttacattgttgaggaagtccttttttttttttttttttttttaattgctcaagaaatgattctctcacaggcttgggaaatcctgttagcatgcagaataatgtggtaactttgtcaatttcccattttatttttttaaataaatatatgatctaaaagccaactttttctcagttttactcagtggaaagataaactaagttttaatgttatttttttaaatttaagcaaaatttatttctgttctttaataaataagaaaatgtggtccactg

SEQ ID NO: 653 - DNA, 5528 bp, Homo sapiens
ctggtttcacgcgtctcgggagccaggttggcggtgcgatgaggcgcagcaaagcctacggggagcggtacctcgcctcggtgcagggctccgccccgtcgcctggaaagaagttgagaggattctattttgcaaagctgtattatgaagctaaagaatatgatcttgctaaaaaatacgtatgtacttaccttagtgtgcaagagagggatcccagagctcacagatttctgggtcttctttatgaattggaagaaaacacagagaaagccgttgaatgttacaggcgttcactggaattaaacccaccacaaaaagatcttgtgttgaagattgcagaattgctttgtaaaaatgatgttactgatggaagagcaaaatactgggttgaaagggcagcgaaacttttcccaggaagtcctgcaatttataaactaaaggaacatcttctagattgtgaaggtgaagatggatggaataaactttttgactggattcagtcagaactttatgtaagacctgatgacgtccatatgaacatccggctagtggagttgtatcgctcaaataaaagattgaaggatgctgtggcccgctgccatgaggcagagaggaacatagctttgcgttcaagtttagagtggaattcgtgtgttgtacagacccttaaggaatatctggagtctttacagtgtttggagtctgataaaagtgactggcgagcaaccaatacagacttactgctggcctatgctaatcttatgcttcttacgctttccactagagatgtgcaggaaagtagagaattactggaaagttttgatagtgctcttcagtctgcaaaatcttctttgggtggaaatgatgaactgtcagctactttcttagaaatgaaaggacatttctacatgcatgctggttctctgctcttgaagatgggtcagcatggtaataatgttcaatggcaagctctttctgagctggctgcattgtgctatgtcatagcatttcaggttccaagaccaaagattaaattaataaaaggtgaagctggacaaaatctgctggaaatgatggcctgtgaccgactgagccaatcagggcatatgttgctaaacttaagtcgtggcaagcaagattttttaaaagaggttgttgaaacttttgccaacaaaagcgggcagtctgtgttatataatgctctgttttctagtcagtcatctaaggatacatcttttcttggtagcgatgatattggaaacattgatgtacaagaaccagagcttgaagatttggctagatacgatgttggtgctattcaagcacataatggtagtcttcagcaccttacttggcttggcttacagtggaattcattgcctgctttacctggaatccgaaaatggctaaaacagcttttccatcatttgccccaggaaacctcaaggcttgaaacaaatgcacctgaatcaatatgtattttagatcttgaagtatttctccttggagtagtatataccagccacttacaattaaaggagaaatgtaattctcaccacagctcctatcagccgttatgcctgccccttcctgtgtgtaaacggctttgtacagagagacaaaaatcttggtgggatgcggtttgtactctgattcacagaaaagcagtacctggaaactcagcagaattgagacttgtagttcagcatgaaataaacactctaagagcccaggaaaaacatggccttcaacctgctctgcttgtacattgggcaaaatgccttcagaaaatgggcaggggtcttaattcttcttatgatcaacaagaatacatagggagaagtgttcattattggaagaaagttttgccattgttgaagataataaagaagaacagtattcctgaacctattgatcctctgtttaaacattttcatagtgtagacattcaggcatcagaaattgttgagtatgaagaagatgcacacataacttttgctatattggatgcagtacatggaaatatagaagatgctgtgactgcttttgaatctataaaaagtgttgtttcttattggaatcttgcactgatttttcacaggaaagcagaagacattgaaaatgatgccgtttttcctgaagaacaagaagaatgcaaaaattatctgagaaagaccagggactacctaataaagattatagatgacagtgattcaaatctttcagtggtcaagaaattgcctgtgcccctggagtctgtaaaagagatgcttaagtcagtcatgcaggaactcgaagactatagtgaaggaggtcctctctataaaaatggttctttgcgaaatgcagattcagaaataaaacattctacaccatctcctaccaaatattcactatcaccaagtaaaagttacaagtattctcccaaaacaccacctcgatgggcagaagatcagaattctttacggaaaatgatttgccaagaagtaaaggccattacgaaactaaatagcagtaagtcagcatcccgtcatcgttggcccacagagaattatggaccagactcggtgcctgatggatatcaggggtcacagacatttcatggggctccactaacagttgcaactactggcccttcagtatattatagtcagtcaccagcatataattcccagtatcttctcagaccagcagctaatgttactcccacaaagggttcttctaatacagaatttaagtcaaccaaagaaggattttccatcgctgtgtctgctgatggatttaaatttggcatttcggaaccaggaaatcaagaaaagaaaagtgaaaagcctcttgaaaatgatactggcttccaggctcaggatattagtggccagaagaatggccgtggtgtgatttttggccaaacaagtagcacttttacatttgcagatgttgcaaaatcaacttcaggagaaggatttcagtttggcaaaaaagaccccaatttcaagggattttcaggtgctggagaaaaattattctcatcacaatgcggtaaaatggccaataaagcaaacacttccggtgactttgagaaagatgatgatgcctgtaagactgaggacagcgatgacatccattttgaaccagtagttcaaatgcctgaaaaagtagaacttgtaacaggagaagaaggtgaaaaagttctgtattcacagggggtaaaactatttagatttgatgctgagataagtcagtggaaagaaaggggcttggggaacttaaaaattctcaaaaatgaggtcaatggcaaaccaagaatgctgatgcgaagagaccaagtactaaaagtgtgtgctaatcattggataacaactacaatgaacctgaagcccctctctggatcagatagagcatggatgtggttagccagtgatttctctgatggtgatgccaaactagagcggttggcagcacaatttaaaacaccagagctggctgaagaattcaagcagaaatttgaggaatgccagcggcttctgttagacataccacttcaaactccccataaacttgtagatactggcagagctgccaagctaatacagagagctgaagaaatgaagagtggactgaaagatttcaaaacgtttttgacaaatgatcaaacaaaagtcactgaggaagaaaataagggttcaggtacaggtgcagccggtgcctcagacacaacaataaaacccaatcctgaaaacactgggcccacattagaatgggataactatgatttaagggaagatgctttggatgataatgttagtagtagctcagtacatgattctccgttggcaagtagccctgtgagaaaaaatattttccgctttgatgagtcaacaacaggatttaacttcagttttaaatctgctttgagtctatctaagtctcctgccaagttgaatcagagtgggacttcagttggcactgatgaagaatctgatgttactcaagaagaagagagagatggacagtactttgaacctgttgttcctttacctgatctagttgaagtatccagtggtgaggaaaatgaacaagttgtttttagtcacatggcagaactctacagatatgataaagatgttggtcaatggaaagaaaggggcattggtgatataaagattttacagaattatgataataagcaagttcgtatagtgatgagaagggaccaagtattaaaactttgtgccaatcacagaataactccagacatgagtttgcaaaatatgaaagggacagaaagagtatgggtgtggactgcatgtgattttgcagatggagaaagaaaagtagagcatttagctgttcgttttaaactacaggatgttgcagactcatttaagaaaatttttgatgaagcaaaaacagcccaggaaaaagattctttgataacacctcatgtttctcggtcaagcactcccagagagtcaccatgtggcaaaattgctgtagctgtattagaagaaaccacaagagagaggacagatgttattcagggtgatgatgtagcagatgcagcttcagaagttgaagtgtctagcacatctgaaacaacaacaaaagcagtggtttctcctccaaagtttgtatttggttcagagtctgttaaaagaatttttagtagtgaaaaatcaaacccatttgcatttggcaacagttctgccactgggtctttgtttggatttagttttaatgcacctttgaaaagtaacgatagtgaaactagttcagtagcccagagtggatctgaaagcaaagtggaacctaaaaaatgtgaactgtcaaagaactctgatatcgaacagtcttcagatagcaaagtcaaaaatctctctgcttcctttccaatggaagaatcttcaatcaactacacatttaaaacaccagaaaaggagcctccattatggcatgctgaatttaccaaagaagaattggttcagaagctcagttccaccacaaaaagtgcagatcagttaaacggcctgcttcgggaaacagaggcaaccagtgcagtccttatggagcaaattaagcttctcaaaagtgaaataagaagattggaaaggaatcaagaggagtctgcagctaacgtggaacacttgaagaacgtcttgctgcagttcattttcttgaagccaggtagtgagagagagagccttcttcctgttataaatacgatgttgcagctcagccctgaagaaaagggaaaacttgctgcggttgctcaaggtcttcaagaaacctccatacccaagaaaaaatagaaagcaaccatgttctactatggtgccaaaaatagttgaacatcgacatcaaaaagattctttctgtctgcttattcacatattctggtttgaattaaaagtgatgaaattatcctaaatacagttggccctctgtatccatgggttccacatccacaaattcaaccaactgtggatggaaaagacttgaaaaaaaaaaaaaaaaaaaaaaaaaaaaaa

SEQ ID NO: 654 - DNA, 2979 bp, Homo sapiens
ccggggacggctgctggagcggcgcccgccgcggctcagcgcattcccgctctccgcttccctctccgctgcgtccccgcgcgaagatggcaaccgaggggctgcacgagaacgagacgctggcgtcgctgaagagcgaggccgagagcctcaagggcaagctggaggaggagcgagccaagctgcacgatgtggagctgcaccaggtggcggagcgggtggaggccctggggcagtttgtcatgaagaccagaaggaccctcaaaggccacgggaacaaagtcctgtgcatggactggtgcaaagataagaggaggatcgtgagctcgtcacaggatgggaaggtgatcgtgtgggattccttcaccacaaacaaggagcacgcggtcaccatgccctgcacgtgggtgatggcatgtgcttatgccccatcgggatgtgccattgcttgtggtggtttggataataagtgttctgtgtaccccttgacgtttgacaaaaatgaaaacatggctgccaaaaagaagtctgttgctatgcacaccaactacctgtcggcctgcagcttcaccaactctgacatgcagatcctgacagcgagcggcgatggcacatgtgccctgtgggacgtggagagcgggcagctgctgcagagcttccacggacatggggctgacgtcctctgcttggacctggccccctcagaaactggaaacaccttcgtgtctgggggatgtgacaagaaagccatggtgtgggacatgcgctccggccagtgcgtgcaggcctttgaaacacatgaatctgacatcaacagtgtccggtactaccccagtggagatgcctttgcttcagggtcagatgacgctacgtgtcgcctctatgacctgcgggcagatagggaggttgccatctattccaaagaaagcatcatatttggagcatccagcgtggacttctccctcagtggtcgcctgctgtttgctggatacaatgattacactatcaacgtctgggatgttctcaaagggtcccgggtctccatcctgtttggacatgaaaaccgcgttagcactctacgagtttcccccgatgggactgctttctgctctggatcatgggatcataccctcagagtctgggcctaatcatcttctgacagtgcactcatgtatacctgagaatttgaaatcttcacatgtaaatagatattacttctagaggagcttagagtttattgcagtgtagcttaggggagcaacccatggctcacaggtcactaagcgtctccaatatgactattaaaactgtcacctctggaaatacactagtgtgagccttcagcactgcgagaataccttcaagtacagtatttttcttttggaacactttttaaaatgtatctgtttttaaggttattctaaattatagtagcctcaactcattctgtcaccagtagaattcagcagttaatatattccatattatttctttgaatcaattcattttcagagcactttaaagtctgatatttctcgatgtgcactgtgatgcctggaaccttcctctggaagtgctgattttatggactgaggactggtgactggtctgtgatagaagcaaattccaattccaaatgtaattagacaaaaatcatttttttagaatgtgtttttattgtaaaagtatctttttcagcttcctgttctattgtcttttttcagatacaacatttttgtctatggtgaactgctgtaaatgacgcagagaaatgcctaaaaaggacaggtggtttgactcatggatgatgatgatgtcactgtgccacttggacagggcgttttctctgaattgaagggaaagccaatggtgtttgtaaacaaatgcttctgagagcaaagaaaagtcttctgtgtgggaacacaagatagtaaacttatttaaaaacctattagtagaattagtggaaacacttaggttaaagtgaatcttgtccatataaattatattcatggccgggcgcggtggctcacgcttgtaatcccagcactttgggaggccgaggcgggcggatcacgaggtcaggagttcgagaccacggtgaaaccctgtctctactaaaaaatacaaaaaattagccgggcgtggtggcgggcgcctgtagtcccagctactcggagaggctgaggcaggagaatggcgtgaacccgggaggtggagcttgcagtgagccgaggtcgagccactgcagcctgggtgacaaagcgagactccgtctcaaaaaaaaaaaaaaattatattcatatgtattgcattgcaattataattacatatgcagattgattgatagtcatgaataataacgtctgctcctcttacatagaaaaacgatattaaaagaagatcttctctttatttgagactcagaattccttctagaagaaggaagtgctttttgttataggatcccttcttttcctttttttgtttttttgtaagatgtagatgcttattctttgctttagaaaacttctcacttaaaaagatggcatgcacctaggggaataaaaggtcacctcagacaccaggtgtcattcctggtgaggcctgcctcgtcggtggcctggggtctgccggcaggttctggctgcacctgaaggctgcgtgcaccttgtcccctggacaggtctcctttcctggccctgctccagcccagcccttcttctagtggtagctctggctttgcaggcccagctccaggccctgctcctcagagagactcttccagagctggagctgggcacagccataagacaggactggaccagatgctcctgtaaacatccaggggtgtgccaggcccaccctcacaactgcttgttcaggtatcgtgatgggccactcggtccaaaatcagccaggccatcttttccatcatctcacttcaaataaacataataattatatttgatcatttgc

SEQ ID NO: 655 - DNA, 2900 bp, Homo sapiens
gcccggcaggttggcggaccggcgggaggcgcagcctgggcagagctcagcttggtcccgccgcccggccggtgctccctggcgcagccacgcaggcgcaccgcagacagacccctctgccatgaaccagtccatcccagtggctcccaccccaccccgccgcgtgcggctgaagccctggctggtggcccaggtgaacagctgccagtacccagggcttcaatgggtcaacggggaaaagaaattattctgcatcccctggaggcatgccacaaggcatggtcccagccaggacggagataacaccatcttcaaggcctgggccaaggagacagggaaatacaccgaaggcgtggatgaagccgatccggccaagtggaaggccaacctgcgctgtgcccttaacaagagccgggacttccgcctcatctacgacgggccccgggacatgccacctcagccctacaagatctacgaggtctgctccaatggccctgctcccacagactcccagccccctgaggattactcttttggtgcaggagaggaggaggaagaagaggaagagctgcagaggatgttgccaagcctgagcctcacagatgcagtgcagtctggcccccacatgacaccctattctttactcaaagaggatgtcaagtggccgcccactctgcagccgcccactctgcggccgcctactctgcagccgcccactctgcagccgcccgtggtgctgggtccccctgctccagaccccagccccctggctcctccccctggcaaccctgctggcttcagggagcttctctctgaggtcctggagcctgggcccctgcctgccagcctgccccctgcaggcgaacagctcctgccagacctgctgatcagcccccacatgctgcctctgaccgacctggagatcaagtttcagtaccgggggcggccaccccgggccctcaccatcagcaacccccatggctgccggctcttctacagccagctggaggccacccaggagcaggtggaactcttcggccccataagcctggagcaagtgcgcttccccagccctgaggacatccccagtgacaagcagcgcttctacacgaaccagctgctggatgtcctggaccgcgggctcatcctccagctacagggccaggacctttatgccatccgcctgtgtcagtgcaaggtgttctggagcgggccttgtgcctcagcccatgactcatgccccaaccccatccagcgggaggtcaagaccaagcttttcagcctggagcattttctcaatgagctcatcctgttccaaaagggccagaccaacaccccaccacccttcgagatcttcttctgctttggggaagaatggcctgaccgcaaaccccgagagaagaagctcattactgtacaggtggtgcctgtagcagctcgactgctgctggagatgttctcaggggagctatcttggtcagctgatagtatccggctacagatctcaaacccagacctcaaagaccgcatggtggagcaattcaaggagctccatcacatctggcagtcccagcagcggttgcagcctgtggcccaggcccctcctggagcaggccttggtgttggccaggggccctggcctatgcacccagctggcatgcaataacaaggctgcagacggtgactggccctggcttcctgggtggcggtgcggactgatgtggagatgtgacagccccgatgagcacctggctggctgcagggtcctacctctgggtttcctggaagtggatttgggccaagaaggagagggagaaaggcccgagcccctgccttcccgggcctttctctcctgggctgtctctggtctggtcagcctggctctcgggaaattcagccatgagcagggaaagaactctcccaaccctggggcctagctgtataggaggaattgcctaagggtggcccactcttgtgattgccccatttcctctggcaacaaaagccagagtgttgtgggccaagtccccccacagggcctctgcagggcatggccctgatttccctggtttgagactcacttcctcatctccctgtcctctgagataatatgagtgagcacttaggtatcatatcagatgctcaaggctggcagctacccccttcttgagagtccaagaacctggagcagaaataatttttatgtatttttggattaatgaatgttaaaaacagactcagctgtttctttccttttactactaccagttgctcccatgctgctccaccaggccctgtttcggatgccaactggcccactccccaagcacttgcccccagcttgcgaccattggcactgggagggcctggcttctgggctgatgggtcagttgggccttcataaacactcacctggctggctttgccttccaggaggaagctggctgaagcaagggtgtggaattttaaatgtgtgcacagtctggaaaactgtcagaatcagttttcccataaaagggtgggctagcattgcagctgcatttgggaccattcaaatctgtcactctcttgtgtatattcctgtgctattaaatatatcagggcagtgcatgtaaatcatcctgatatatttaatatatttattatattgtcccccgaggtggggacagtgagtgagttctcttagtccccccagagctggttgttaaagagcctggcacctacccgctctcacttcatctgtgtcatctctgcacactccagcccactttctgccttcagccattgagtggaagctgccccaggcccttaccaggtgcagatgcccaatcttgatgcccagccatcagaactgtgagccaaataaacctttttctgtataaaaaaaaaaaaaaaaaaaa

SEQ ID NO: 656 - DNA, 3717 bp, Homo sapiens
aaaaacttccggcgggaaccggaaggtgcggtggcactcacggaatctcgggtcttctgacgtgccgggcgggaagatgtcatcattgccaagaagagcgaaagtacaggtccaggatgtggtactgaaagatgaattttcttcattctctgagttatcatctgcctctgaagaagatgacaaggaagatagtgcctgggagccccaaaagaaagttcccagaagccgtaaacagccccctcccaaggaatccaaaccaaagaggatgcctcgggtgaagaagaatgccccacagatcagtgatggctcagaagtcgttgttgttaaggaggagctgaatagctctgtggctattgctgatactgctttagaagacagaaaaaataaattggatactgtacagactctgaaaacagccaagacaaaacagaaatgtgcagcgcagccacatacagttcgaaggactaaaaagctgaaagttgaagaagaaaccagcaaagccagcaacttagagggtgagagtaatagttcagagacaccatccacaagcactgtgtggggaggtacatgcaagaaggaagagaatgacgatgactttacatttggtcagtccgctttaaagaaaatcaagactgagacatatcctcaggggcagcctgtcaagtttccagcaaatgccaatagtactaaagaggaggtggaaatgaattgggacatggtacaggttttatctgagagaactaatattgaaccttgggtttgtgccaacatcattcgtctctttaatgatgataacacaattcccttcattatacgttatagaaaagagctcattaataaccttgatgctgattccttgagagaagttcagcaaaccctagaagagctacgggctgttgcaaagaaagttcatagtacaatccagaaaattaagaaggaagggaagatgtctgagtgcttgttaaaagccatgctgaattgtaaaacttttgaagaactagaacacgtgtctgctccatataaaactggaagcaaagggactaaagcccagagagcaagacagttgggcttagaaggagcagccagggcactgcttgagaaaccaggggagctcagtctgctatcgtacattaggcctgacgttaaagggctttcaacgcttcaggatattgaaataggagtgcagcatattttagcagatatgattgctaaagacaaagacacgcttgacttcattcggaacttgtgccagaagagacatgtttgtatccagtcatctctggcaaaagtatcctcaaaaaaggtaaatgagaaagatgttgataagtttctgctctaccagcatttttcctgcaacataagaaacattcaccatcatcagattctggcaattaaccgtggagaaaatttgaaggtactgacggttaaggtcaatatttctgatggagtgaaggatgaattctgtaggtggtgcatccaaaacaggtggagaccacgtagctttgcaaggccagagttaatgaagatcttatataattcactgaatgattcctttaaacgccttatttatcctcttctctgtagagaattcagagccaaactaacatcagatgcagagaaggaatcagtaatgatgtttggacggaaccttcgtcagctccttttaacaagccctgttccagggcgcaccttaatgggagtggatcctggttataaacatggttgcaaattagctataatttctcctactagtcagatacttcatactgatgtggtttacttgcattgtggacaaggcttccgagaggcggagaaaataaagacacttttgctgaatttcaactgcagcacagtagtgattggaaatggaactgcctgcagggaaacagaagcttactttgctgacctgataatgaagaattattttgcaccactggatgttgtttactgtatcgtcagtgaagcaggagcatcaatctacagtgtcagccctgaagctaacaaagagatgccagggctggaccctaatttgagaagtgcagtttccatagcaaggcgtgtacaagatccattagctgagctagtgaaaattgagccaaagcacattggagttggaatgtatcagcatgacgtatcccagactttactcaaggcaacactggacagtgttgtagaagaatgtgtcagctttgtgggagtggatattaacatctgttcagaagttttgttaaggcatattgcaggactcaatgccaacagggccaaaaatattattgaatggcgagagaaaaatggaccctttatcaaccgagaacagctgaagaaagtgaaagggctgggcccaaaatccttccaacagtgtgctggcttcatcagaatcaaccaggattatatccgaacgttttgcagtcagcaaactgaaacttcaggccaaattcaaggagttgctgtgacatcttcagcagacgttgaggtcacaaatgagaagcagggcaaaaagaagagcaaaactgcagtgaatgttttactgaagccaaatcctttggaccaaacttgtattcatccagaatcatatgacatagcaatgaggtttttgtcatccattggagggacactgtatgaggttggaaagcctgaaatgcaacaaaaaataaattcattccttgaaaaggaaggaatggagaaaattgcagaaagattgcaaacaacagtacacaccttacaggtcatcatagatggtctcagccagcctgaaagctttgactttcgaacagattttgataaacctgatttcaagagaagcatagtatgcctggaagatctgcagattgggacagttcttacaggcaaagttgagaatgccactctctttggaatttttgtggatataggagtggggaaatctgggctgattcccatacgaaatgtaacagaagcaaaactttcaaaaacaaagaagagaagaagccttggactgggccccggagaaagagtggaagtccaagtactcaacattgacatcccccgatctaggattactctggacctcattcgggtgttatgagtatcccacgaaggccagacgctgattttattttctcatttccacagattgacaaggataagtcagttgtttgtaaactctaggtagcagatgagaaataattcacttaatatcagaaatattttccaaacactttcctttattttttcttctgaataaatagaaaaccaacagtttgatttccttttcccttaaaggaaacaactaatacacattcttatatggctttatgtagtaatagttttctgactaaaattttgttttttattttttgtaatttatctttaactccttttgcattttgtataacagattgcttaacttctacttgccaacatctgccttgctggacttgtatgggattgtcttcttgatttgaattgtaccgtctttgttgacacagtagggctgggcagtgtttaatccttccattttatagatttttttttaatcaggccttttggacttcattcataattttgcaataatctcttttcccttgtcatgcaagccaaaaatataccagtaaaacagattctgacgtgtttgtagttatcaaatgaatggctcgaaacacttctcaaaaggatatacgtattgaccccaacaataaatgtttgtggctagtgaaaaaaaaaaaaaaaaaaaaaaaa

SEQ ID NO: 657 - DNA, 1432 bp, Homo sapiens
ttttactgaagttgctagaagtttacagaaaaggaagtgcaggaacatttcacaaatctacaatctgtgagtatcacatcctgtatagctgtaaacactggaataaggaagggctgatgactttcagaagatgaaggtaagtagaaaccgttgatgggactgagaaaccagagttaaaacctctttggagcttctgaggactcagctggaaccaacgggcacagttggcaacaccatcatgacatcacaacctgttcccaatgagaccatcatagtgctcccatcaaatgtcatcaacttctcccaagcagagaaacccgaacccaccaaccaggggcaggatagcctgaagaaacatctacacgcagaaatcaaagttattgggactatccagatcttgtgtggcatgatggtattgagcttggggatcattttggcatctgcttccttctctccaaattttacccaagtgacttctacactgttgaactctgcttacccattcataggaccctttttttttatcatctctggctctctatcaatcgccacagagaaaaggttaaccaagcttttggtgcatagcagcctggttggaagcattctgagtgctctgtctgccctggtgggtttcattatcctgtctgtcaaacaggccaccttaaatcctgcctcactgcagtgtgagttggacaaaaataatataccaacaagaagttatgtttcttacttttatcatgattcactttataccacggactgctatacagccaaagccagtctggctggaactctctctctgatgctgatttgcactctgctggaattctgcctagctgtgctcactgctgtgctgcggtggaaacaggcttactctgacttccctggggtgagtgtgctggccggcttcacttaaccttgcctagtgtatcttatccctgcactgtgttgagtatgtcaccaagagtggtagaaggaacaaccagccaatcacgagatacacatgggagggcatttgcattgtgatggaagacagagaagaaaagcagatggcaattgagtagctgataagctgaaaattcactggatatgaaaatagttaatcatgagaaatcaactgattcaatcttcctattttgtcagcgaagggaatgagactctgggaagttaaatgactggcctggcattatgctatgagtttgtgcctttgctgaggacactagaacctggcttgcctcccttataagcagaaacaatttctgccacaaccactagtctctttaatagtattgacttggtaaagggcatttacacacgtaactggatccagtgaatgtcttatgctctgcatttgcccctggtgatcttaaaattcgtttgcctttttaaagctatattaaaaatgtattgttgaatcaaaaaaaaaaaaaaa

SEQ ID NO: 658 - DNA, 3951 bp, Homo sapiens
tccggtgctcagtggctagccgaatagccgtgtttgggacctgggctcgggcttcttgcgtccccgctaagaacatgtcacggggccgaatcgtccgtattctctcagcttcaagctcctctacttttcaaccaggtcactagcccttgactcctcttatcaaacttccggaactgccaccccaccagtgactccacaggcaccagggcatgcaacagggctgggacaggaaggctctcttcttcacctcaagcctgctgggctaacacttgcgatttttactagagttaactttgtaatgtatgtctctgactctagaatttcaagagaagttccacttagtgactcctaagtggaagttctaagatggcttcccagtgaggtgatgaagaggtttgagctttagagtgcggttgcaaagctcttctctgacctgaacaatggctgtagctgtggaccaacaaatccagactccttcagtacaagatctccaaatagttaaactggaagaagattcccactgggagcaggaaatttcccttcaagggaattaccctggaccagagacatcctgccagagcttttggcatttccgttaccaagaagcatcacgaccccgagaggccctcctccagctccagaagctctgttgtcagtggctaaggccagagaagtgtacaaaagagcagatcctggagttgctggtcctagaacagttcccgactgtccttctccaggagatccagatctgggtcagacagcagcatccggagagtggagaggaggcagtggccctggtggaagacttgcagaaagaacctggaagacagaggctggagccctgcctgatgtggctctgggaattcctgcagagaagagcaggggtggccaggagatagtgagcagctcccaggaggcatggagggatccagaacctggactgaagaaccacctagaaataactcagcagaattctgaaaatgaggtcacgctggattttccaatccataggcccaaagtgaactcccacgtggagtaggatgaaaacccacagcatctagatcttcaaattctggagaaaaagagagtgtgaaagactgctcagtggctggggtgagagtcaagtctggccaggtgctaatctggagaaaagccaagacctggagcgagctggagtggcaggccctggaggatgagaaggtggcaggagtgcactggggatacaaagaaaccaagatttttctgggaattctcagaggcctggatccacgaaaaactccgcacctgccatcgaaaccaccaggtgtaccggattatggctgagcagctgtgagaacatggcttcctgtggaccctggagcaatgttgctatcggttcaaaaacctcctgaccgactactgcaaagccaggagcacctacacaccaggcaccagtgtcttctatgatgagatggatgccctgttgagtcttggggcactttctaacacctttgatgccttagaggtggtaggaggccttctttgggattgagaggattccaaagggaaccagggcatagcactagaagatgtggcgggatggtaatgaaatagtggaggagtctcaagaggaatcctggaggcttggtccccaggccttgaggtggaatcccagtggcaactctcccccacaatggacctcagagcagtgggagcgacgcagtcctgtgggaagcattcaggctcagaatcaggagatgtgattattgtcctggctctgttatgactaatttgggtctggaatggcctcatcgggggaaaaattggtgacaactttaagaaatactgtttatatcccgtcctcaaatattgcttgactcaaccctctactgaaccagtagtccagggtggctcacaaagaccactttgaggctcttgctctgctctttagccaaggagtctcccttcctgccttcagtaacaacattacaggaagagaggagagaaaggtaggagttaaagatccagtcatttgtttccatctaaagtgccctataagccgggcatggtggcgcaagcctgtagtcccagctactcgggaggctggggcaggagaatcacttgagcccaggagttggaggccgcagtgagctgtgatcatgccactgcattccagcctgggcgacagagtgagacccagactcagctgaaaaataataatattattaaaagaatttaaaataaagtgttccatagatgtgaaccctgcgtagattatacacaccagtctgccatttaaaaggtttgttgttcttgggcaacctctttaaatacccttagcctccattttctcatctggacagtggacattgtgatggtttctacctccctgggctgttatgaggatcctgacacagtattagcacttggcaaacgttagttttcattatcatcatcattataattattatgaaaatagataagggcattatcctgtaccctcaaaggagtaaaagggggaaaatgagtcattaaactttctcttctgggaactagaccttcttgagaggcactatcattctcatttcacctgtcacttccagacatgggagcagaaagtgaatttcagaactccatgtcccctcctgcttttctctgagcaggacttccagttccccagccagatggggtcacaatgctgcagaaaagtgaagagctttggaatgaagatctcccggacttcaaggagattcagaaaacgtccagtgcaggtgggaaatgaatgggagctagcattccaccaacaaagtcagccctgggattctaaactcggacaagccagcactggttaagggctgaggggaaccaggcactcagtgcacccagtttactattctgtggtgtggaaagcacaggacttgagaagcaggtggcacccaggaaagcctgttcccctaagtaagtttgaactttagttacttgaaaaaaggtataactgaattatgagtgtttatgattttatctttattttattttttttgagatggagtctcaccctgtcacccaggctggaatgcagtggcacaatctcggttcactgcagcctctacctctcaggttcaagcaattctcctgcctcaccctcctgagtagtggggattacaggtgtgccaccaccatgcccgtctctaatttttatatttttagtagagacggggtttcaccatgttggccaggctggtcttgaactcctgacctcaagtgatccacccaccttggccccccacaaagtgctgggattacaggcgtgagccactgtgcctggtctatctttaaattcctatctgaatttgtttaggttttttaaataaaaatctttctttttttttagagacaggggttcaccatggtgcccaggctgatctcgaactcctcctggactcaagctatcctcccacctcagcctcccaaagtactgggattacagacatgagccacatgcttgacctgaattttaactgcagttaattatcacttaaccagcgaattcacacaggagaaatcccctggccgggcgcggtggctcacacctgtaatcccagctcttcgggaggccgaggtgggtagatcacaaggtcaagagatcaagaccattctggccaacatggtgaaactccgtctgtaccaaaaatacaaaaattacctgggcatggtggtacgtgcctgtaatcccagctacttggcaggctgaggcaggagcattgcttgaacccatgaggtggaggttgcagtgagccgagatcacgccactgcactcaagcctgggtgacagagcaagactccatctctactacaaaaaaaaaaaaaaaaaaaattcaaccaccttaggaagcctctcatttatgtatttctagcatgtaattagtgttgcacatgggaagggctaatagatgctgacagagtgaacaactt

SEQ ID NO: 659 - DNA, 3350 bp, Homo sapiens
acttccggtgcttgccctgcccatccccgtggcgggggcgtggccatggcgggggcgctccggcgggggcgggccctgggctcccgcccttcgggtcccacagtttccagccgccgctctcctcagtgcccggtggcccaggagggcctgggagcccgaagccgtccccgagtcgctcctaggtcactggcgcgatgcgggccgtcctctcggctgatgggttggaagcccagcgaggctagaggccagtcccaaagtttccaggcatcagggctgcagcccaggagcctcaaggcggcccggcgggcgactggacggccggacaggtcccgagcagcccggcccaccatggacccctctgcccacaggtcccgagcagccccgcccaacatggacccagacccccaggcgggcgtgcaggtgggcatgcgggtggtgcgcggcgtggactggaagtggggccagcaggacggcggcgagggcggcgtgggcacggtggtggagcttggccgccacggcagcccctcgacacccgaccgcacagtggtcgtgcagtgggaccagggcacgcgcaccaactaccgcgccggctaccagggcgcgcacgacctgctgctgtacgacaacgcccagatcggcgtccggcaccccaacatcatctgtgactgctgcaagaagcacgggctgcgggggatgcgctggaagtgccgtgtgtgcctggactacgacctctgcacgcagtgctacatgcacaacaagcatgagctcgcccacgccttcgaccgctacgagaccgctcactcgcgccctgtcacactgagtccccgccagggcctcccgaggatcccactaaggggcatcttccagggagcgaaggtggtgcgaggccccgactgggagtggggctcacaggatggaggggaagggaaaccgggccgtgtggtggacatccgtggctgggatgtggagacaggccggagtgtggccagcgtgacgtgggctgatggtaccaccaatgtgtaccgtgtgggccacaagggcaaggtggacctcaagtgtgtgggcgaggcagcgggcggcttctactacaaggaccacctcccaaggctcggcaagccggcggagctgcagcgcagggtgagtgctgacagccagcccttccagcacggggacaaggtcaagtgtctgctggacactgatgtcctgcgggagatgcaggaaggccacggcggctggaaccccaggatggcggagtttatcggacagacgggcaccgtgcatcgtatcacggaccgcggggacgtgcgcgtgcagttcaaccacgagacgcgctggaccttccaccccggggcgctcaccaagcaccactccttctgggtgggcgacgtggtccgggtcatcggcgaccttgacacagtgaagcggctgcaggctgggcatggcgagtggacggacgacatggcccctgccctgggccgcgtcgggaaggtggtgaaagtgtttggagacgggaacctgcgtgtagcagtcgctggtcagcggtggaccttcagcccctcctgcctggtggcctaccggcccgaggaggatgccaacctggacgtggccgagcgcgcccgggagaacaaaagctcactgagcgtggccctggacaagcttcgggcccagaagagtgacccagagcacccgggaaggctggtggtggaggtggcgctgggtaacgcagcccgggctctggacctgctgcggaggcgcccagagcaggtggacaccaagaaccaaggcaggaccgctctgcaagtggctgcctacctgggccaggtggagttgatacggctgctgctacaagccagggcgggcgtggacctgccggacgacgagggcaacacggcactgcactacgcggccctggggaaccagcccgaggccaccagggtgctcctgagtgctgggtgccgggcggacgccatcaacagcacccagagcacagcactgcacgtggccgtgcagaggggcttcctggaggtggtgcgggccctgtgtgagcgcggctgtgacgtcaacctgcccgacgcccactcggacacgcccctgcactccgccatctcggcgggcactggagccagcggcattgtcgaggtcctcacggaggtgccaaacatcgatgttaccgccaccaacagccagggtttcaccctgctgcaccatgcctccctcaagggtcacgcgctagctgtgagaaagattctggctcgggcgcggcagctggtggacgccaagaaggaggacggcttcacggcgctgcatctggctgccctcaacaaccaccgcgaggtggcccagatcctcatccgggagggccgctgtgacgtgaacgtgcgcaaccggaagctgcagtccccgctgcatctcgccgtgcaacaggcccacgtggggctggtgccgctactggtggacgctgggtgcagtgtcaacgccgaggacgaggagggggacacagccctgcacgtggcgctgcagcgtcatcagctgctgcccctggtggctgatggggccgggggggacccagggcccttgcagctgctgtccaggctacaggcctcgggcctccccggcagcgcggagctgacggtgggcgcggcggtcgcctgcttcctggcgctggagggcgccgacgtgagctacaccaaccaccgcggtcggagcccgctggacctggccgccgagggtcgcgtgctcaaggcccttcagggctgcgcccagcgcttccgggagcggcaggcgggcgggggcgcggccccgggccccaggcaaacgctcgggacccccaacaccgtgacgaacctgcacgtgggcgccgcgccggggcccgaggccgctgagtgcctggtgtgctccgagctggcgctgctggtgctgttctcgccgtgccagcaccgcaccgtgtgtgaggagtgcgcgcgcaggatgaagaagtgcatcaggtgccaggtggtcgtcagcaagaaactgcgcccagacggctctgaggtggcgagcgccgcccccgcccccggcccgccgcgccagctggtggaggagctgcagagccgctaccggcagatggaggaacgcatcacctgccccatctgcatcgacagccacatccgcctcgtgttccagtgcggccacggcgcatgcgccccctgcggctccgcgctcagcgcctgccccatctgccgccagcccatccgcgaccgcatccagatcttcgtgtgagccgcgccgtccgccgcgcccgagctgccttcgcgtgcccccgccctgtgttttataaaaagaaagattctcggacgttgaaaaaaaaaaaa

SEQ ID NO: 660 - DNA, 7191 bp, Homo sapiens
gcgcgcgcgcgggcgggagcggagggcaacggggcggcgcgggcggccgggcgcagggtcgcgggaggtgacgcgcggcgaggatggcggcgcggggccgggggctgctgctgctgacgctgtcggtgctgttggcggcgggcccctccgccgctgcggccaagctcaacatccccaaagtgctgctgcccttcacgcgggccacgcgcgttaacttcacgctggaggcctcggagggctgctaccgctggttgtccacccggccggaggtggccagcatcgagccgctgggcctggacgagcagcagtgctcccagaaggcagtggtgcaggcccgcctgacccagcctgcccgcctcaccagcatcatcttcgcagaggacatcaccacaggccaggtcctgcgctgtgatgccattgtggacctcatccatgacatccagatcgtctccaccacccgcgagctctacctggaggactcccccctggagctgaagatccaggccctggactccgaagggaacaccttcagcactctggctggactggtcttcgagtggacgattgtgaaggactccgaggcggacaggttctcagactcccacaatgcgctgcgaatcctcactttcttggagtctacgtacatccctccttcttacatctcagagatggagaaggctgccaagcaaggggacaccatcctggtgtctgggatgaagaccgggagctccaagctcaaggctcgcatccaggaggctgtctacaagaatgtacgccctgcagaagtcaggctgctgattttggaaaacatccttctgaacccggcctatgacgtctacctgatggtgggaacctccattcactacaaggtgcagaagatcaggcaagggaaaattacagaactctccatgccttccgatcagtacgagttgcagcttcagaacagcatcccgggccccgaaggagacccagcccggccggtggctgtcttggcccaggacacgtcgatggtcactgcactgcagctgggacagagcagcctcgtccttggccacaggagtattcgcatgcaaggtgcttctaggttacccaacagcactatctacgtggtcgaacctggatacctagggttcactgttcaccctggtgacaggtgggtgctggagaccggccgcctgtatgaaatcaccatcgaagtttttgacaagttcagcaacaaggtctatgtatctgacaacatccgaattgaaactgtgcttcctgctgagttcttcgaggtgctctcgtcctcccagaatgggtcataccatcgcatcagggcactaaagaggggacagacggccattgacgcggccctcacctctgtggtggaccaggatggaggggtccacatactacaggtgcctgtgtggaaccagcaggaggtggaaattcacatcccgatcaccctgtatcccagcatcttgacatttccgtggcaaccaaagacgggcgcctatcagtacacaataagggcccacggtggcagtgggaacttcagctggtcttcgtcaagccacctggttgccacagttactgtcaagggcgtgatgaccacaggcagtgacatcgggttcagtgtgatccaggcacatgatgtgcagaacccactccatttcggtgagatgaaggtgtatgtgatcgagccccacagcatggagtttgccccgtgccaggtggaggcacgtgtgggccaggccctggagctgcccctgaggatcagtggcctcatgcccggcggggccagtgaggtggtcaccttgagcgactgctcccactttgacttggctgtcgaggtggagaaccagggtgtgttccagccactcccagggaggctgccgccaggctctgagcactgcagcggcatccgggtaaaggccgaggcccagggctctaccacgcttcttgtgagctacagacacggccacgtccacctgagtgccaagatcaccattgctgcctacctgcccctcaaggctgtggatccctcctctgttgccttggtaaccctgggctcctcaaaggagatgctgtttgaaggaggtcccagaccttggatcctcgagccgtccaaattcttccagaacgtcaccgctgaggacactgacagcatcggcctggctctctttgccccccattcctcccggaattatcagcaacactggatccttgtgacctgtcaggccttgggtgagcaggtcatcgccctgtcggtggggaacaagcccagcctcaccaacccctttcctgcggtggagcctgccgtggtgaagttcgtctgcgccccaccgtccaggctcaccctcgcgcctgtctacaccagcccccagctggacatgtcctgtccgctgctgcagcagaacaagcaggtggtcccagtgtccagccaccgcaacccccggctggacctggctgcttacgaccaggagggccgccggttcgacaacttcagctctctgagcatccagtgggagtccaccaggccagtgttggccagcatcgagcctgagctgcccatgcagctggtgtcccaggacgatgagagtggccaaaagaagctgcacggtttgcaggccattttggttcacgaggcatcaggaaccacagccatcactgccactgccactggctaccaggagtcccacctcagctctgccagaacaaagcagccgcatgaccctctggtgcctctgtcggcctccatagagctcatcctggtggaggacgtgagggtgagcccagaagaggtgaccatctacaaccaccctggcatccaggcagagctccgcatcagggaaggctcaggttacttcttcctcaacaccagcaccgcagatgttgtcaaggtggcctaccaggaggccaggggtgtcgccatggtgcaccctttgctcccgggctcatccaccatcatgatccatgacttgtgcctcgtcttcccggccccagccaaggctgtcgtttacgtgtcggacattcaggagctgtacatccgtgtggttgacaaggtggagattgggaagacagtgaaggcatacgtccgcgtgctggacttgcacaagaagcccttccttgccaaatacttcccctttatggacctgaagctccgagcagcctccccgatcattacattggtggcccttgatgaagcccttgacaactacaccatcacattcctcatccgcggtgtggccatcggccagaccagtctaactgcaagtgtgaccaataaagctggacagagaatcaactcagccccacaacagattgaagtctttcccccgttcaggctgatgcccaggaaggtgacactgcttatcggggccacgatgcaggtcacctccgagggcggcccccagcctcagtccaacatccttttctccatcagcaatgagagcgttgcgctggtgagcgctgctgggctggtacagggcctcgccatcgggaacggcactgtgtctgggctcgtgcaggcagtggatgcagagaccggcaaggtggtcatcatctctcaggacctcgtgcaggtggaggtgctgctgctaagggccgtgaggatccgcgcccccatcatgcggatgaggacgggcacccagatgcccatctatgtcaccggcatcaccaaccaccagaaccctttctcctttggcaatgccgtgccaggcctgaccttccactggtctgtcaccaagcgggacgtcctggacctccgagggcggcaccacgaggcgtcgatccgactcccgtcacagtacaactttgccatgaacgtgctcggccgggtaaaaggccggaccgggctgagggtggtggtcaaggctgtggaccccacatcggggcagctgtatggcctggccagagaactctcggatgagatccaagtccaggtgtttgagaagctgcagctgctcaaccctgaaatagaagcagaacaaatattaatgtcgcccaactcatatataaagctgcagacaaacagggatggtgcagcctctctgagctaccgcgtcctggatggacccgaaaaggttccagttgtgcatgttgatgagaaaggctttctagcatcagggtctatgatcgggacatccaccatcgaagtgattgcacaagagccctttggggccaaccaaaccatcattgttgctgtaaaggtatcccctgtttcctacctgagggtttccatgagccctgtcctgcacacccagaacaaggaggccctggtggccgtgcctttgggaatgaccgtgaccttcactgtccacttccacgacaactctggagatgtcttccatgctcacagttcggtcctcaactttgccactaacagagacgactttgtgcagatcgggaagggccccaccaacaacacctgcgttgtccgcacagtcagcgtgggcctgacactgctccgtgtgtgggacgcagagcacccgggcctctcggacttcatgcccctgcctgtcctacaggccatctccccagagctgtctggggccatggtggtgggggacgtgctctgtctggccactgttctgaccagcctggaaggcctctcaggaacctggagctcctcagccaacagcatcctccacatcgaccccaagacgggtgtggctgtggcccgggccgtgggatccgtgacggtttactatgaggtcgctgggcacctgaggacctacaaggaggtggtggtcagcgtccctcagaggatcatggcccgtcacctccaccccatccagaccagcttccaggaggctacagcctccaaagtgattgttgccgtgggagacagaagctctaacctgagaggcgagtgcacccccacccagagggaagtcatccaggccttgcacccagagaccctcatcagctgccagtcccagttcaagccggccgtctttgatttcccatctcaagatgtgttcaccgtggagccacagtttgacactgctctcggccagtacttctgctcaatcacaatgcacaggctgacggacaagcagcggaagcacctgagcatgaagaagacagctctggtggtcagtgcctccctctccagcagccacttctccacagagcaggtgggggccgaggtgcccttcagcccaggtctcttcgccgaccaggctgaaatccttttgagcaaccactacaccagttccgagatcagggtctttggtgccccggaggttctggagaacttggaggtgaaatccgggtccccggccgtgctggcattcgcaaaggagaagtcttttgggtggcccagcttcatcacatacacggtcggcgtcttggaccccgcggctggcagccaagggcctctgtccactaccctgaccttctccagccccgtgaccaaccaagccattgccatcccagtgacagtggcttttgtggtggatcgccgtgggcccggtccttatggagccagcctcttccagcacttcctggattcctaccaggtcatgttcttcacgctcttcgccctgttggctgggacagcggtcatgatcatagcctaccacactgtctgcacgccccgggatcttgctgtgcctgcagccctcacgcctcgagccagccctggacacagcccccactatttcgctgcctcatcacccacatctcccaatgcattgcctcctgctcgcaaagccagccctccctcagggctgtggagcccagcctatgcctcccactaggccgcgtgaaggttcccggaggatgggtctcagccgagcctcgtgcacccccaagatggaacatccctgctgcattcacactggaacaagcccctccagatgagtgccccggccccaggccagcttcactgccgtctcttcacacagagctgtagtttcggctctgcccattagctcattttatgtaggagttttaaatgtgtgtttttttcctttcaagtcttacaaagctaagactttttggctcattcctttttgcatggttgtctagggtttctggacaatgtgctgttgcatttttattttcctagccttgctaaaatctttcccttctcaagactttgagcagttagaagtgctctttagaagttgtctgtgggtgatgttactgtagtggtctcagggaaaggattgtccagttactttagggggtttttggtggggtttttccccctgtgaaaacttactttgcccctagtctggctgctgctaggacttctgaggagcaatgggacatgagtgtccctgtatctgcgccactgccgcaagggaagcctcaggaaccagcacctggaggccaggatagccaagccctgggtgagcgagaggctggagaacacaggagctcacccagggctgctgcccaaccatgggccactgtgaacagacttcagtcctctgtttttgtttcataagccgttgagacatctgatggacttggcttaggccctgctgggacatcccacgtgtgatccctttcactccatcaggacaccaggactgtccttaggaaaatgtccttgagatggcagcaggagtcatattttctgtgtgtgtgtttcggaaagccgctgtgtcctgcctcagcacaaagacccagtgtcatttgctcctcctgttcctgtgccactccagaacctcagcagatctgagccaccgcctgccagtgtgagaggcggccactttcatggcagctcatcaggcgcagggccccagacagcttcccagcaggccctagagcccggcctgggccaatgatggagggcggccgccagcccagggcctgcccatccagaagggactccccagggcctgggggaggagacccttggaaaagtcctctcttcccagctcctgattctggatctgagattctcagatcacaggcccctgtgctccaggccgaggctgggctaccctcagggagatccagagactcatgcccatggccatccatgcgtggacgctgtgtggagagtccaggatgacgggatcccgcacaagctcccttcagtccttcagggctgggccatgtggttgatttttctaaagctggagaaaggaagaattgtgccttgcatattacttgagcttaaactgacaacctggatgtaaataggagcctttctactggtttatttaataaagttctatgtgatttttt

SEQ ID NO: 661 - DNA, 5756 bp, Homo sapiens
gttttactaaagtgaatttttttttgtttgcttcgttcgtctttggctctttttttttccttcccaatttcggatttatttcaaggcgaatctggctttgggggaagaggaagaaaagtcggattacaagatcaaccaccaccaacaacaataaaaaccaccaggatatttttttgcaaatttctgacggctttaaattcatgaagcaattgtccccttttgcaatcagcatttggatctcagaatgagcaaggaaagacccaagaggaatatcattcagaagaaatacgatgacagtgatgggattccgtggtcagaagaacgggtggtacgtaaagtcctttatttgtctctgaaggagttcaagaattcccagaagaggcagcatgcggaaggcattgctgggagcctgaaaactgtgaatgggctccttggtaatgaccagtctaagggattaggaccagcatcagaacagtcagagaatgaaaaggacgatgcatcccaagtgtcctccactagcaacgatgttagttcttcagattttgaagaagggccgtcgaggaaaaggcccaggctgcaagcacaaaggaagtttgctcagtctcagccgaatagtcccagcacaactccagtaaagatagtggagccattgctaccccctccagctactcagatatcagacctctctaaaaggaagcctaagacagaagattttcttacctttctctgccttcgaggttctcctgcgctgcccaacagcatggtgtattttggaagctctcaggatgaggaggaagtcgaggaggaagatgatgagacagaagacgtcaaaacagccaccaacaatgcttcatcttcatgccagtcgacccccaggaaaggaaaaacccacaaacatgttcacaacgggcatgttttcaatggttccagcaggtcaacacgggagaaggaacctgttcaaaaacacaaaagcaaagaggccactcccgcaaaggagaagcacagcgatcaccgggctgacagccgccgggagcaggcttcagctaaccaccccgcagcggccccctccacgggttcctcggccaaggggcttgctgccacccatcaccacccccctctgcatcggtcggctcaggacttacggaaacaggtttctaaggtaaacggagtcactcgaatgtcatctctgggtgcaggtgtaaccagtgccaaaaagatgcgcgaggtcagaccttcaccatccaaaactgtgaagtacactgccacggtgacgaagggggctgtcacatacaccaaagccaagagagaactggtcaaggacaccaaacccaatcaccacaagcccagttccgctgtcaaccacacaatctcagggaaaactgaaagtagcaatgcaaaaacccgcaaacaggtgctatccctcgggggggcgtccaagtccactgggcccgccgtcaatggcctcaaggtcagtggcaggttgaacccaaagtcatgcactaaggaggtgggggggcggcagctgcgggagggcctgcagctgcgggaggggctgcggaactccaagaggagactggaagaggcacaccaggcggagaagccgcagtcgccccccaagaagatgaaaggggcggctggccccgccgaaggccctggcaagaaggccccggccgagagaggtctgctgaacggacacgtgaagaaggaagtgccggagcgcagtctggagaggaatcggccgaagcgggccacggccgggaagagcacgccaggcagacaagcacatggcaaggcggacagcgcctcctgtgaaaatcgttctacctcgcaaccggagtccgtgcacaagccgcaggactcgggcaaggccgagaagggcggcggcaaggccgggtgggcggccatggacgagatccccgtcctcaggccctccgccaaggagttccacgatccgctcatctacatcgagtcggtccgcgctcaggtggagaagttcgggatgtgcagggtgatcccccctccggactggcggcccgagtgcaagctcaacgatgagatgcggtttgtcacgcagattcagcacatccacaagctgggccggcgctggggccccaacgtgcagcggctggcctgcatcaagaagcacctcaaatctcagggcatcaccatggacgagctcccgctcatagggggctgtgagctcgacctggcctgctttttccggctgattaatgagatgggcggcatgcagcaagtgactgacctcaaaaaatggaacaaactagcagacatgctgcgcatccccagaactgcccaggaccggctggccaagctgcaggaggcctactgccagtacctactctcctacgactccctgtccccagaggagcaccggcggctggagaaggaggtgctgatggagaaggagatcctggagaagcgcaaggggccgctggaaggccacacagagaacgaccaccacaagttccaccctctgccccgcttcgagcccaagaatgggctcatccacggcgtggcccccaggaacggcttccgcagcaagctcaaggaggtgggccaggcccagttgaagactggccggcggcgactcttcgctcaggaaaaagaagtggtcaaggaagaggaggaggacaaaggcgtcctcaatgacttccacaagtgcatctataagggaaggtctgtttctctaacaactttttatcgaacagcgaggaatatcatgagcatgtgtttcagcaaggagcctgccccagccgaaatcgagcaagagtactggaggctagtggaagagaaggactgccacgtggcagtgcactgcggcaaggtggacaccaacactcacggcagtggattcccagtaggaaaatcagaacccttttcgaggcatggatggaacctcaccgtcctccccaataacacagggtccatcctgcgtcacctcggtgctgtgcctggagtgactattccctggctaaatattggcatggtcttttctacctcatgctggtctcgagaccaaaatcaccttccatacattgactacttacacactggtgctgactgcatttggtattgcattcctgctgaggaggagaacaagctggaagatgtggtccacaccctgctgcaagccaatggcaccccagggctgcagatgctggaaagcaacgtcatgatctccccggaggtgctgtgcaaagaggggatcaaggtgcacaggaccgtgcagcagagtggccagtttgtcgtctgcttcccgggatcctttgtgtccaaagtgtgctgtgggtacagcgtgtctgaaaccgtgcactttgctaccacccagtggacaagtatgggctttgagaccgccaaggaaatgaagcgtcgccatatagctaagccattctccatggagaagttactctaccagattgcacaagcagaagcaaaaaaagaaaacggtcccactctcagtaccatctcagccctcctggatgagctcagggatacagagctgcggcagcgcaggcagctgttcgaggctggcctccactcctccgcacgctatggcagccacgatggcagcagcacggtggcggacgggaagaaaaagcctcgaaagtggctgcagttggagacgtcagagaggaggtgtcagatctgccagcacctgtgctacctgtccatggtggtacaagagaacgaaaacgtcgtgttctgtctggagtgtgctctgcgccacgtggagaaacagaagtcctgccgagggctgaagttgatgtaccgctacgatgaggaacagattatcagtctggtcaatcagatctgcggcaaagtgtctggtaaaaacggcagcattgagaactgtctcagtaaacccacaccaaaaagaggtccccgcaagagagcgacagtggacgtgcccccctcccgtctgtcagcctccagttcatccaaaagtgcttcgagctcatcatgaagatgccaacgcccgtggtcgatttatatatatttttttgtaattattatattctagtttggagtacttgctgtaggattcaagctgtctttgcactagctctaaagaagattttcttctggttttagagaactaattttgttttagcattaaactgttgaacttttttttgtacttagaaaacctagatactgcagtcagattttggaaactgccgtatagtcactgttttaaaaaccccggaggggctgtattaatttgtattgccccatggctgacaaaagcctttttttttggttttgatttttttttttttgtaactgttggggggaaaaaggctttttaacccatttttgaagagggtgaagtttggagaacaaatttaaaaaccatcagtcatgtgagcagattttttagaagggataggagacacacgcgcacacacacacacacacgaaacttgaaatggctttgctttggctgtcgtcttctgccgtgtgccagatgagcttgtgatctgggaagccggggcacccccgttttgtttctctgggcggttgtggcagctgaaggcggacgttgtttcctaaccataggtggaacgaggagacgggagcgagtgggctctccaccagcacatcactatgcatctgttccaggaaagaagaaaagcgagcgaggaagacggaaaagactgcctgccttggaggggtcacatgagggagacctgtgcctgatttcattaggaaatccattctgttattttttggtgctgttggctactttatcaaaaaacccttcaatagcatccttaagatttaaaaaaaaaaaaaaaaaaaaggaaaaaaaagtgatggaagccgtaagtgcttctttgtcatcgacgtgcaatctttctaacattccatctccatctcaccgcttcttgtttgacaccttcacaagtcagcattaatctttcttttaaaacttgtttcatttatgatcatgtagagagccactaggaggcctgcagttatttttgaatgtgaaaatgcatttgcgttcatcttgtctattttttctcttcatgttgtaacaaaaaggaaaaaagaaaaaaaaatcccatcccttttgtacatatgcctgtaaattgttttaaatacttgagcctttttctcggtggggggtggggaggggggtgagaagacaagatgaagaaaagccttacatttcagtttcttcatcggttggattggatgcttacagggtttttcttgtaacatttataagtgctgcttacatcactgaacaacaacaaaaaaataataatggagtagctgttgcccttctccggttgtgtgtacagtatgtgtggaataaaaaagggaaactgttttcacaagctgttctttgtttcataattggattcatcaatcccgtagctacccatattgcactgagcttgccagtggtgactgccaggaacgtcctatgatccactttgttggttgttgttgcagaagactgaactgttttggaatatttaacaattacagaaacagtcaagtgttttccaatgtggttgtccggtttctatggccttgctgtgtactttccctctttttgacagtaaacttctgcctatggcttacagtttgacatttaatttattagcgctgctctgcacccctcccttgggagggagacttcatgtggtttattgcgagttttttgtttacttttcaggtttgtactacaaggtttaataataaaaacaaagttttttgga

SEQ ID NO: 662 - DNA, 10916 bp, Homo sapiens
ggcggcgcggctggtccccaggggtctgcgggcgactgcgcggctgaggcgcccgagtgcggtactggcggcgggcggcgggcagccatggcggaggccgcgtcgccgcacttgtcgctgccctcggggctgctggagctctgcgcgctgctgggcgccccccgggacagtctccgaagtctcgagcagaggtcctgtccattttcgtgcctccttttatcagtaaagaggacagtcaaacggccggtgccaactgcggcactctcggtaaaacccggatgcgctccttgagaaagaagagagagaagcccagaccagagcagtggaagggcctcccggggccccccagagcgccagagcctgaggatgtcgccgtcccgggcggcgtggacctcctcaccctgccgcagctgtgcttcccagggggtgtgtgcgtggccactgaacctaaggaggattgcgtccacttcctggtgctgaccgatgtctgcgggaataggacctatggcgtggtggcccagtactaccggcccctgcatgatgagtactgtttctacaatggcaaaacgcaccgggagtgtcctggctgcttcgtgcccttcgcggtgtgcgtggtctccaggtttccctattacaactccctcaaggactgcctttcctgtttattggctcttctgaagccctgtaaagattttgaagtggacagtcatataaaagatttcgctgcgaagctgtctttaatacccagcccgccacctggaccgctccatttggtatttaacatgaagtcgctccagattgtgttacctgcccgagcagaccccgaaagccccatcctggacctggaccttcacctgcccttgctgtgcttcaggcctgagaaggtgctacagatcctgacatgcatcctgacggaacagcggatcgtcttcttctcctcggactgggctctgctgacgctggtcactgagtgcttcatggcctacctgtatccgctgcagtggcagcaccccttcgtgcccatcctgtcggaccagatgctggatttcgtcatggcccccacgtccttcctgatgggctgccatctcgaccacttcgaagaagtcagcaaggaagccgacggtttagttctgataaatattgatcatgggagcatcacctactccaagtccacggacgataacgtggacattcctgatgtccccctcctggcagcccagacgtttattcagagggtgcagagcctccagctccaccatgagctgcacgccgcccacctcctctccagcacagacctgaaggagggccgagcccaccggcggtcctggcagcagaaactcaactgccagatacagcagaccaccctgcagctgctcgtgagcatcttcagggatgtaaagaatcatttaaactatgaacacagagtctttaatagtgaagaatttctcaaaaccagggctccaggggaccatcagttttataagcaggtcttagacacctacatgttccattcttttcttaaagcccggctcaataggaggatggacgcctttgctcagatggacctcgacacccagtcggaggaggacagaataaatggaatgcttctaagtccaaggagaccgaccgttgagaaaagagcctcccggaagtcctcgcacctgcatgtcacccacaggcgcatggtggtcagcatgcccaacctgcaggacattgccatgcctgagctggcacccaggaactcctcgctccggctgacggacaccgcaggctgtaggggcagcagcgcagttctgaatgtcacgccgaagtccccgtatacattcaagattcccgaaatccactttccgctggagagcaagtgcgtgcaggcataccatgcccactttgtctccatgctgagcgaggccatgtgctttctggcccccgataactctctgctcctggcccgctatttgtacctccgagggctcgtttatctgatgcagggacagctgctgaacgccctcttggacttccagaatctgtataaaacagacatacggatctttcccactgatttggtgaagaggacggtggaatccatgtctgcccctgagtgggagggggctgagcaggcgccggagctgatgaggctcatcagcgagatcctggacaagccgcacgaggcctcgaagctggacgaccacgtgaagaagttcaagctgcccaagaagcacatgcagctgggcgacttcatgaagcgggtccaggagtcagggatcgtgaaggacgccagcatcatacaccggctgttcgaggccttgactgtaggacaggagaaacaaatcgacccagaaacattcaaagatttctacaactgctggaaggagacggaagcagaagcccaggaggtcagtctgccgtggctggtgatggaacacctggataaaaacgagtgtgtgtgtaagttgtccagctccgtcaagacaaacctaggcgttggcaagatcgccatgacccagaagcgcctgttcctcctaaccgaaggaaggccaggctacttggagatttccaccttcagaaatatagaggaggtcaggagaaccactactacatttctacttcggagaatacccactttaaaaatcagagtggcgtccaagaaagaagtcttcgaagccaacctgaaaaccgagtgtgacctttggcacctgatggtgaaggagatgtgggctgggaagaagctggccgatgaccacaaggaccctcactacgtccagcaggcgctgaccaacgtcttgctgatggacgccgtcgtgggcacactgcagtcaccaggcgccatctacgctgcctccaagttatcctactttgataagatgagtaacgaaatgcccatgacgcttccggagacaaccctggaaacactgaagcataaaatcaacccctcggcgggggaggcgttcccacaagcggtggacgtgctgctctacactccagggcatcttgacccagccgaaaaagttgaagatgctcaccccaagttatggtgtgctctgagcgaaggcaaggtgaccgtgttcaatgcttcttcatggaccatccaccagcactcctttaaagtgggcactgcaaaagtgaactgcatggtgatggccgaccagaaccaggtgtgggttggctcggaagactccgtcatctacatcatcaacgtccacagcatgtcctgcaacaagcagctcacagcccactgctccagtgtcacggatttgattgtgcaggacggacaggaggcacccagcaacgtgtactcgtgcagcatggacggcatggtgctggtgtggaatgtgagcacactgcaggtgaccagccgcttccagctgccgcgaggtggcctgacgtccatcagactgcacggcggccgcctgtggtgctgcacaggtaacagcatcatggtcatgaaaatgaatggatccctccatcaagaattgaagattgaggagaacttcaaagacaccagtacctccttcctggccttccagctccttcctgaggaggagcagctgtgggcggcctgtgcaggacgcagcgaggtttacatctggagcctgaaggacctggcccagcccccgcagagggtgcccctcgaggactgctctgagatcaactgcatgatccgggtgaagaagcaggtctgggtgggcagccgagggctggggcagggaacacccaaggggaaaatctacgtgattgacgccgagaggaagaccgtggagaaggagctggtggcgcacatggacaccgtgaggacgctgtgctcggctgaggacagatacgtgctgagtgggtcgggcagggaggaggggaaagtcgccatttggaaaggcgaataaacgtggctgagtctgccaagtggaactgtgccctatgtgtggggactggctgccccctagagcctgccaggagcagaagcctggaggggtggcagggcagagcagcccaggctcagcatggagcccacttaccgtgtggccagccgcgagacccatggccacgcaccttctctcaggccttcgggccccctggttaaactgcaccaagggtgtttcctgttggggtgtgtctcaggcaggcagctgcgtcttgttggtgataacctctgctgggaggttactttgttgcctagaaagttctggaatccacaaccaggggctggcactggagccagcagcttggccgagtcacaggtgacccgtggccctcacgtctctggttttacctttccttacttcattcattcactcacccagtccttacgaatcaccgaggaacactgggctgagcacatgacagggagcctggagccccggggcctccagcgaggcctgagaagggtggttcgggtaaccactgtgggctctctcccatcacagaaggtggacagggcctacccaggtggaggggaccaccctgcgatcaggtgtttgcgacaggggttgggccagctgaggcaagctgtcttttttcccttttctttttaatagatgcaacatttttataataatcctagagaccttttttctaccaaagatcacagaccagaaaaagttccatctaaaatatcatgcccaggaaagcacatgggatcaaaagtaaaatagcatcatgtgtgatctcgtcttccagcgtgccgctcagttccccgaatccgtgtgcacacgtgtgatctcgtcttcagtgtgccgctcagttccctgaatccgtgtgcacactgcgtatgtgtacgcgcagcatgctatactgaactcaacaagatcttggctgtacataaatatttgtaaaagagaccctttgcacctttttactgtaatgttgagacttcattacttaaatgttctacggaaggttctggtgtggttgttggagccggagggagcgtgtcagcacgtgctgagggcatggggcctgccccctgggcacccatccacaagctgggccacggagctccagcttctcaggacaaagccccggggctggcgcatcctgagggtctctgggggtgtttgccaggctcctgggatgggccgctttcagaagccctgcagtgcctccagatggaaaggcgggcccggcctccggttgggtctgcattttggagagtccacaccacggaccaggttttcccccaaggcttggctttgtgtagctactaacttcttggggcattctgagagtgtgggcagagagaattatgtggcctcatcctcccccaaggctgtgcttgcagcccgggcaccttcccactttctagctctggagaggttggattttgcttttgtaaacacatgaatccttatgataaaagtctgtcagtcaaaaatacatttataaattatttaatgccagtcctcatgtaacctcaggtatcttcagcttgtggagaataaatctggtttaataaaaaaaaaaaaaaaaaggcggcgcggctggtccccaggggtctgcgggcgactgcgcggctgaggcgcccgagtgcggtactggcggcgggcggcgggcagccatggcggaggccgcgtcgccgcacttgtcgctgccctcggggctgctggagctctgcgcgctgctgggcgccccccgggacagtctccgaagtctcgagcagaggtcctgtccattttcgtgcctccttttatcagtaaagaggacagtcaaacggccggtgccaactgcggcactctcggtaaaacccggatgcgctccttgagaaagaagagagagaagcccagaccagagcagtggaagggcctcccggggccccccagagcgccagagcctgaggatgtcgccgtcccgggcggcgtggacctcctcaccctgccgcagctgtgcttcccagggggtgtgtgcgtggccactgaacctaaggaggattgcgtccacttcctggtgctgaccgatgtctgcgggaataggacctatggcgtggtggcccagtactaccggcccctgcatgatgagtactgtttctacaatggcaaaacgcaccgggagtgtcctggctgcttcgtgcccttcgcggtgtgcgtggtctccaggtttccctattacaactccctcaaggactgcctttcctgtttattggctcttctgaagccctgtaaagattttgaagtggacagtcatataaaagatttcgctgcgaagctgtctttaatacccagcccgccacctggaccgctccatttggtatttaacatgaagtcgctccagattgtgttacctgcccgagcagaccccgaaagccccatcctggacctggaccttcacctgcccttgctgtgcttcaggcctgagaaggtgctacagatcctgacatgcatcctgacggaacagcggatcgtcttcttctcctcggactgggctctgctgacgctggtcactgagtgcttcatggcctacctgtatccgctgcagtggcagcaccccttcgtgcccatcctgtcggaccagatgctggatttcgtcatggcccccacgtccttcctgatgggctgccatctcgaccacttcgaagaagtcagcaaggaagccgacggtttagttctgataaatattgatcatgggagcatcacctactccaagtccacggacgataacgtggacattcctgatgtccccctcctggcagcccagacgtttattcagagggtgcagagcctccagctccaccatgagctgcacgccgcccacctcctctccagcacagacctgaaggagggccgagcccaccggcggtcctggcagcagaaactcaactgccagatacagcagaccaccctgcagctgctcgtgagcatcttcagggatgtaaagaatcatttaaactatgaacacagagtctttaatagtgaagaatttctcaaaaccagggctccaggggaccatcagttttataagcaggtcttagacacctacatgttccattcttttcttaaagcccggctcaataggaggatggacgcctttgctcagatggacctcgacacccagtcggaggaggacagaataaatggaatgcttctaagtccaaggagaccgaccgttgagaaaagagcctcccggaagtcctcgcacctgcatgtcacccacaggcgcatggtggtcagcatgcccaacctgcaggacattgccatgcctgagctggcacccaggaactcctcgctccggctgacggacaccgcaggctgtaggggcagcagcgcagttctgaatgtcacgccgaagtccccgtatacattcaagattcccgaaatccactttccgctggagagcaagtgcgtgcaggcataccatgcccactttgtctccatgctgagcgaggccatgtgctttctggcccccgataactctctgctcctggcccgctatttgtacctccgagggctcgtttatctgatgcagggacagctgctgaacgccctcttggacttccagaatctgtataaaacagacatacggatctttcccactgatttggtgaagaggacggtggaatccatgtctgcccctgagtgggagggggctgagcaggcgccggagctgatgaggctcatcagcgagatcctggacaagccgcacgaggcctcgaagctggacgaccacgtgaagaagttcaagctgcccaagaagcacatgcagctgggcgacttcatgaagcgggtccaggagtcagggatcgtgaaggacgccagcatcatacaccggctgttcgaggccttgactgtaggacaggagaaacaaatcgacccagaaacattcaaagatttctacaactgctggaaggagacggaagcagaagcccaggaggtcagtctgccgtggctggtgatggaacacctggataaaaacgagtgtgtgtgtaagttgtccagctccgtcaagacaaacctaggcgttggcaagatcgccatgacccagaagcgcctgttcctcctaaccgaaggaaggccaggctacttggagatttccaccttcagaaatatagaggaggtcaggagaaccactactacatttctacttcggagaatacccactttaaaaatcagagtggcgtccaagaaagaagtcttcgaagccaacctgaaaaccgagtgtgacctttggcacctgatggtgaaggagatgtgggctgggaagaagctggccgatgaccacaaggaccctcactacgtccagcaggcgctgaccaacgtcttgctgatggacgccgtcgtgggcacactgcagtcaccaggcgccatctacgctgcctccaagttatcctactttgataagatgagtaacgaaatgcccatgacgcttccggagacaaccctggaaacactgaagcataaaatcaacccctcggcgggggaggcgttcccacaagcggtggacgtgctgctctacactccagggcatcttgacccagccgaaaaagttgaagatgctcaccccaagttatggtgtgctctgagcgaaggcaaggtgaccgtgttcaatgcttcttcatggaccatccaccagcactcctttaaagtgggcactgcaaaagtgaactgcatggtgatggccgaccagaaccaggtgtgggttggctcggaagactccgtcatctacatcatcaacgtccacagcatgtcctgcaacaagcagctcacagcccactgctccagtgtcacggatttgattgtgcaggacggacaggaggcacccagcaacgtgtactcgtgcagcatggacggcatggtgctggtgtggaatgtgagcacactgcaggtgaccagccgcttccagctgccgcgaggtggcctgacgtccatcagactgcacggcggccgcctgtggtgctgcacaggtaacagcatcatggtcatgaaaatgaatggatccctccatcaagaattgaagattgaggagaacttcaaagacaccagtacctccttcctggccttccagctccttcctgaggaggagcagctgtgggcggcctgtgcaggacgcagcgaggtttacatctggagcctgaaggacctggcccagcccccgcagagggtgcccctcgaggactgctctgagatcaactgcatgatccgggtgaagaagcaggtctgggtgggcagccgagggctggggcagggaacacccaaggggaaaatctacgtgattgacgccgagaggaagaccgtggagaaggagctggtggcgcacatggacaccgtgaggacgctgtgctcggctgaggacagatacgtgctgagtgggtcgggcagggaggaggggaaagtcgccatttggaaaggcgaataaacgtggctgagtctgccaagtggaactgtgccctatgtgtggggactggctgccccctagagcctgccaggagcagaagcctggaggggtggcagggcagagcagcccaggctcagcatggagcccacttaccgtgtggccagccgcgagacccatggccacgcaccttctctcaggccttcgggccccctggttaaactgcaccaagggtgtttcctgttggggtgtgtctcaggcaggcagctgcgtcttgttggtgataacctctgctgggaggttactttgttgcctagaaagttctggaatccacaaccaggggctggcactggagccagcagcttggccgagtcacaggtgacccgtggccctcacgtctctggttttacctttccttacttcattcattcactcacccagtccttacgaatcaccgaggaacactgggctgagcacatgacagggagcctggagccccggggcctccagcgaggcctgagaagggtggttcgggtaaccactgtgggctctctcccatcacagaaggtggacagggcctacccaggtggaggggaccaccctgcgatcaggtgtttgcgacaggggttgggccagctgaggcaagctgtcttttttcccttttctttttaatagatgcaacatttttataataatcctagagaccttttttctaccaaagatcacagaccagaaaaagttccatctaaaatatcatgcccaggaaagcacatgggatcaaaagtaaaatagcatcatgtgtgatctcgtcttccagcgtgccgctcagttccccgaatccgtgtgcacacgtgtgatctcgtcttcagtgtgccgctcagttccctgaatccgtgtgcacactgcgtatgtgtacgcgcagcatgctatactgaactcaacaagatcttggctgtacataaatatttgtaaaagagaccctttgcacctttttactgtaatgttgagacttcattacttaaatgttctacggaaggttctggtgtggttgttggagccggagggagcgtgtcagcacgtgctgagggcatggggcctgccccctgggcacccatccacaagctgggccacggagctccagcttctcaggacaaagccccggggctggcgcatcctgagggtctctgggggtgtttgccaggctcctgggatgggccgctttcagaagccctgcagtgcctccagatggaaaggcgggcccggcctccggttgggtctgcattttggagagtccacaccacggaccaggttttcccccaaggcttggctttgtgtagctactaacttcttggggcattctgagagtgtgggcagagagaattatgtggcctcatcctcccccaaggctgtgcttgcagcccgggcaccttcccactttctagctctggagaggttggattttgcttttgtaaacacatgaatccttatgataaaagtctgtcagtcaaaaatacatttataaattatttaatgccagtcctcatgtaacctcaggtatcttcagcttgtggagaataaatctggtttaataaaaaaaaaaaaaaaaa

SEQ ID NO: 663 - DNA, 3805 bp, Homo sapiens
attcctggattacctcctcaaagggctctaacaactcgcattgctctcagcgtgtgagagggtcctttgctctgaagggtcttctaaaatatttgttcaatcgttacttagcaggggctgggagtaacggattttattttattttattttattttttgagacggagtctcgctctgtcgcccaggctggagtgcagtcgcgcaatctcggctcacggatttgctcttttaaaggacatacccttttatgtttaaatgaaggaactcattgatgcaccgaggcgaaaggaacctttaattaagtgcgtcttctatgcggagtgatcgcttttgtcacttgttcgaggggtgagagctcccgtcagttgtccctgtttctgtgagccgtctacgaagcccgggcttggcctgggcgacgctgagcggctttaaccggcggcgtccagccggctccgccagcgctgccgccgccctcgaggctccctctgactgaaggcgcgctgagcatcgcggcattaggggctcctggtccctcaaacatccagggaagccattttcagggactaggtactgacccccgcgagccgccacagccacagcccgcgctccgggccgaacgcccgagctcaagagctcccgagcttccgtcgggcggcggcctcacagctgggggccctgaggcggaaggcgcagccgctcagctgcggaccgggggcgtggcgagggcgcacaggttctgtttttcgccggcccggggccgctttcggtttcgtttcccgccggcgtctccaccctgcgagagccgcccgccagccagcgtccgccgccgtccgcgtcgcgccacccgcggtccgacgggagcaggcccagcggccatggcccaggccggcgtcgtcggtgaggtcacccaggtgctgtgcgcggccgggggcgccctggagttgcccgagctgcggcgccgcttgcggatgggcttgagcgccgacgcgctggagcggctgctgcggcagcgtgggcgcttcgtggtggcggtgcgggcgggcggcgcagccgcggccccggagcgcgtggtgctggccgcctcgccgctgcgcctgtgtcgcgcgcaccagggctccaagccgggctgcgtggggctctgcgcgcagctccacctctgcaggttcatggtctacggcgcctgcaagttcctgagagccgggaagaactgtaggaatagtcacagcttgacaaccgaacacaacctgagtgtgctgagaactcatggcgttgaccacctgagctataatgagctatgccaactcttgtttcagaacgacccctggcttttgccagaaatttgccaacattacaacaaaggagatggaccccacggctcttgtgcctttcaaaagcagtgcatcaagctccatatctgccagtattttttacagggggaatgcaagtttggcactagctgtaagagatcccatgatttctctaattctgagaatctggaaaaattggagaagttgggtatgagctcagacctggtgagcaggctgcctaccatttatagaaatgcacatgacatcaagaataagagctctgcccccagcagagtgcctcctctttttgtcccacaggggacttctgaaagaaaagacagttcaggttctgtgtccccaaacactcttagccaggaggagggtgatcagatctgtttgtaccatatccggaaaagttgtagctttcaagataagtgccatagagttcatttccatttgccgtatcgatggcaattcttggatagaggcaaatgggaggatttggacaacatggaacttattgaagaggcatattgcaatcccaaaatagaaaggatcctgtgctctgagtcagccagtacctttcactctcattgtctgaactttaacgccatgacttacggtgctacccaggctcgccgcctctccacggcctcctctgtcaccaaacctccacacttcatcctcaccactgactggatttggtactggagtgatgagtttggttcttggcaggaatatggaagacagggcacggtgcaccctgtgaccactgtcagcagtagcgacgtggagaaggcctacctggcctactgtacaccggggtctgacggccaggcagccaccttgaagttccaggccggaaagcacaactacgagttagatttcaaagccttcgttcagaaaaacctggtctatggcacaactaaaaaggtttgccgcagacccaaatacgtgtctccccaggatgtgacgaccatgcaaacctgcaataccaagtttccaggcccgaagagcatcccagactattgggactcctctgccctgccagacccaggctttcagaagatcacccttagttcttcctcggaagagtatcagaaggtctggaacctctttaaccgcacgctgcctttctactttgttcagaagattgagcgagtacagaacctggccctctgggaagtctaccagtggcaaaaaggacagatgcagaagcagaatggagggaaggccgtggacgagcggcagctgttccacggcaccagcgccatttttgtggacgccatctgccagcagaactttgactggcgggtctgtggtgttcatggcacttcctacggcaaggggagctactttgcccgagatgctgcatattcccaccactacagcaaatccgacacgcagacccacacgatgttcctggcccgggtgctggtgggcgagttcgtcaggggcaatgcgtcctttgtccgtccgccggccaaggagggctggagcaacgccttctatgatagctgcgtgaacagtgtgtccgacccctccatctttgtgatctttgagaaacaccaggtctacccagagtatgtcatccagtacaccacctcctccaagccctcggtcacaccctccatcctgctggccttgggctccctgttcagcagccgacagtgagcgcacaggagtgttccaggcctttcacctgctctgccttgaaatggctatttgggcctttccttttctttttaaacagaaacttttaatgaactgttctcttaacattgacctctcaatgaagttatgttcttaatctcttgctaataatgatttttacttttaagtcacttttgggttcactagtggattaaccagaagtgattgtagttgagtccagttttgctttttaataatgtgttgaagttttagtttttactctttgttgactttgctgcttattggcaccagggacagagtttctagatacaattttatggattggttttaatttttatgagtttgtctctgcagtgattcggtttctcagagtctcatggcatcatagtttttccagaatgacacagtagccaccggtggatgacagcccacgggcggcacagtcacttctgcctgttgttctgacaccaacccaggcagctctgctgtggcttctcctgggctctggcattagttggtctgtgtcacattgtcagaacaggtggctgctgtgtggtgccatcgagtccctgctggttccccttgtcctgggagggtcacccattgcccaaggaagtgcatccacctggcaggtgacctggaggagtagcttccccgaggacccccaggcttggcctgtgattgcgcaaacccacatttcctaagcacactggacacccttcgagtgtgggttttaacatccctgtgagattgaatacttgtgccacacatgtcacaaaagagtatggaaataaaagaaaatttatccgaaaaaaaaaaaaaaaa

SEQ ID NO: 664 - DNA, 1360 bp, Homo sapiens
gcccttgccttgagtcagtgcgctgctctccagcccgcttgaacgctccccgcagccaccgccacccattggaatggccaacaggggacctgcatatggcctgagccgggaggtgcagcagaagattgagaaacaatatgatgcagatctggagcagatcctgatccagtggatcaccacccagtgccgaaaggatgtgggccggccccagcctggacgcgagaacttccagaactggctcaaggatggcacggtgctatgtgagctcattaatgcactgtaccccgaggggcaggccccagtaaagaagatccaggcctccaccatggccttcaagcagatggagcagatctctcagttcctgcaagcagctgagcgctatggcattaacaccactgacatcttccaaactgtggacctctgggaaggaaagaacatggcctgtgtgcagcggacgctgatgaatctgggtgggctggcagtagcccgagatgatgggctcttctctggggatcccaactggttccctaagaaatccaaggagaatcctcggaacttctcagataaccagctgcaagagggcaagaacgtgatcgggttacagatgggcaccaaccgcggggcgtctcaggcaggcatgactggctacgggatgccacgccagatcctctgatcccaccccaggccttgcccctgccctcccacgaatggttaatatatatgtagatatatattttagcagtgacattcccagagagccccagagctctcaagctcctttctgtcagggtggggggttcagcctgtcctgtcacctctgaggtgcctgctggcatcctctcccccatgcttactaatacattcccttccccatagccatcaaaactggaccaactggcctcttcctttcccctgggaccaaaatttaggggcctcagtccctcaccgccatgccctggcctattctgtctctccttcttccccctggcctgttctgtctctgagctctgtgtcctccgttcattccatggctgggagtcactgatgctgcctctgccttctgatgctggactggccttgcttctacaagtatgcttctcccacagctgtggctgcaggaacttaatttatagggaggagcctgtggcagctgctgccccagccacagctgcactgactgtgctcaccacacatctggggcagccttccctggcaggggccctcgtggcttctcattttccattcccttcactgtggctaaggggtggggtgaggggatggagagggagggctgcctaccatggtctggggcttgaggaagatgagtttgttgatttaaataaagaatttgtcatttttg

SEQ ID NO: 665 - DNA, 4203 bp, Homo sapiens
ttccttggagcctagcggctctccccgcgtccaagatggcggcagaagcagctggtgggaaatacagaagcacagtcagcaaaagcaaagacccctcggggctgctcatctctgtgatcaggactctgtctactagtgacgatgtcgaagacagggaaaatgaaaagggtcgccttgaagaagcctacgagaaatgtgaccgtgacctggatgaattgattgtacagcactacacagaattgacgacagccattcgcacataccagagcatcacagagcgcatcactaactcccgaaataaaataaagcaggtaaaagagaacctgctttcatgcaagatgctgctgcactgcaaacgggatgagcttcggaaactgtggattgaaggaattgagcataagcatgtcctgaacttgttggatgaaattgagaatatcaagcaagtgcctcaaaagctggaacagtgcatggccagcaagcactatctcagtgccactgacatgttggtgtcagcagttgagtctttggagggccccctgctccaggtggaaggactgagtgaccttcgactagagcttcacagcaagaagatgaaccttcacttggttctcatagatgaactacaccggcacctgtacatcaaatcgactagccgagttgtgcagcgtaacaaggaaaaagggaaaatcagctccctcgtgaaagatgcttctgttcctctgattgatgttacaaacctccctactcctcgaaaattccttgatacctctcactattctactgctggaagctcaagtgtgagggagataaatctgcaggacatcaaggaagatttagaattggatccagaggaaaacagcaccctgtttatgggtatcctcattaagggcttggcgaaactgaagaagatcccagaaacagttaaggcaatcatagagcgcttggagcaggagttgaagcaaattgtgaagaggtctacaacccaggtggcagacagtggctatcagcggggggagaacgttactgtggagaaccaaccaaggttgcttctagaactgctggagttactgtttgacaagtttaatgctgtagccgctgcacactctgtggtcctgggatacctgcaggacactgtagtgactccactgactcagcaggaagatatcaaactgtatgatatggcagatgtatgggtgaagatccaagatgttctacagatgctattaactgagtacttggatatgaaaaatactcgtacggcctctgaaccatcagctcaactaagctatgccagcactggacgagagtttgcagccttttttgccaagaagaaacctcaaaggccaaaaaattctcttttcaagttcgaatcgtcctcccatgccatcagtatgagcgcctatctgcgagaacagagaagggagctctatagtcggagtggagaactgcaagggggtcctgatgacaacttaattgaaggtggaggaacaaaatttgtctgcaaacctggagccagaaacattaccgtcatattccacccattactaagatttattcaggagattgagcatgctctgggtcttggcccagccaaacagtgtcctcttcgagagtttctcaccgtgtacatcaaaaacatctttctcaatcaagtcttggctgagatcaacaaggagattgaaggagtcactaaaacatctgaccctttgaagattctggccaacgcagacaccatgaaggtgctgggagtgcagcggcctctcctacagagcacaatcattgtggagaagacagttcaagacctcctgaacctgatgcatgacttgagtgcatattcagatcaattcctcaacatggtgtgcgtgaagctccaggagtacaaggacacctgcactgcagcttacaggggtattgtccagtcagaagaaaaacttgtcatcagtgcatcctgggcaaaagatgatgatatcagcagactcttgaaatctctaccaaactggatgaatatggctcaacccaaacagctgaggccaaaaagagaggaggaagaagatttcataagggcagcttttggcaaggagtctgaagttcttattgggaacctgggtgataaattaatccctccacaagacatccttcgtgacgtcagtgacctcaaagccttggccaacatgcatgaaagcctggaatggttggcaagtcgaacaaagtcagctttctccaatctttctacatcccagatgctttctcctgctcaagacagccacacgaacacggatctccccccagtgtcagagcagatcatgcagactctcagtgaacttgccaaatcgttccaggatatggctgaccgctgcttgcttgtcttacatctggaagtgagggttcactgtttccactatcttatccctcttgcaaaggaggggaactatgccattgtggctaatgtggaaagtatggattatgaccccctggtggtcaagctcaacaaagatatcagcgccattgaagaggccatgagcgccagccttcagcagcacaagttccagtatatcttcgaaggcctgggccacctgatctcctgcatcctcattaatggtgcccagtacttcaggcgcatcagtgagtctggcatcaagaaaatgtgtaggaacatttttgttcttcagcagaatttgaccaacatcaccatgtcgcgggaggcagacctggactttgcaaggcagtactacgagatgctttacaacacagctgacgagctcctgaacctggtggtggaccagggtgtgaagtacacggagctggagtacatccacgctctgaccctgctgcaccgcagccagactggggtgggggaactgaccacccagaacacgaggctgcagaggctcaaagagatcatctgcgagcaggctgccatcaagcaagccaccaaggacaagaagataactaccgtttagcagggcgtactgcggttggtgacgggggtcccctcagtcacactcacttttttccttggtatgttattgagtatattctgagcttagttttctctacagtgatactttagtggagaggaggtgtaaggattctttctctctggttttggcttttcatataaatgctaaaggaaggcgacagtacagagtgttttggttgaacaactactttaatgcagtcaaatctaacgggactagggtgggatagggaggaaggtggtatcaaattgttggactctgaaaaacaagtggatggattactaatatttgatttattactcaatatatatataattccagccttggaaagtaggaaagtaggctgctacctaacttttagtcccttccaaaaccatttagtagggttctattacataaacagtagggtttttcctctcctgaccttatccgtttacagttcaatgaaataagtgtatgtgcattgctgtctgtctctattgccaaaatcaaataaatggcttctcagctgctgtttacaacaaacttccctaaccaaaacagaacctctaatttagggctaggaatagaagtcttttgatcccagtccctgggacagttttgtatgctgtatcttgtacacaggttgtaggttggtttattgccattttgttttatttctgctgtataaaaaccaagagccagacaattagacaactatggaggaatgaaaggcaattcaaacatctgcttgattcccgccccgccacccctaatttctgagagaataatggttagagaacattgcatctcacttgaaacatcctttgggggtaaatgattcttaggtgctcacttggtctgagctcagctgaatgcagggaagatgggacagagtgacatttctcctctgtgcggcctccagctgagcctgtctctgaattgttccctcccccgcaatgtgggcacttaccatgttcctggcacactggacctcaccatgtcccccggtcaccagtcctcttgctgcccatggttcataggtcatagaaggcagcaatgcactgactgggccacatcttgaaaactcgtggaaagggaaaggggaggagatgggactttgaccacacacagtgatgcctcacaccctgaaggtgggggattttgtacctgtttgtacaactttggtcttgatgggaaaaatggagaattaaaaagtgttttgagaagcttaaaaaaaaaaaaa

SEQ ID NO: 666 - DNA, 4739 bp, Homo sapiens
ttttttttttttttttttttttttttttcctttcccctccccctccctctccaagccggaggggtcctgaggtgacagcgcctgcaactgaaatttcagcagcgggagaagatggacaagagaaagctcgggcgacggccatcttcatccgaaatcatcacagaaggaaaaaggaaaaagtcatcttctgatttatcggagataagaaagatgttaaatgcaaaaccagaggatgtccatgttcaatcaccactgtccaaattcagaagctcagaacgctggactctccctttgcagtgggaaagaagcctaaggaataaagtcatctctctagaccataaaaataaaaaacatatccgagggtgtcctgttacttccaagtcatcaccagaaaggcaactcaaagttatgttgacgaatgtcctatggacggatttaggacgaaaattcagaaagaccctacctagaaacgatgctaatttatgtgatgccaacaaggtgcaatcagactcattgccttcgacatctgttgacagcctagagacatgtcaaaaattagaacctcttcgccaaagccttaatttatctgaaaggggctcacaacgaagtaagacagtagatgacaattctgcaaagcagactgcgcacaataaagaaaaacgaagaaaggatgatggcatttctcttttaatatctgatactcagcctgaagaccttaacagtggaagtagaggttgtgatcatctcgaacaggaaagcagaaacaaggatgttaaatattctgattcaaaagtggaactcactctgatttccaggaagacaaagagaaggcttagaaataatttacctgattctcaatattgtacttctttggataagtcaacagaacagacaaaaaaacaagaagatgactcaacaatatccactgagtttgaaaagccaagtgaaaactatcatcaggatccaaaactgcctgaagaaattacaactaaacctacaaaaagtgattttactaaactatcctcacttaacagtcaggagttgactttgagtaatgccaccaaaagtgcctctgccggttcaaccactgaaaccgttgagaactctaattccattgatattgtggggatttcttccctggttgagaaggatgagaatgagttgaataccatagaaaagcctattctaagaggacataatgaagggaaccaatcactgatctcagctgaaccaattgttgtttccagtgatgaagaaggacctgttgaacataaaagttcagaaattcttaagttacaatctaagcaagaccgtgagacaactaatgaaaatgagagtacttctgaatcagcattgttagaactaccattgattacatgtgaatctgtacagatgtcatctgaattatgcccatataatcctgtcatggagaacatttccagtattatgcctagtaatgagatggatctacaactggattttatatttacttctgtttatattggtaaaataaaaggagcttctaaaggttgtgttacaatcacaaaaaaatatattaagatcccatttcaagtgtccctgaatgagatttcattgctagtggataccacacatttaaagcggtttgggttatggaaaagtaaggatgataatcacagtaaaaggagtcatgctattcttttcttctgggtctcttcagattatcttcaagagattcagacccaattagaacactctgtattaagccagcaatcaaaatctagtgaattcattttccttgaactacacaatcctgtttcacaaagagaagaattgaagctgaaagatattatgacggaaataagtataatcagtggagaattagagctttcttacccgttgtcttgggttcaggcatttcctttgtttcagaacctctcttcaaaagaaagttcttttattcattattactgtgtttcaacttgttctttccctgctggtgttgctgttgctgaagaaatgaagctgaaatcagtatctcagccctcaaacacagatgcggccaagcctacttacaccttcctgcagaagcaaagtagcggttgctactccctttctattacatctaatccagatgaagaatggcgagaagtcaggcacactggacttgttcagaagttgattgtatatcctccaccacctactaaggggggattaggagtaactaatgaagatctggagtgtttagaagaaggagagtttcttaatgatgtaatcattgatttttaccttaagtatcttatattggagaaggcatcagatgaacttgttgaacgaagtcacatttttagtagctttttctataaatgcttgacaagaaaggaaaataatttaacagaagataatccaaatctttcaatggcacagagaagacataaaagagtaagaacatggactcgtcacataaacatttttaataaagattacatctttgtacctgtaaatgagtcgtctcactggtatctcgcagtcatttgttttccatggttagaagaagctgtgtatgaagattttccacaaactgtatcccagcagtcccaggctcagcagtcccaaaatgacaacaaaacaatagataatgatctacgtactacttcgacactgtctttgagtgcagaggattcccaaagtaccgagtcgaatatgtcagtaccaaagaaaatgtgtaaaaggccatgtattcttatactagactccttgaaagctgcttctgtacaaaacacagttcagaatttacgagagtatttagaggtagagtgggaagttaaactaaaaactcatcgtcaattcagcaaaacaaacatggtggatctatgccctaaagttcctaaacaggacaatagcagtgattgtggagtatatttattgcagtatgtggaaagcttcttcaaggatcctattgttaactttgaacttccaattcatttggagaagtggtttcctcgtcatgtaataaagaccaaacgggaagatattcgagagctcatcttgaaacttcatttacagcaacagaagggcagcagtagctagttaatctgtacaaacatgacacagatgttctctaagattactggaaagcctcttaccagcatttgtgttagccagctcacagagaagaaaataacttgcagtagttttataataagtcattggaacattatttaaaatatgtaggacacattattagaattgttgggatctcatagatggaatgggaatgggggtgatatagataaacttactagatataaattaaaattttataaatatttcatatttttctgagtaaatatgattggattatgcaacagcatatgtaatatgggaatgttttgtagataataaaacttacatgatctgtacttccacgtgactgggtgctgaggggagttaaagcctccctggtgccagccccagtgcttgtcaaatttgctgacaggtcacatcatattgtaattctattctttgcagctcaagcatgcagtatgaatactgtgtattttttaaaaaaataatttagtatcaaggcttcagaaaatgccatttacggcatcccttctgtatgtaacaaaaagacattcataatgttaggaagatgataaaaattcgctcttttaaagtgcagcttattattctcaattgctaaatacgattactctgctttttttttttcatttcttttgatgtcatatgtgagtatcttataatttagttcatttgttcagggtaaaatttgaaacaaaaaattttacctgtgcaaaatagttttttaaaaattatacatgtagctcaacttgaggtactgctatataaatattcactcacattatcacggaatttatgtatagtttctctaatatagaagataaaattggtgtcctcataactttaacaaagaaaaccctcagtcctatttattaatgggtagaattaaatatataattttatagctcagtttacccagtattcatctgcaaagccagattgctctcattgcttttatatttttaaattgtagcttttagagacctatgatcctcatggaacttaattttttattaaatattcaggtaacagttctgaattcatgtgataatggtggcattatatatgattaaacacttcagaactttctaatgttatcaggagtattttgagggagatatgattatattgtattttctcagataagaaaaatgttttttaacaatattattttaatctgttttaagcatctcttagatttacattataactacataaagcagtgaagcaaaggcaaattaagataaagctagaaagtctgaacattttatttcaaaatcatacgaatcggggtcagttaagcctcagtattcttagcttttgttgattttggcactatctttatattattaaatatatttgttgtttggatatttcatataaagatggctataattacatatttcattcccaatttgtgtgtgttggggggtacttttaaaggtgactattgttttgtacatctaattttgggaaagcaagtctataagacatcttgtgatttcttaatgtttttgtttgtatgtttttcaaagatatcactgtcctttatcatgttttgaagattgtttaaaattcattttcctaaattaatgtgcaagtaatgttttgaggatatcagtgttttatattaaacatatttccaattcattaaa

SEQ ID NO: 667 - DNA, 1177 bp, Homo sapiens; identical to SEQ ID NO: 434

SEQ ID NO: 668 - DNA, 3291 bp, Homo sapiens
ggagctttctattggtcctgggtaccgagcatgggcgctgcgtcagtgcgcgctggcgcaaggttggtggaagtcgcgttgtgcagtttcactgttacatgccttgaagtgatgaggaggtttctgttactatatgctacacagcagggacaggcaaaggccatcgcagaagaaatatgtgagcaagctgtggtacatggattttctgcagatcttcactgtattagtgaatccgataagtatgacctaaaaaccgaaacagctcctcttgttgttgtggtttctaccacgggcaccggagacccacccgacacagcccgcaagtttgttaaggaaatacagaaccaaacactgccggttgatttctttgctcacctgcggtatgggttactgggtctcggtgattcagaatacacctacttttgcaatggggggaagataattgataaacgacttcaagagcttggagcccggcatttctatgacactggacatgcagatgactgtgtaggtttagaacttgtggttgagccgtggattgctggactctggccagccctcagaaagcattttaggtcaagcagaggacaagaggagataagtggcgcactcccggtggcatcacctgcatcctcgaggacagaccttgtgaagtcagagctgctacacattgaatctcaagtcgagcttctgagattcgatgattcaggaagaaaggattctgaggttttgaagcaaaatgcagtgaacagcaaccaatccaatgttgtaattgaagactttgagtcctcacttacccgttcggtacccccactctcacaagcctctctgaatattcctggtttacccccagaatatttacaggtacatctgcaggagtctcttggccaggaggaaagccaagtatctgtgacttcagcagatccagtttttcaagtgccaatttcaaaggcagttcaacttactacgaatgatgccataaaaaccactctgctggtagaattggacatttcaaatacagacttttcctatcagcctggagatgccttcagcgtgatctgccctaacagtgattctgaggtacaaagcctactccaaagactgcagcttgaagataaaagagagcactgcgtccttttgaaaataaaggcagacacaaagaagaaaggagctaccttaccccagcatatacctgcgggatgttctctccagttcatttttacctggtgtcttgaaatccgagcaattcctaaaaaggcatttttgcgagcccttgtggactataccagtgacagtgctgaaaagcgcaggctacaggagctgtgcagtaaacaaggggcagccgattatagccgctttgtacgagatgcctgtgcctgcttgttggatctcctcctcgctttcccttcttgccagccaccactcagtctcctgctcgaacatcttcctaaacttcaacccagaccatattcgtgtgcaagctcaagtttatttcacccaggaaagctccattttgtcttcaacattgtggaatttctgtctactgccacaacagaggttctgcggaagggagtatgtacaggctggctggccttgttggttgcttcagttcttcagccaaacatacatgcatcccatgaagacagcgggaaagccctggctcctaagatatccatctctcctcgaacaacaaattctttccacttaccagatgacccctcaatccccatcataatggtgggtccaggaaccggcatagccccgtttattgggttcctacaacatagagagaaactccaagaacaacacccagatggaaattttggagcaatgtggttgttttttggctgcaggcataaggatagggattatctattcagaaaagagctcagacatttccttaagcatgggatcttaactcatctaaaggtttccttctcaagagatgctcctgttggggaggaggaagccccagcaaagtatgtgcaagacaacatccagcttcatggccagcaggtggcgagaatcctcctccaggagaacggccatatttatgtgtgtggagatgcaaagaatatggccaaggatgtacatgatgcccttgtgcaaataataagcaaagaggttggagttgaaaaactagaagcaatgaaaaccctggccactttaaaagaagaaaaacgctaccttcaggatatttggtcataaaaccagaaattaaagaaagaggattaagcttttttgactgaaagtactaaaagtcagctttactagtgccaaacctttaaattttcaaaagaaaattttctttcaacatttcttgaaggacatggagtggagattggatcatttaacaatataacaaaacttcctgatttgattttacgtatcttctatctacgcccttcctgtgcctgtgactctccccaaattgccctgttgccttgagctcttctgagctaaggcagccttcagtccctatcagcgcctcctttacttcccagagaacttcacagagactctgtccttccatgcaaaggcttcctgaaatagggagactgactgagtagctcattcttgtgacttacagtgccaacatttaaaaaagtatgaaaatgatttatttttatatgatgtatacccataaagaatgctcatattaatgtacttaaattacacatgtagagcatatctgttatatgtttatgtaactatcaaatggttatttgttactaaagctatatttctgataaaaaatattttaggataattgcctacagagggatttatttttatgatgctggaaatatgaaatgtattttaaaatttcactctggcatatgatttatctatcaccattacttttttttaagtcacaatttcagaattttgggacatttgcattcaatttacaggtaccagtacgtacatattttaatagaaagatacaacctttttattttcactccttttatttctgctgcttggcacatttttgagttttcccacattatttgtctccatgataccactcaagcagtgtgctggacctaaaatactgactttagttagtatccttggatttttagattcccagtgtctaattccctgttataatttgcacaaacaaaacaaaatgttatgataatctttctccactgttctaatatatattgtatttttatttgatagcttgggatttaaaacatctctgttgaaggcttttgatccttttgagaaataaagatctgaaagaaatggcataatcttaaaaaaaaaaaaaaaaaaaaa

SEQ ID NO: 669 - DNA, 8351 bp, Homo sapiens
ctgccgtcgtggaagcaggatttccgcggttgtgtaacggcctgtcgcaggcgtgcagggacctggactccgcctcgtccccggggctcgggcagccgagccatggcggggaactgtggggcccgcggcgcgctgtcggcgcacacgctgctgttcgacctgccgcccgcgctgctcggagagctctgcgctgttctggacagctgcgacggcgcgctgggctggcgcggcctggcagagagactttcaagcagctggctggatgttcgtcatattgaaaagtatgtagaccaaggtaaaagtggaacaagagaattactttggtcctgggcacagaaaaacaagaccatcggtgaccttttacaggtcctccaggagatgggacatcgtcgagctattcatttaattacaaactatggagcagtgttgagtccttcagagaagagttatcaggaaggtggatttccaaatatattattcaaggaaacagccaatgtcaccgtggataatgttcttattcctgaacataatgaaaaaggaatactgcttaaatcttccatcagctttcaaaatatcatagaaggaactagaaatttccacaaagacttcctaattggagaaggagagatttttgaggtatacagagtggagattcaaaacctaacatatgctgtcaaattatttaaacaggagaaaaaaatgcagtgtaagaagcattggaagaggtttttatctgagcttgaagttttactactgtttcatcacccaaacatactagagttggctgcatattttacagagactgagaagttctgtctgatttatccatacatgagaaatggaacactttttgacagattgcagtgtgtaggtgacacggccccactcccttggcacattcgaatcggtatattaataggaatatccaaagccattcactacctgcacaacgttcaaccatgctcggtcatctgtggcagtatatcaagtgcaaacatccttttggatgatcagtttcaacccaaactaactgattttgccatggcacacttccggtcccacctagaacatcagagttgtaccataaatatgaccagcagcagcagtaaacatctgtggtacatgccagaagagtacatcagacaggggaaactttccattaaaacagatgtctacagctttggaattgtaataatggaagttctaacaggatgtagagtagtgttagatgatccaaaacatatccagctgcgggatctccttagagaattgatggagaagagaggcctggattcatgtctctcatttctagataagaaagtgcctccctgccctcggaatttctctgccaagctcttctgtttggcaggccggtgtgctgcaacgcgggcaaagttaagaccatcaatggatgaagttttaaatactcttgaaagtactcaagccagcttgtattttgctgaagatcctcccacatcactaaagtccttcaggtgtccttctcctctattcctggagaatgtaccaagtattccagtggaagatgatgaaagccagaataacaatttactaccttctgatgaaggcctgaggatagacagaatgactcagaaaactccttttgaatgcagccagtctgaggttatgtttctgagcttggacaaaaagccagagagcaagagaaatgaggaagcttgcaacatgcccagttcttcttgtgaagaaagttggttcccaaagtatatagttccatcccaggacttaaggccctataaggtaaatatagatccttcttcagaagctccagggcattcttgcaggagcaggccagtggagagcagctgttcctccaaattttcctgggatgaatatgaacagtacaaaaaagaataaattctaccagaagataaagaaaaaagcaagtattgcataggcacctgagcataggtatgaccttgggaagacattggctccataagcaatgccaagagaatgatcaatagtgagtttgggtgatgcagataaacaatctggataattccatttcttttttcccaaaccctcaaacagagtgccttaaaaaattgttttatcaggataattgtctcatgaccaaatccacgctcaattagagccattcaaaattccttaagatcatgggttctgacttcagccaaacaaaacaatcaaaacctaccaaaaagggactggattgtaatgtcctctccatcatcctcagtgtgagtcctcagagcctccatctgccaagaacattcagttggattccatcgtttggtttagcttgcttgcacgggttgtaggaaatgtctaatttgtaaatgttaatagatacctttggaaagaatcaccttgttattctgattgacccctcttgttttttggttaatccctgactagcctgcttgtctgaaaatgagccaggttcacccttagctacggcatgctctgggttgaaaggggatttcttcccaagatctatcctaaactcttaggacagtttatcctgtattgactattattacagctttttaaaaacagacttagtgacctattatatcttaaggagactatgtgaaatgtccatcaagtaatttttattcctgagaaaatggctggtcaagggcctaggtcagctttttgtttaatctacacctttcaactctgggccttcattcctgctgtttcttggatctccctcttttgaaatcctaccaatcatcagagctctacaaaacagccacctcctggaagcttccctaatctctacaaccagaagtactccctttatcagtatttccacagcaatttctttgtatttctattttatatttatcactttctgaattatatcaaagctgcttgtcttatctctttttttttttgagacggagtctcgctctgtcatccaggctggagtgcagtggcacaatctcggctcaccgcaaggtctgcctcccgggttcacgccattctcctgcctcagcctcccgagtaaaggtgggactacaggcgcccgccactacgcccggctaattttttgtatttttagtagagacggggtttcaccatgttaggcaggatggtctcgatctcctgacctcatgatccgcctgcctggcctcccaaagtgctgggattacaggcgtgagccaccgcgcccagccttcatctcttttactaggttgtaaactccctatattagttttctattgtttttgtaacacattatcacaaatttagtgacttaaagtaacataaattaattattttgcagttctggaggtcagaattccttagcattctttctggaggctgttggggagaactcactgccttgccttttccagcttctagaggccacctgccttctttggctcatggcctcttcctccgtcttcaaagccagcaacgtgacatttcagatctccctctctctgtctgtctcaccgcatctcttcactaccctcttcctctcattctggcccttctgcatgtcttttataaagacctttgtgatttcactgggcccactcatataagccaggaaaatctctgtgtctcagatccttaatttaattacacctgcaaagtccgttttctcgtgtaaagtaacatattcacaggtttctggaattgggacgtggacatcttcgggggaccattactctgtctgtcatactccctgagtgtgtaagggccatctcttcagagcctaatgtgtcatcctacacagagcaggtgtttccttataaattaagttgaattaaattacccctatgaagccacataatcaataattcagctataataaacattgccgaataaattaacaaagggaggataatgactccttatgatgatggatagaaacactgaagaaaaccattttcagaggatttactgaattttcctctccaaggagcttgtaatagaagggtaaacctctagtttcttgtccagcagaggaataggctcatgtcttttgttttattttatttttttggtgagtcagtatggttgggttaatcatattcacattagattccatgttgaagaacaactaatcaaagaagaaaatcatcaggaatcagggtgagattaacagaccaaggtcagaaacatggagttacaattttccaaaaaagcacgaagtgagattaaaaccacagtaagtcttagtctgactgacaggctttatacaggccctcggtaagcagttgggagaacccatgcccaccactgctctgtacggtatctggctgctcagagctctctgattcacaaaagagatcatcaagaattgactctgtgttaaactgtttttcacttagaatatggacccccaccaatacattcaatgaagggtcattaaggaagctctgattaacaccaggcccatgcagttactccgcacatataatctgtgggtattatgttgatttgaacttgcttagctgacttaaagcagggtttctcaaactgtagtatgcatcagaatgacttggaaagctggttaaaaacgcagattgctgggtccacccagcttctgatgcaataggtctggggttagaaattttgctttctaatgagttcccaggtgatgctgatgccaatgatgtgaagcccgctcttcacatccgtgaaaatcgctgccttaaggtgctcttaaattgttatagattggtagatcctacctttccatcactggtatgttttttgagaaaaggatcctttcttttcattctgttatattcatcctattacataggatgttggttagcacagagtgggagctctagaaagattgttgaccaatcatcttattgactagaccatctttctagagtataactattttggacacctcaaagatgaagtcagataagctggcagtgacctgattaacgttgtggtaagcagatgccactgtggctgggaagtaccaaatcttctgttgagtgattcagtcttcctgactagatttgccttctagtgggtgtattaataagcgttagttgatatgaattaaatgttgcaactttctatgggtaataagaggatacctttatagtttcatgatgtggagaccaagatacataagaaagcaagaatgagtctccgggtgttccctctgatcagcaaacatgaattcataatttcatttactctcatttttgtaatgcactctgagcaatcctccaggcagatcctatttactaagcttcaggcttttgtcccattttataatgcccaaacacatggagaaaacattttgttgtttttaaaaacaggtatgggatttctgatataatcaattttattgacttcttgggagttgtaatgatctgtgactcactgcataatattgtagttttatagggtggcacatcaccctgtgtaaaacaactttaatgacctgaggactgatgagtacaggaagtgaggtttatcatgagtagcatttattaagcatctgctagaatcaaagcactgcattagctactaaggtacaaagtaagacacagtttaataaggaagacagggcatctacccaagtcaacagttcagtgacatctgttatttgaaccacacaccaatgcaaccgaagtaaatgctgaaagggtgagaagaaggaatagattactatgcatttttgagaggatgaagaaggcttcttggagaaggtttctgaaaagagatacggaattaagagaaatagaaaagagcactgacgaagcactcaggatggctattcaaggaattggggatccacagcagctgtgcacaaccatccctaatgccagaaaaatggggtaagggtgaagggaactgggtctagagctttgcatgtttttttctggttaacccttagagtcaccctgaaggtgtggatcccatcttataataaggtgaggacactgagtcaggaaactaacttgctaaaatcaagtcctcccagtcctcccatcaggtccttccagatctggaggagccaggatttgaactcacatttgtctgacttcaaaatccatgctttttcttgtgttccaaattgcacaatggagtcactgccagttcaagctcctatgaaaagggatggatgtgaaaagtcatttgttgattccacagatttttagtaggtaccatgtctcctgcctttatcactatcctactcctctgctacaacttctctgctacaggcacccactgcagttacttgatatgagttaaatgaatccatccatccaaacttccattcattgaataaatacttagcaatggcttcctttgtatcaggcactattctaggagctggggctacagtgcagatggaaaccagcaaagctcactgccctcatggagcttatatgtaagtgaataaatctcagggtggttctcctgtcataggtcctggctcctctgccagctcttccaaatgggttcagagaggttttctccttgtcctgttgtgtaactgataatcccatggtggacctcactttgctattcatatgcactaagtagtttatggtgtgctttgtggctggcaattgtgacagattctattcttctattggtatgtggtttctttggggcatttgtttggatactgatggcatcttccgggggtctgaggcacctacacaaacctcaggtcactatcacgtgatactggagttgcctgttaaattatatttcttcttccacaaaactgcaggttccctgagggaaaggtctatgtcctgctcatttttggatccctaatggctggcacagtacctggtgcataatatggttcaacaaatatttgtaaaatgaatgaatcaaatagtccttcaaagcatcttcagaatcaagattgtcatctagattgcacccgaagtttatctttctagtattcagaatataatcaatcattgcttaaattattccatttcatcattcttgaataaaagctactaattttaaatactaatatctgagatatcttcgaaaagaagattagtcgttgtatgtgttgcttataaattttctctatggtggaaaatattcccaaaccatgtctaagcaatgaaaaaccagtgttctggcaggaaataaactgatgtttgttgtgttttgtatctgtcttcccgttccaaatcatttatatatacttgatggtctgtgggcttgacttgcaagtattttcctgggagacatttttattcaaaagacctgtattgcctgccaaaccttcatttaagagactcattatggatgtcatctgcatcattgcaaacttttctggtcgtctctataaatagcaagataatatttacagagttttacattggctcttgaattttaaaatattcttatagacaaacattaattggaatggggggtaaggaggtaggaatggcttacttgcggaaatgcaggctcattgttgtgtctagtaggtgctaggtgcattcacacatctcttaagctttaaacaacctattgagccggtttccatttccttgatctattagatttaaaaaaatgaagcataaaggagttggctcttgccctaagtcatactactgatggaatgagaatacaaaccaaaaacactttattcaagtccaggaaatatctgccttgaaaaagaataacttaaaaattaaaagtgtcctctatttgaacatgaaaacagctaataaagatgtgttattttattttattattattaattttgtcctcccatattggcaaagataaagcaattgacaaaaatggaattcttgttcaatactggcaggagtgaaaattggtagaacctttctagaaggcaatttggcaacatgtatgaaaacctaaatgttgatacacctttacccagcagtttgtttaggaatttatcctaatgaataaaagttgtccaagtcttcaaacatgagcccaaaggtatatttcatgatgtttatgatattaaaacattggaaacaactgaaacatccttcagtaaaagatggattaaataaattccatgcagttgtcatttaaaaatatttagatatatgtttattgctatggatatatgttcccaaaatattattgaatcaaaaagtagactacaggatatatgttgaatatgagctcatttataacattgaatattttaagataatgtatgtttcatagagagatcttcaccaaatgttaaggatttttttttctgggctgtggtatttgggtgatctttacattcttcagactcatgtgtgtttgaaactttttataatgaacatatatcatttttattagaaaagaataaagtttttgaaaaaaaaaaaaaaaaa

SEQ ID NO: 670 - skipped

SEQ ID NO: 671 - DNA, 1514 bp, Homo sapiens
tcggacgaggcccaaacggtgcacggaagagtgaggtgactggcatgtgtgggggcaacacgattctcctccctggggagcagagcagaggcaacccatcccccactcccacccccacactcccctaagttccaatccatttccacctctgtttactgtccaaagtcccgggcactggagatgccacgtttggcgtgcttggacacacagacacgcagacacagagacaccggggcccagggccctcctatggaccctgcccgctcccctcccattgtccacggctgtccgcccacccccattctccaagcttcagccccctccttagttcggcatctgcacagcactgaagaacctgggaatcagaccctgagaccctgagcaatcccaggtccagcgccagccctatcatgaccaaggagtatcaagaccttcagcatctggacaatgaggagagtgaccaccatcagctcagaaaagggccacctcctccccagcccctcctgcagcgtctctgctccggacctcgcctcctcctgctctccctgggcctcagcctcctgctgcttgtggttgtctgtgtgatcggatcccaaaactcccagctgcaggaggagctgcggggcctgagagagacgttcagcaacttcacagcgagcacggaggcccaggtcaagggcttgagcacccagggaggcaatgtgggaagaaagatgaagtcgctagagtcccagctggagaaacagcagaaggacctgagtgaagatcactccagcctgctgctccacgtgaagcagttcgtgtctgacctgcggagcctgagctgtcagatggcggcgctccagggcaatggctcagaaaggacctgctgcccggtcaactgggtggagcacgagcgcagctgctactggttctctcgctccgggaaggcctgggctgacgccgacaactactgccggctggaggacgcgcacctggtggtggtcacgtcctgggaggagcagaaatttgtccagcaccacataggccctgtgaacacctggatgggcctccacgaccaaaacgggccctggaagtgggtggacgggacggactacgagacgggcttcaagaactggaggccggagcagccggacgactggtacggccacgggctcggaggaggcgaggactgtgcccacttcaccgacgacggccgctggaacgacgacgtctgccagaggccctaccgctgggtctgcgagacagagctggacaaggccagccaggagccacctctcctttaatttatttcttcaatgcctcgacctgccgcaggggtccgggattgggaatccgcccatctgggggcctcttctgctttctcgggaattttcatctaggattttaagggaaggggaaggatagggtgatgttccgaaggtgaggagcttgaaacccgtggcgctttctgcagtttgcaggttatcattgtgaactttttttttttaagagtaaaaagaaatatacctaaa

SEQ ID NO: 672 - DNA, 3348 bp, Homo sapiens
aggcgcaccaggcgcggtccggaggccgagggcgaccacagcagcctccgcctcctgctgctccggactattctgcgctgggctagtcggcggtgacccggactgcgcccggcagtggcttcgcgggcgacgcgtcgccatgggctctcgctggagcagcgaagaggagaggcagccgctgctggggcccgggctcgggcctgggctgggggcctcctggagaagccgggaggcggcggcggcggcgctgcccgcggcggtcccgggtcccgggcgggtatacgggcgccgctggctggtgctgctgctcttctcgctgctggcgttcgttcagggcctggtctggaacacctggggtcccatccagaactcggcgcgccaggcctacggcttctccagctgggacatcgcgctgctcgtgctgtgggggcccatcggcttcctgccctgcttcgcgttcatgtggctcctggacaagagaggtctccggataactgtgctcctgacatccttccttatggttttgggaactggtctaagatgcatacctatatcagacttaatccttaaaagaagattaattcatggaggacagatgttaaatggattggcaggtccaactgtaatgaatgcagcaccatttctctctacgacgtggttttctgcagatgaaagggccacagccacagctattgcatcaatgctcagttatcttgggggagcatgtgcatttttagttggaccacttgttgttccagctcccaatgggacatcacctcttcttgctgcagagagcagcagggcgcatattaaagatcgcatagaggctgtgttatatgcagaatttggagttgtctgcttaatattttctgcaacactagcttatttcccaccccgacctcctcttcctcccagtgttgctgcagctagccagcggctgagttatcggagaagcgtttgtagattattaagcaattttcgatttttgatgattgctttagcatatgccataccacttggtgtatttgctggctggtctggagttctggacttaattttaacaccagcgcatgtcagccaagtagatgctggctggattggattttggtccatagttggaggctgtgttgttggaatagctatggcaaggtttgcagattttatcaggggtatgctgaaactaattcttctcctcctgttttcgggagctacactgtcatccacgtggttcaccctgacctgtttgaacagcatcacacacctacctttaaccacagtgacattgtatgcctcctgtattctcctgggagtgttcttgaatagcagcgtgcctatattttttgagctttttgtggaaactgtctacccagttccagaaggaattacttgtggagttgtcacttttttaagtaatatgtttatgggagtacttttattttttctcacattttatcatacagagttgtcttggttcaactggtgccttcccgggtcgtgtttgctcagtctcctcctcattctgtgcttcagggaatcctatgacagactctatcttgatgtggttgtctccgtttaatagcacagacttgaaggagtttaaaaggaggctggaaatcaatactgcacactgcacatttgctcagaattgcacatctaacaggaaaagagggagaagaaagaaacttcattcagaggttttgttaggttacagattatcacattaatttaattactactaggtaataataatgggagacttgagtgataataggggattttaaaactctacagatggcatacctgtgcctgcttctggggttggaagtgtgacttcttacacataaagcactacctaagtaattctctctctgttttgtgccagtgctaaactactgattacttgtaattatgaaaagaaataaagggtgtctatcatatgaagataacgccttccctaagtcacatatcagaataggaagatatgccactaacttctaaagaagttcaaaccctgtatccaattttaatgataaaatagccaagaggtatatcgatgatggaaattagccacatgtacactacattttttctaataaagccatttcttatatgactccttattttaatcaggtcagaagcccttggccatctttactatggtgatcaggtgctttccagtgacttctgagcataggcactgtgtctccatctcaacttatccttgtttctgtgaaatacaatttcatctactaggcccttaaataattatgtgagggtgtctaaatgtttaatatgattacattaaatattgtatgaaaaaatgtaattccattaggatctagcactttgttacaagtgaaatgacaagtcacatggacatactgtgtcttctgcctgtatatggtggcatgagatgtaatgtccagagccaacaattatttaccagggttagattttattcagtgacccttgtttaaaaataataatttatcacattgaaactttcagctctgtcgaatgatttctgaattacatcctgtgtttcagcttaggttgtaaaatactccgttctctgtggagtcagcatatttgagagggcagcgttttgccagtacctatcttctttctacagaagatagctttttaagaaataagagttccacattgagtggctgtcagacacagatttcactgtgacgtaaaatacactgcagtgagaatatggtatcaccactattcatatttacatcattcccctcacacagaaaaaccaacccttttcccaaaaagtcaagaatactgctatacctttattattctcagcttcctccagcccttcttgtttttcctcacttgaaattgaaccttcattgtcagctaagtatatatacttttgtgttttcctggacagagtgcaagtggctcttatcagccaaggtggtgaaggttcaggaaagctgggcagcactgggccctgctcctctctgcacctgtgtgcgccatgacacacccacatgcagattcccaagtctgtctcccctcccccttagcaagtacaaggctgtgcattaactcacctcggtcctagaggagtatcctagtactgcttggcaacttctaagaccctaacttgtgaaactagggaagtaagaaaccgttcaaatttaacatctgtcttcagtcatctttaaatcgtctctctttataaacactctgctcacttagcagaaggactgaaggaactaaggaacttgctaaagagaagaagaaaacaaaagctagacttagttccagttaattctgttattcttctgaaataaaaatgaaataaaaggaaaaaaaaaaaaa

SEQ ID NO: 673 - DNA, 1832 bp, Homo sapiens
gatatcctcgttgctaggagactagacgcgtcttacagtgggagagctcagcctcactgatagccggggatctctcctgttcgagggctgagatctccggtcccacaaccgcccacaaccaggggcacttctggaagtcccctttctagggacatttttcttctaagctctgtaacgcgggccgaggcagaccgaggcttctttcccggatccaatcccctgcccccatgcctaagaaagaaaaaatggccaagacgcccctgtccgatgagaagcagctgcttctgtttcagcagaagttgctggcagaggaggagatggccaaaaagaaggagaggctcctcagccagttcttgaaggacaagctggccaaggaggaacacaacagtgctctgaaccttaataagattaacacacagtggagaactgtccttcgggaagtcaagaccagagaacttcataaggacattgagatcctcagccaaacatttgaacgagtggtggactgtaaggacaatgtcatcaagtctttagctaaagacctgtccgaagccgaggagcagtacgcccatgccctgcgcagccacttgcacaatgttgaccagctcttggccctgcagaggcaccggctcagtctcctggaggaaagttacaacatggagctggaagccctaaccaaggagtttgagacagaaaggaagacaattattgaccaacatgagaaagagattcactatctgcaagatatcttcatggccatggagcagaactatatagattctgagtatgaaagcaagctggagttccagagcatgtggaatgatctcaaaaacatgaatttagaagagaagcactttctaagactgcacctggagaacagagtagaagatctgtggagaaagttccaggatgtactcaagaattacactgatgccacagaggatcgaaaggctgcctttgagaccctgcaggtgaaggatgagaagagctccaaagagattgaagtacagatgaaaaaaatacagaaactacaggatgccataactatttcaaaaggcaagatcatgatacacagccgtgagagtgaagatgagaaccggtatatccgtaatgacaaggaattggtccttgtacaactgcgaaaacttaaggcccaaagaactcaggcccgggcagcatcccagaagaacttagtcagactcaccctggaaagtaatgccaccctcaaggccctgagaaagattgttgataagggtgaaaagatccttaaacttgctgaaatatgtaggaaatttgaaaccgaagaagaaaaagtgctgcctttttattcatcagtattgactcctaaggagcaggaggggattcagaagaataatctagaagagcttactgaggagctcaccaaggtgatggtggactacataggaatggagaatttctggaaaaggtacaacaaagtgaaactggagcaactgagcctccaacatagacgagcccagctgctagatatcaatgggaagctgcgggagatgctgaagcagtacttggatggcatctcagtgagtgacgaagtgctgagccagctcaacccactctttatagtcaactatcaaagcaacttactccagcccttgtccatacgtatagcccatccaggtgataaacaacatccaaccacttaaaatataattgaagcagcccagatgatcttccacaacctgtgatctaaggaaaaaaatctttcaactcctagagatttttttttttttttgagaaatgtagggatgttgctattaaaaatttccatggagtttaaaaaaaaaaaaaaaaaa

SEQ ID NO: 674 - DNA, 7555 bp, Homo sapiens
cgggcgccggggagagcgggcggccgggcggcaggcgggcgagcagcgatcgggcggccgagcgagcgagcaacgccggcgcagcgcggtgaccccagccccagccggcgcggagcaggagccggagccgagcggatctcggcgccctcgctgcgctcctcccggcccgagcctgccctacccggcggtggcggcggcgcgtcctccagcggcggcagcggcgctcgcagcgcccggactcacggcagctgtgttctgatttcgtactactgctggggctgccacctcctcctccagacgctctcagcagacttgagtcctggtccttctgcagaggcctgagcaggaggaagaggaggaggcccgttggcgtcggaccaatgctgcaaggggtgtgaggagaggagccgctgtttttcactgagctgccataccccgaaagcaggatggagctggagtgaggtggaggggccgcaagctgctgaccggcgtgtggaacactggtggtttgcagatcactgaggctggacaacgttcatggctctcgggtagaacctagtgaaacggccagaatgaattctatggacaggcacatccagcagaccaatgaccgactgcagtgcatcaagcagcacttacagaatcctgccaacttccacaatgccgccacggagctgctggactggtgcggagacccacgggccttccagcggcccttcgagcagagcctgatgggctgtttgacggtggtcagtcgggtggcagcccagcaaggctttgacctggacctcggctacagactgctggctgtgtgtgctgcaaaccgagacaagttcaccccgaagtctgccgccttgttgtcctcctggtgcgaagagctcggccgcctgctgctgctccgacatcagaagagccgccagagcgatccccctgggaaactccccatgcagccccctctcagctccatgagctccatgaaacccactctgtcgcacagtgatgggtcgttcccctatgactctgtcccttggcagcagaacaccaaccagcctcccggctccctttccgtggtcaccacggtttggggagtaaccaacacatcccagagccaggtccttgggaaccctatggccaatgccaacaaccccatgaatccaggcggcaaccccatggcgtcgggcatgaccaccagcaacccaggcctcaactccccacagtttgcggggcagcagcagcagttctcagccaaggctggccccgctcagccctacatccagcagagcatgtatggccggcccaactaccccggcagcgggggctttggggccagttaccctgggggtcctaacgcccccgcaggcatgggcatccctccgcacaccaggccgcctgctgacttcactcagcccgcggcagccgctgcagcagcggcagtggcagcagcagcagccacagctacagccacagccacggccactgtggcagccctgcaggagacacagaacaaggatataaaccagtatggaccgatgggtcccacccaggcgtataacagccaattcatgaaccagcccgggccgcgggggcctgcctccatggggggcagcatgaaccccgcgagcatggcggctggcatgacgccctcggggatgagcggccctcccatgggcatgaaccagccccggccgcccggcatcagcccctttggcacacacgggcagcggatgccccagcagacctacccgggcccccggccccagtcccttcctattcagaacataaagaggccataccctggagagcccaactatggaaaccagcaatatggaccaaacagccagttccccacccagccaggccagtacccagcccccaaccccccgaggccactcacctcccccaactacccaggacagaggatgcccagccagccgagctccgggcagtacccgccccccacggtcaacatggggcagtattacaagccagaacagtttaatggacaaaataacacgttctcgggaagcagctacagtaactacagccaagggaatgtcaacaggcctcccaggccggttcctgtggcaaattacccccactcacctgttccagggaaccccacaccccccatgacccctgggagcagcatccctccatacctgtcccccagccaagacgtcaaaccacccttcccgcctgacatcaagccaaatatgagcgctctgccaccacccccagccaaccacaatgacgagctgcggctcacattccctgtgcgggatggcgtggtgctggagcccttccgcctggagcacaacctggcggtcagcaaccatgtgttccacctgcggcccacggtccaccagacgctgatgtggaggtctgacctggagctgcagttcaagtgctaccaccacgaggaccggcagatgaacaccaactggcccgcctcggtgcaggtcagcgtgaacgccacgcccctcaccattgagcgcggcgacaacaagacctcccacaagcccctgcacctgaagcacgtgtgccagccgggccgcaacaccatccagatcaccgtcacggcctgctgctgctcccacctcttcgtgctgcagctggtacaccggccctccgtccgctctgtgctgcaaggactcctcaagaagcgcctcctgcccgcagagcactgtatcacgaaaatcaagcggaatttcagcagcgtggctgcctcctcgggcaacacgaccctcaacggggaggatggggtggagcagacggccatcaaggtgtctctgaagtgccccatcacattccggcgcatccagctgcctgctcgaggacacgattgcaagcatgtgcagtgctttgatctggagtcatacctgcagctgaattgcgagagagggacctggaggtgtcctgtgtgcaataaaaccgctctgctggagggcctggaggtggatcagtacatgtggggaatcctgaatgccatccaacactccgagtttgaagaggtcaccatcgatcccacgtgcagctggcggccggtgcccatcaagtcggacttacacatcaaggacgaccctgatggcatcccctccaagcggttcaagaccatgagtcccagccagatgatcatgcccaatgtcatggagatgatcgcagccctgggccccggcccgtccccctatcccctcccgcctcccccagggggcaccaactccaacgactacagcagccaaggcaacaactaccaaggccatggcaactttgacttcccccacgggaaccctggagggacatccatgaatgacttcatgcacgggcccccccagctctcccaccccccggacatgcccaacaacatggccgccctcgagaaacccctcagccaccccatgcaggaaactatgccacacgctggcagctctgaccagccccacccctccatacaacaaggtttgcacgtaccacaccccagcagccagtcagggcctccattacatcacagtggggctcctcctcctcctccttcccagcctccccggcagccgccacaggccgctcccagcagccatccacacagcgacctgacctttaacccctcctcagccttagagggtcaggccggagcgcagggagcgtccgacatgccggagccttcgctggatctccttcccgaactcacaaatcctgacgagctcctgtcttatctggacccccccgacctgccgagcaatagtaacgatgacctcctgtctctatttgagaacaactgagggccacccggtcggggccatccctccacactctgcatcctaccccacctacccaacacacttttccacctgggagcctgtgccctcagaccgccccgcaccagagccacgggctgtggggcggggagccctcccccgctgcagccctctcagaacagaggggtagggagggtgcaccagtgcaccaggaaggctgtgtgggtctggagcccacgtcccacctccacacccttggcttgggcccatgcccagcgcaggcctgaagaccaccctcccgagaggaaccagcccggtaagagggcacacgctgatgcggcttcccggtccctccgcgtgtgccgattccagatgaccttccagtgtccccaaggttcttccatcttctagactgtaaccctgcctccctgcttcctggtccagagcctccctccagtgactgtggagcctgagaaggcccccgggccccagcatgggccccgagccttggaggagcactggcagttggtggcagtgagaccagcccacccaccaccacccaccacagaaaagcacaaacctctgggaaagacaacgtctctcgggggccaggggtcatcggtttgacccctgacctataagccaagataccccataaacacactcagaaagcagagaaaaaggacaagagtctgtgtttgagagggggtctgccattcctgcttggggactggtggggaagagggccaggacatcttctgagccaggacgtccctgaggctccacctccaagctcagacagggcccaggcttggggaacagagagagcaggtgtacacccaaccaaagtgattgtgcccttggttggggggcgcgggcatataacctgtcagaagcaaacaggagcggcaacttctaactttgctccaagccactctctttttaaacagcaacaatttaaagctatgaagtcacctggagaaaaggaacgttgctcttggacagcaagcaaaccatttctctccgtctgttctgtttttctcctagtccctctcctgccacctctccaagacttccgtgggacacccacttccctctgtcctagttctctttgtccaatcagatggcaagggcagtgcgtggaaaggccggggaggtgcagaaaccagagcccagggcaatggtgtctgtccagcccctccctctgtccctgtgctccaagctgcccccggctgcagcccaggccatggacatgtgcaccagtatgtacctgcaggcatgggggggaggggggcgtgtttctgggcctgccccagacactgcccttggctgccagcctaccctgcctgcactcctccaccatcacaatctcacccaaactcctgctcactcaagcaaaagcagcctctggccttccctccaccgctttgctccatctggcttaccactctccagggcctcctggggagcctgtcctgtgttcactttgtttcaggctggtctgtgccccgtgagccacatggcctagggtgatgccaggttgtcccgtcactggggtcccatctgtaaattctttgcgcccttcccggctgctgcctggggccctttcctgctctcccgtccgctgtgggtggtccccagctctcctctgtgggttttaccggaaaggtggccccagctgttgacttccagtcactgtcccagacggcacaaggttttctgtaggaaagctgccattgccccggccccttttcttcctttgtcccgttgtcgaggttttttcaaatagcgtgttgttcagtatgcaaatcaattattttaagaatcgcttttgtaaatatctttgtgaatattttagtatcgtctttgataatattcaacattttcatgacctggttatagcctttgctggtgtttttaaaatacctggactcaatgacaaagaccgagtcttctttttttttaaacaaaaacaaaaaaagcaaccagggctatttgtacagttgaaggggtgaacagaatgggcggctgtgctgggagttggaagaccgggcagcccgctatttagagccatccctcagtcagctggcagggacaagccaacgccaggtagcatgtggccacccttgcccagtgtctgtggcctggcaagtggccacgccctgtgtcagaccatctgggaattaagctccagacagacttacagatgccttccttaggagttcttgcttcttgcgttgatactttgccccagaaaggcctgggattcattctggttcttatcagggtgtgtccacactctgctcacaggtggatccacggctttccagtgcggagagtcgagatgctccctgcagcccaggccccgggcacctcctgcaaccatctctgggctcagcacctgaggcgggtttcctgggtcccctctccagcaagcctccaccagcaagctcggcccagagcttcccttccggctggctctgaaccgtgcgtggtgcctacagcctgcagtctggagacaagctcttccggagtgctctgggagccaggccagggtgtgagggaggtgcagaggcatccggggcgggagcaagccccaggttgtgacaggtgcaggtagacaacgcccataaacagagatggtcctgaactctggagagatccttccctgatcctttcggacgactacttggagccataagtaacctcagcaaaaacgaggcctctgcaagccacttttccatgccaagcatccacccggcccacaggcatgtttctgccgccactccgcaagatggacagggagccagcaggcaggcgggaagggccaagtacaggcaatcacccccatcttcttggtttgaagctttatccatgtatcatgttccgtgtagccattttattttttaagaaactgctaatactttctccctaatggaagccctgatcccccagagagctacaggtctgctcccgacgggcctcgggcctgacccgtccacacagggccgtgtcaacagcagcgactcaagggacgtgtgtacatatgtaaatgagaaatagagacgtgtcaacagatgcattcatttctcttggaatgtgtattgtttttattttgcgaaacaaaacaaaacaaaaaaaaaagcttggaactccatcacgtggaaaaactagatcctgttggttatagcatttgtgagttctccacgtctgtctctctcgctcatgtaatatactctgaccctgagtggaaaggggtttttgttctgtttttattttacctacatgtactatttagcttcagtgtactagtcctgccacctgtgtatttttagggtgctatggaaataatgaaaagaaacggggatttcagaagaaaattgtaaccaaattcatactttgtataatttttgatatcatgatcacaggtgattcacacgtacacacataaacacacccaccagtgcagcctgaagtaactcccacagaaaccatcatcgtctttgtacatcgtatgtacaatgcaatcatttcatactttaaactggtcaaaaaactaattgtgatttctagtcttgcaaagctgtatgtagttagatgatgtgacaacctctaatatttatctaataaatatgtattcagatgaaacctgtatattaggtgttcatgtggttattttgtatttaaagatcaaattatttgactattgctagacatttctatactctgttgtaacactgaggtatctcatttgcccatgttaatttttttctaaataaattgacaaaaacaaaggtttggcg

SEQ ID NO: 675 - DNA, 1271 bp, Homo sapiens
agacttcggcggcgcagcaatggccagagcgtgagtgccgctgacagaagtcaagagaatcggctgggacggggttggggcgacaacgggccgggggggacccgacaggccagagccccttggggaggagcggcggctggaggcgcgaggctcctccggatgcccggagagccgcttgcgacttaactcccgcctctttcccagatgccgcgtcactgctccgccgccggctgctgcacacgggacacgcgcgagacgcgcaaccgcggcatctccttccacagacttcccaagaaggacaacccgaggcgaggcttgtggctggccaactgccagcggctggaccccagcggccagggcctgtgggacccggcatccgagtacatctacttctgctccaaacactttgaggaggactgctttgagctggtgggaatcagtggatatcacaggctaaaggagggggcagtccccaccatatttgagtctttctccaagttgcgccggacaaccaagaccaaaggacacagttacccacctggccccgctgaagtcagccggctcagacgatgcaggaagcgctgctccgagggccgagggcccacaactccattttctccacctccacctgctgatgtcacctgctttcctgtggaagaggcctcagcacctgccactttgccggcctccccagctgggaggctggagcctggccttagcagccccttttcagacctactgggccccttgggtgcccaggcagatgaagcaggctgcagcgcccagccttcaccagagcggcagccctcccctctcgaaccacggccagtctccccctcagcgtatatgctgcgcctgcccccacccgccggagcctacatccagaatgaacacagctaccaggtgggcagcgccttactctggaagcggcgagccgaggcagcccttgatgcccttgacaaggcccagcgccagctgcaggcctgcaagcggcgggagcagcggctgcggttgagactgaccaagctgcagcaggagcgggcacgggagaagcgggcacaggcagatgcccgccagactctgaaggagcatgtgcaggactttgccatgcagctgagcagcagcatggcctgaggggctgctggactgaccgaggggctgcccagcaagactgcagcctcttcctccctcagatcccaccagacccaccaggtgccataataaagcggattctagacggagaaaaaaaaaaaaaaaaaaaaaaaaaaaaa

SEQ ID NO: 676 - DNA, 1602 bp, Homo sapiens
cttgtgggtggaaacgcgctggctgactggggtcggcgtttagttcagcgcagcgactcggggacctggagctgacgcctagacacttgtattagctttaatagaagagaaatggaggagccatagaatattaaggatgaattcaggaaggcctgagaccatggaaaacttgcctgctctctacactattttccaaggagaggttgctatggtgacagactatggggcctttatcaaaatcccaggctgtcggaagcaaggtctggtccatcgaactcatatgtcatcctgtcgggtggataagccctctgagatagtagatgttggagataaagtgtgggtgaagcttattggccgagagatgaaaaatgatagaataaaagtatccctctccatgaaggttgtcaatcaagggactgggaaagaccttgatcccaacaatgttatcattgagcaagaagagaggcggaggcgatccttccaggattacactgggcagaagatcacccttgaggctgtcttgaacactacctgcaagaagtgtggctgtaaaggccactttgcaaaagattgtttcatgcaaccaggtgggactaaatactctctgatacctgatgaggaagaggaaaaggaagaggcaaagtcagcagagtttgagaagcctgaccctacaaggaatccttctagaaaaagaaagaaggagaagaagaaaaagaaacatagagataggaagtcatctgactctgacagctcagactctgagagtgatacaggcaagagggcaaggcacacatcaaaagacagcaaggcagcaaagaagaagaaaaagaagaagaagcacaagaagaagcacaaggagtgagagtataaagagtgtagggggtggttgagagtaagaaaccaggagccttgtgccttgagactcctggaaagactcaatagtgagaatatagcctcccaccccattaacttcgctcccatgggagatggcttcccctcatgcaacaggcaggtttgggagttagaggtcaaaagcagctgcctgaatgagttgttgtttccttatcactcctggtccctttgcaagtgaaccctgcagctcacccattcattcacccaacttccttcattcagcaggaggccctattaccctctccagctgccactgccagagctggattcctgtaaaggagtccaggctagagccacagagactgttgtggaggtgagttcggctgtagttagagtgattggacccttcctattggtctgtcctgggccaactggtgggtgatctctgctgcatccaacatgggagcagagactggcagcaggaggggggaacatggtgagaagtggtgctcacttttcccattcctcctaacatagttctactatgctagaagtggcatccagcggccacagctagaaaacagtctgcagtgtgacttaacttgtgtattgcattccagcagaccactgaaccagacagcgaagccaagatcattgttctactttgtatttactactgtgtgaatcagttgattctacttcaggtccttgcttaaattcctgtcactaaatggaaatgtgtttggtttt

SEQ ID NO: 677 - DNA, 826 bp, Homo sapiens
tcatgtgacaaagcgcaggacccctcactgccccaactgcttgctgttctctctttcttgggctctaaggacccaggagtctgggtgcacagcctccttctctctgagattcaagagtctgatcagcagcctcttcctcctccaggacccagaagccctgagcttatccccatggagctctgccggtccctggccctgctggggggctccctgggcctgatgttctgcctgattgctttgagcaccgatttctggtttgaggctgtgggtcccacccactcagctcactcgggcctctggccaacagggcatggggacatcatatcaggctacatccacgtgacgcagaccttcagcattatggctgttctgtgggccctggtgtccgtgagcttcctggtcctgtcctgcttcccctcactgttccccccaggccacggcccgcttgtctcaaccaccgcagcctttgctgcagccatctccatggtggtggccatggcggtgtacaccagcgagcggtgggaccagcctccacacccccagatccagaccttcttctcctggtccttctacctgggctgggtctcagctatcctcttgctctgtacaggtgccctgagcctgggtgctcactgtggcggtccccgtcctggctatgaaaccttgtgagcagaaggcaagagcggcaagatgagttttgagcgttgtattccaaaggcctcatctggagcctcgggaaagtctggtcccacatctgcccgcccttccagcccttccccagcccctcctcttgtttcttcattcattcaacaaaatttggctggaa

SEQ ID NO: 678 - DNA, 2499 bp, Homo sapiens
agggaaggcagcgagcaggatcccctactctgcgggcggcgcgaggcgtctggctcttcgcggcggcggcgaggggaaagggagcgcgggggctgggtggaatcgaggagtgaggaaaaagggaaggggcgggggagagggaccagggaaggcgtcggggggaatctcgcgagggttggagttttggcgagagtttgtggaagatggcgcctgttgtgacaggtcattgaaattatgagactatcattcaaatggaagcattatagttcttcggaaccattatgatctcaaaacgaaaggagaatgatacagatacactggctgaggtgttttgaggtgcatcgaagtgttccaagctgtgacttaccttaacatgttcttgaagtaccatggcgtggattaaaaggaaatttggtgagcggcctccacctaaacgacttactagggaagctatgcgaaattatttaaaagagcgaggggatcaaacagtacttattcttcatgcaaaagttgcacagaagtcatatggaaatgaaaaaaggtttttttgcccacctccttgtgtatatcttatgggcagtggatggaagaaaaaaaaagaacaaatggaacgcgatggttgttctgaacaagagtctcaaccgtgtgcatttattgggataggaaatagtgaccaagaaatgcagcagctaaacttggaaggaaagaactattgcacagccaaaacattgtatatatctgactcagacaagcgaaagcacttcatgttgtctgtaaagatgttctatggcaacagtgatgacattggtgtgttcctcagcaagcggataaaagtcatctccaaaccttccaaaaagaagcagtcattgaaaaatgctgacttatgcattgcctcaggaacaaaggtggctctgtttaatcgactacgatcccagacagttagtaccagatacttgcatgtagaaggaggtaattttcatgccagttcacagcagtggggagccttttttattcatctcttggatgatgatgaatcagaaggagaagaattcacagtccgagatggctacatccattatggacaaacagtcaaacttgtgtgctcagttactggcatggcactcccaagattgataattaggaaagttgataagcagaccgcattattggatgcagatgatcctgtgtcacaactccataaatgtgcattttaccttaaggatacagaaagaatgtatttgtgcctttctcaagaaagaataattcaatttcaggccactccatgtccaaaagaaccaaataaagagatgataaatgatggcgcttcctggacaatcattagcacagataaggcagagtatacattttatgagggaatgggccctgtccttgccccagtcactcctgtgcctgtggtagagagccttcagttgaatggcggtggggacgtagcaatgcttgaacttacaggacagaatttcactccaaatttacgagtgtggtttggggatgtagaagctgaaactatgtacaggtgtggagagagtatgctctgtgtcgtcccagacatttctgcattccgagaaggttggagatgggtccggcaaccagtccaggttccagtaactttggtccgaaatgatggaatcatttattccaccagccttacctttacctacacaccagaaccagggccgcggccacattgcagtgcagcaggagcaatccttcgagccaattcaagccaggtgccccctaacgaatcaaacacaaacagcgagggaagttacacaaacgccagcacaaattcaaccagtgtcacatcatctacagccacagtggtatcctaactaccgtctttttgctaggacttaaactgacttgagtgtggcaaaaagttaacaaaaaaggagaaaaaatgaacaatcgtttgtggtttcttgggaaaacttttcataccaggtgatactattcaaaaaccccgttgtctccctgcaagtgctgatttgaaatgcagaagccacagtaaaaaaaaaaaaaaaaaaaaaaaaaaagaaaaaaaaatcaaaatgtataaatattggaaatcaagtttttcagctgttttgttggttggttggttggtttttgtttggttttgtttaaatgggcaagaagtaaataatgtggctggaatacaagttgaacaaactagaagacacaaatctaacatagtttttatggaccaaggaacttgtatattgtataagctttagtaaaaggtacattttcaccatacctttttttatatcacggtattatagtacaccttgttaccaaataggttgttctcttccccacccacctttgagcttttgctctaaaatacattcaggttccaagcctgaccatccttgtttaatctatcatactcttccaggttttttttttttggtctaaggctggaacttttttcttttttttcagctgaagtcttatgacttttcatgagtcaaaatt

SEQ ID NO: 679 - DNA, 6571 bp, Homo sapiens
gccccgccccgcgcgccgtggccgtttgaagtgactaatttctgtcatatgactgaggcgcccatgggggtggcggggcggctgtaggagcaggggcctagcaagcgcccagcggagcgacccctgcctggccgtggctagcatggcccctacgctgttccagaagctcttcagcaagaggaccgggctgggcgcgcccggccgcgacgcccgggacccagattgcgggttcagttggcctttaccagagtttgatccaagccagattcgactgattgtatatcaagactgtgaaagacgagggagaaatgttttgtttgactccagtgttaagagaagaaatgaggacatatcagtatcgaaactctgcagtgatgctcaagttaaagtctttgggaaatgctgccaactgaaacctggaggagacagttcttcctctttagatagttctgtgacttcatcttctgatataaaagaccagtgtcttaagtaccagggttctcggtgctcttctgatgccaatatgcttggagagatgatgtttggctcagtagcaatgagctacaaaggatccaccttaaaaattcatcagattcgttcccctccacagctcatgctcagcaaagtgtttactgctcggactggcagcagtatttgtgggagtctcaatacgctacaagatagtcttgaattcatcaatcaggacaacaatacattaaaggctgataataacacagttattaatggactgcttggaaatatagttcacagcaacccaatggacatgcctggaagagagctcaatgaggacagagacagtggcatagcacggtctgcatctctcagcagcttgctgatcactccatttccttccccaaactcctcacttacccgaagttgtgccagcagctaccagcgacgttggcgacgcagccaaacaacaagtttggaaaatggggtatttcctagatggtctatagaagaaagctttaatctctcagatgaaagctgtggccctaacccaggaattgtgcggaaaaagaagattgcaattggggtaatcttttcattgtccaaagatgaagatgaaaataacaaatttaatgaattctttttttcacattttcctctctttgaaagccacatgaacaaattaaagagtgcaatagaacaggctatgaaaatgagccggagatcagctgatgccagtcagagaagtttggcatataatcgaatagttgatgccctaaatgaattcagaacaacaatttgtaatctttacacgatgccacgaattggagaacctgtctggcttacaatgatgtcggggactccagaaaagaaccacctttgctatcgtttcatgaaggagttcacctttctaatggaaaatgcttccaaaaatcaattcttgccagctctcattactgcagttctgaccaatcatcttgcctgggttccaacagtcatgccaaatggacaaccacctataaaaatatttttagaaaagcattcctctcagagtgtggacatgttggcaaagactcatccatataacccactttgggcacaactgggagacttgtatggcgctattggctctcccgtacggttagcaaggactgtggtagttggcaaacgacaagacatggtccagaggctactttattttcttacttattttataagatgctctgaacttcaagaaacgcatcttttagaaaatggagaagatgaagccatcgttatgccaggcacagtaattactaccactttagagaaaggtgaaatagaagaatcagagtatgtccttgtcacaatgcatagaaacaaaagcagtttgctctttaaagagtcagaagaaattagaactcccaattgtaactgtaaatattgcagtcatccactccttgggcaaaatgtagagaacatttcacaacaagagagagaagatattcaaaacagctctaaggagctgctaggaatttcagatgagtgccagatgatttctccttctgactgccaagaagaaaatgctgttgatgttaaacagtacagagataaattaagaacttgctttgacgccaagttagagacagttgtttgcacaggatctgttccagtagacaaatgtgcattgtcagagtcaggcttagagtcaacagaggaaacatggcagagtgagaagttgctggattcagacagtcacacaggcaaagcaatgagatccacaggaatggttgtggaaaaaaaacctccagataagattgtgcctgcttcattttcttgtgaggctgcccagacaaaggttactttcctgattggggattctatgtcacctgattcagatactgagcttcgaagtcaggcagtggtggatcagattaccagacatcacaccaaaccattgaaggaagaaagaggggctattgatcagcatcaagaaactaaacaaacaaccaaggaccaatctggagagtctgatacacagaacatggtttctgaagagccctgtgaacttccctgttggaatcattcagacccagaaagcatgagcttattcgacgaatattttaatgatgattcaatcgaaaccaggactattgatgatgttccatttaaaacaagtacagatagtaaagaccattgctgtatgttagagttttcaaaaatattgtgtacaaaaaataacaagcagaacaatgaattttgtaaatgtatagaaacagttccccaagattcatgtaaaacctgctttcctcagcaggaccaaagagatacactctccattcttgtcccccatggggataaagagagttcagataaaaaaattgctgtaggaactgaatgggacattccaagaaatgaaagttcagacagtgcccttggggatagtgaaagtgaagatacaggtcatgatatgactagacaagttagcagttattatggaggagagcaagaagattgggcagaagaggatgagataccttttcctgggtcaaagttaatcgaagtgagtgctgttcagcccaacattgccaacttcgggaggtccttgctgggtggctactgctcatcttatgtgcctgactttgttcttcaaggaattgggagtgatgagaggttccgtcagtgtctgatgtcagatttatctcatgctgtgcagcatccagttttggatgaaccaatagcagaagctgtctgtattatagctgacatggataaatggactgttcaagtggccagtagccagagacgagtgacagataataaattgggaaaggaagtattggtttccagtcttgtttccaatctgcttcattccacacttcagctttataagcataacttgtctccaaatttttgtgtaatgcatcttgaagaccggttgcaggagctatacttcaaaagtaaaatgctgtctgaatacctgagggggcagatgcgtgttcatgtcaaggagctgggagtggttctggggattgaatccagtgatcttccacttctggctgctgtagcaagcactcactctccatatgttgcacaaatactcctttaatatacctaaaaattgttagaaattggtgggaaaataggtagaaaccaaggaagcagacacaacatgcatttatggagattctttttcccttttagacttccatctgaatgagtcagtcaccagggtattctgcatagcattgtatattctgtgtatgtcagatggctttttctttttgactggacttttgggtggtggtagatttttaaacaaatgaaattaaagcaacaataattttgaagcatttgaaaaagccaaagtgtacggtagaaatttctacaaaatgaatattatcaagagtttcatgtgatcactgcagtgttgtcacagctcataaatagcaacagtgtctcatgatttaatggctcagaaatagttattcattagtttttaatttttaatttctaaggtacagagatctataaaaccttgattatttgttagttttgcaattcaaaacagctaatgtctggttatttctcaaagtaagtattttaaacagcctgttaattataagaaactcagaataatgagtgtaaatgtgttatgttatccacccaagtgtacatatgtacctatttttttttaaaaagcagaaatagaaatacaagactggtaaacatgcctttaaaaatatatatattttcaactagtattgtctataatgctgaaatattacttattggtgatttttctgtttcacacactctaaaatataagtaaagccaaccttttttttaaggctgagattcccaaaatgagaatactactttataccatttgtttataagtatgaactgttcttataaatattaatatttacatattcactaatttaacataaatgaaaattaggattaaaaattgcaccaaagcatcggcaaaaacaatactatattctttaaaagtgctcaggtagccaaggcccttgcttttggtatcaaccctcatgaacccataggagctgaatatttgtttcactgcttaataatcctcaatttacactattcataactcttaaaattattctctttttttctaagagtccctcccttccaaaagtgtatttttttcaaagattttcacttctcaattgttgcctttgtacatactatagagtgttgcttgtaagaaaggctaatatggaaccaaactcttgtaagtaatgtaaatagaaaggtgggtggataaagttttcaatactttctactacctcagtttacttgagtactacattatagtttattctttgcttatctggtctaagagacttttaatgctagtagtaaagttggtttctgctttcattgactattttcatcataatttcatcattgattaaaaaaagaaaaccacttgtttattcagttattaaatatatttactatataacacatccattcttgctgtttaaattttcaatagttaatggaaagttgtctttgaccttgaatttacagcattgggtcacattttgccttgctgtgtatgtattcaagagacttccaactagacaaagaaaaaattgttgttttaatggaatgtaaacctgaaattggtgtgtctgcaatctgtttggcccatgaccttttacctagtcccagttattacctgagtctcccatggatgacttgctgccaaggagtgtttgtggatatattttctttggcttaattttcttattctgtgcattaacaaaattatccagttgtctgattttggaattctatgagtcaatctttttggcagaattcagaatattaaaaagttcatacatttgcgggccattgtacctttttttttttttttttttttttgacggagtttcactcttgttacccaggctggagtgcaatggtgcgatctcagctcactgcaacctccgcctcccagttcaagtgattctcctgcctcagcccccaagtagctgggattacaagtgtgcgccaccacacccagctaattttttatttttagtagagatgagatttcaccatgtgttggtcaggctggtcttgaactcctgaactcaagtgatccacctgcctcgacctcccaaagtactgggattacaggcgtgagccactgtgcccagccttgtacttttttttttttttattgtagctctgtatagcacttggataatgtctgggtgtctccttaaccatcaaactgttctttatttaaaatgtttaattaccgtttagaaattctagtcctcaataagtgggtggctcatgctattgttgttcctaaagctaagctttgctgggaaggaaatgacctatagtttcttaaagaatcattaatccttataggattcctgagttactgttttgttcctccccactgcttcccattcctgagttttgtaattcctaatccttctataatttctattaccttcaccatagtcattctttccttacgcaaagcccaaggaatgagctgctgctactttaaagtgtggtcattatgatgaatgtgaaaagagttttggcttgttctaaataatttttacaagttatggtacagacagttgttacatatcaaaaaaaacctgtttattgaaacaggaaataaaaaagggatcttttacattatagaattaaaactaattttttcttgtatataaactaattggtttgattttaaatatttctggcttttattaatatgtcttaattttgagtttgaaaatgttaagtgcaataaaaacatactagtacagattttgttttgttccaattggcatactctggggatgatcacttaaaaaaacagattttacataatgcctacttctggtagatgtcttatgagattgttctgctttttctaagttacttagatgttggatatgtacatagctgtttcttgttctgtatacatttctcaaatgtacacttgtattataataacctcccagttctaggggatatttgtgcaataaatacacatgtcaacttgaaaaaaaaaaaaaaaaaaaaaaaaaaaaaaaaaaaaaaaaaa

SEQ ID NO: 680 - DNA, 1714 bp, Homo sapiens
ccagaagccagatggtcccgggacaggcccagccccagagcccagagatgctgctgctgcccctgctgctgcccgtgctgggggcggggtccctgaacaaggatcccagttacagtcttcaagtgcagaggcaggtgccggtgccggagggcctgtgtgtcatcgtgtcttgcaacctctcctacccccgggatggctgggacgagtctactgctgcttatggctactggttcaaaggatggaccagcccaaagacgggtgctcctgtggccactaacaaccagagtcgagaggtggaaatgagcacccgggaccgattccagctcactggggatcccggcaaagggagctgctccttggtgatcagagacgcgcagagggaggatgaggcatggtacttctttcgggtggagagaggaagccgtgtgagacatagtttcgtgaacaatttgttctaaaagtaacagccctgactcagaagcctgatgtctacatccccgagaccctggagcccgggcgcctgtagtcccagctactcgggaggctgaggcagaagaatcatttgagccaggaggtggaggttgcagtgagccgagatcgcatcactgcactccagcctgggcgacagagcaagactgtctcaaaaactaaaacaaaaaaacaccaccaccaccaccaatgtctgattaaatctaagccacggttccattttggggcaaggggcagggtgtgggtgtggtggacagagaacgggctccagccaccatcagctgcacgtcctggtagcacctgagccattcccagtctcctgtgctgggagatcatcatctaatcctgatgatgacgccctcctctcagagctcgggggatgagctgccaaaacccatggaggttcaaaacccgggctctggagacagaagacactgggctcagagacatggggccactgtccaggctttccctgggcctggacctgggctccttccactgtctgagcagggtcagcctgggctggctgtgctggttcaagagatgagggaggaggacacagcggttgccaggaccctgaggcactggactgggcactgccccaaggggcagaggatggaacccggtgttgatattgtgatgctgacccgtctgctcacctgatttgggtgctgaagggcagctgacccccctaatcttttatagacttgtgaaacgaaaataaataaaagtcaagctgggaacagcttagggcaaacctgcctcccattctattcaaagccacccctctgctcactgagatagatgcatgtctgatcacctcagttgggaaaggctaatcagaaactccaaagaatgcatctgttcatctctcacccatctgtgacctggaagccccctccccacttcgagtcttcctgcctttgcttcaagttttcccgcctttccaaatggaaccaaagtacttcttacatatagtgactcatgtctcaagtctccctaaaacgtataaaactaagctgtgccccaaccacgctgaccatgtcatcaggacctcctgaggctgtgtcacggcctgtgtcctcaaccttggcaaaataaactttctaaattaactggaaaaaaaaaaaaaaaaaaaaaaaaaaaaaaaaaaaaaaaaaaaaaaaaaaaaaaaaaaaaaaaaaaaaaaaaaaaaaaaaaaaaaaaaaaaaaaaaaaaaaaaaaa

SEQ ID NO: 681 - DNA, 3492 bp, Homo sapiens
agatgccaaaacagcacccagctgcccatcaagattaccagaagggccccagttcctggcttctctgtggctcacactctggtcctattgcctacccttgggaactcagagcatcctctttctcttttctgctgagctggtggctgcaccgagttgcctctgtctctttaagagagaaagagagagcgagagacggaaatcaggaagtgcgagagagctgagagccaggactcagtgctgagcttggtgtcccaccgccacaaggaggcagggaagaaacccactagtcccagctcctggggtggcacagacattgcaactggccctgcctgtgggtcctaggggcccttggctaccaggaggctaagaacactgctcatgaatgacagtgagccctgaaagctctgggggtgtcacccagtcccacaagcctgcatcccctgcagtggagatgggctcagctcctggacgtgccacagacagaaagcataacatacactcgccaggaagagcctttgcctgactcagggcagctcagagtgtggggcagaaggtgaccagccagctcagggcaggagatgcagagcacagccaattacctgtggcacacagatgacctgctggggcagggggccactgccagtgtgtacaaggcccgcaacaagaaatccggagagctggttgctgtgaaggtcttcaacactaccagctacctgcggccccgcgaggtgcaggtgagggagtttgaggtcctgcggaagctgaaccaccagaacattgtcaagctctttgcggtggaggagacgggcggaagccggcagaaggtactggtgatggagtactgctccagtgggagcctgctgagtgtgctggagagccctgagaatgcctttgggctgcctgaggatgagttcctggtggtgctgcgctgtgtggtggccggcatgaaccacctgcgggagaacggcattgtgcatcgcgacatcaagccggggaacatcatgcgcctcgtaggggaggaggggcagagcatctacaagctgacagacttcggcgctgcccgggagctggatgatgatgagaagttcgtctcggtctatgggactgaggagtacctgcatcccgacatgtatgagcgggcggtgcttcgaaagccccagcaaaaagcgttcggggtgactgtggatctctggagcattggagtgaccttgtaccatgcagccactggcagcctgcccttcatcccctttggtgggccacggcggaacaaggagatcatgtaccggatcaccacggagaagccggctggggccattgcaggtgcccagaggcgggagaacgggcccctggagtggagctacaccctccccatcacctgccagctgtcactggggctgcagagccagctggtgcccatcctggccaacatcctggaggtggagcaggccaagtgctggggcttcgaccagttctttgcggagaccagtgacatcctgcagcgagttgtcgtccatgtcttctccctgtcccaggcagtcctgcaccacatctatatccatgcccacaacacgatagccattttccaggaggccgtgcacaagcagaccagtgtggccccccgacaccaggagtacctctttgagggtcacctctgtgtcctcgagcccagcgtctcagcacagcacatcgcccacacgacggcaagcagccccctgaccctcttcagcacagccatccctaaggggctggccttcagggaccctgctctggacgtccccaagttcgtccccaaagtggacctgcaggcggattacaacactgccaagggcgtgttgggcgccggctaccaggccctgcggctggcacgggccctgctggatgggcaggagctaatgtttcgggggctgcactgggtcatggaggtgctccaggccacatgcagacggactctggaagtggcaaggacatccctcctctacctcagcagcagcctgggaactgagaggttcagcagcgtggctggaacgcctgagatccaggaactgaaggcggctgcagaactgaggtccaggctgcggactctagcggaggtcctctccagatgctcccaaaatatcacggagacccaggagagcctgagcagcctgaaccgggagctggtgaagagccgggatcaggtacatgaggacagaagcatccagcagattcagtgctgtttggacaagatgaacttcatctacaaacagttcaagaagtctaggatgaggccagggcttggctacaacgaggagcagattcacaagctggataaggtgaatttcagtcatttagccaaaagactcctgcaggtgttccaggaggagtgcgtgcagaagtatcaagcgtccttagtcacacacggcaagaggatgagggtggtgcacgagaccaggaaccacctgcgcctggttggctgttctgtggctgcctgtaacacagaagcccagggggtccaggagagtctcagcaagctcctggaagagctatctcaccagctccttcaggaccgagcaaagggggctcaggcctcgccgcctcccatagctccttaccccagccctacacgaaaggacctgcttctccacatgcaagagctctgcgaggggatgaagctgctggcatctgacctcctggacaacaaccgcatcatcgaacggctaaatagagtcccagcacctcctgatgtctgagctccatggggcacatgaggcatcctgaagcattagaatgattccaacactgctcttctgcaccatgagaccaacccagggcaagatcccatcccatcacatcagcctacctccctcctggctgctggccaggatgtcgccagcattaccttccactgcctttctccctgggaagcagcacagctgagactgggcaccaggccacctctgttgggacccacaggaaagagtgtggcagcaactgcctggctgacctttctatcttctctaggctcaggtactgctcctccatgcccatggctgggccgtggggagaagaagctctcatacgccttcccactccctctggtttataggacttcactccctagccaacaggagaggaggcctcctggggtttccccagggcagtaggtcaaacgacctcatcacagtcttccttcctcttcaagcgtttcatgttgaacacagctctctccgctcccttgtgatttctgagggtcaccactgccagcctcaggcaacatagagagcctcctgttctttctatgcttggtctgactgagcctaaagttgagaaaatgggtggccaaggccagtgccagtgtcttggggcccctttggctctccctcactctctgaggctccagctggtcctgggacatgcagccaggactgtgagtctgggcaggtccaaggcctgcaccttcaagaagtggaataaatgtggcctttgcttctgtttaaaaaaaaaaaaaaaaaa

SEQ ID NO: 682 - DNA, 5715 bp, Homo sapiens
gcccccactccgcgcttgggagcgaggagccgccagcgcccccgccccgccgccgccgcagcgccctcaggccgccattcgccaccgaaactttccagcgcccgcgctctctccgggactcggcggcggcggggcgggggcggcccgggggcggcgcgcggctgctccggggcgccgggccctcttcggccgccgcacggccgggactcggaggctgccggctggagggaggttcggagcgcggccgggcgcgcggcgccgccacaagttgcgctgctcgcgacgagatttccgtgagggtggaagaaaatcataccatatcagatgcctcgcagagcaccaggcccaccgtgaaaggctggtccctgcagacggcttcccatttttatgaccggatgctgggaagcctgctggtccacaggtccatacatgaagtcaccataaggagccctggcctccttgcagaaacatcgaggtgacatgtagcatgaccgagctcgctggcgcctcttcatcgtgctgccaccgccctgcaggaagaggggccatgcagtcagtcttgcaccactttcaacgtttgcgagggagagagggtggttcccacttcatcaacacctcatcgccgcgaggtgaggctaagatgagcataaccagtgacgaggtgaactttctggtgtatcggtatctccaggagtcaggtttttcccactcggctttcacgtttgggattgagagccacatcagccagtccaacatcaatgggacgctagtgccaccggccgccctcatctccattctccagaagggcctgcagtatgtagaggccgagatcagtatcaacgaggatggcacagtgttcgacggccgccccatagagtccctgtcactgatagacgccgtgatgcccgacgtggtgcagacgcggcagcaggcattccgagagaagctcgctcagcagcaagccagtgcggcggcggcggcggctgcggccacggcagcagcgacagcagccaccacgacctcagccggcgtttcccaccaaaatccatcgaagaacagagaggccacggtgaatggggaagagaacagagcacattcagtcaataatcacgcgaagccaatggaaatagatggagaggttgagattccatccagcaaagccacagtccttcggggccatgagtctgaggtgttcatttgtgcctggaatcctgtcagtgatttgctagcctccggatctggagactcaactgcaaggatatggaacctgaatgagaatagcaacgggggctccacccagctcgtgttgaggcactgtatacgagaggggggccatgacgtcccgagtaacaaagacgtcacctcactggactggaataccaatggaacactcttggctacgggttcatatgacggttttgcaagaatatggacggaagatggtaacctggccagcaccttaggccaacataaaggccccatctttgccttgaaatggaaccgaaaggggaattacattttgagtgctggtgtagacaaaacaacaataatttgggatgcccacacaggagaagccaaacagcagtttccttttcattcagcccctgcccttgatgtggactggcagaacaacacgacctttgcctcctgtagcacagacatgtgtatccatgtgtgcaggctcggctgtgaccgcccagtcaaaaccttccagggacacacaaacgaggtcaacgccatcaaatgggatccgtctggaatgttgctggcatcctgctcggatgacatgacattgaagatctggagcatgaaacaggaggtgtgcatccatgatcttcaggctcacaataaagagatctacaccatcaagtggagccccactgggcccgccaccagcaacccaaactccaacatcatgttggcaagtgcttcgtttgattctacggtgcgactgtgggacatagaacgaggcgtctgcacccacacgctcacgaagcatcaggagcctgtctatagcgtagctttcagccctgatgggaagtacttggccagtggatccttcgacaagtgcgtccatatctggaatactcagagtggaaatcttgtccacagctaccgaggcactggcggcatcttcgaggtgtgctggaacgcccgaggagacaaagtgggtgccagcgcgtccgacggctctgtgtgtgttttggatctgcggaagtaaccacaaaatattatcgaaaaaagaaaagaattctaatgaccagccgtgaatgtgtagggttgcagctctattctccaaaactgtaggaacttgacttgcgttagagtgtactctgaaaccaactcgtctctggccgcaggagtctatatgttttcgtaatcttcatcaagaagtttttaaaaggcaagcaaaaacagaagcaaatcatatcaaacggggatagaatggtttccactgaggacattcagcctgggaaggaggaagtcaccagctcgaggcgtgtggattggtttccacccggaacaggctctgtgatggctgaatggaaagaaacgtaaaaagctgtgccaaaaaaaaagcaaaatgctgtgataaaccaaacagggaagggggaaaaaccctcctccttgggattttttttttttgttttccctaacaatttggacactacaattgctctcacaaaggaggttcaaagaccagtttgtaccgatgaaacgcgcaactttgtaatcccaacactttctattttctagaatcttctttgttcattgggtggtttttcagtcggctggaattctatcttctgggggccttccgtctgagatggaagctgtcttgggcttgttgtctcttccttctgttgctccctgcccctccccctgcctttccactctgtctggtgagctctgctttttcagtgcaccatcaagagatgcagccccgtggacatgaagacacaatctcccacggacagctttcccccttccgccctctcccaccctctcctccccttgcgctcgcgctcgcgctcgctttctcactggcgtgctctctttctctctctctctccctctgtacctttctcatagttgcttcagatcttaggtctcaagggcactttggcgcgtagtaagtgctttatgtaagaaggcagggcaggggggctttttacaggagaaaaaaaaatgacttataagagaaagagcctggagtatttttggaaaaaaaaataatatttttatgttaaaacaattttaaaatcttaaaatggccatcagacatagagagctttgtgtgattcatgttttaaaaagaaccgaagaagccacaggcagggcctgagggagcccctggctttcccctcagcctcaggaaaggtggtcaggaaaactctggctggacaagggtcagtcttcggggtcagcagcgagattgctctgcagccagtgagggaggtccccgccatgccggctggaagaagaacctcgcatcttttggtgtgtatgcaccttggcagccagcaggaaagcagcgaagagccgcgcgccctctggcctcaagggagcattggcagaaccataaggtactgcagaagccgtcgaaaccgactgctcggctggattaggcgtgttggctacatctttcccacaaccgtataacgaccgatggtcatttctccaagagcaggcttggcgagtccttgcagagctgacatagaggcgcccgcatgtcacttagtctaacgctgacagaaatgaatgcagaaggaagattttcagtcctgaacgtgaattatagaggtagaacgtcgctaataatttctgccatctttataatttctttgtctcacagaagactaggagaaagatcttttttaaataatctttttgctgtttttaaaaaattaaacaaggctttgtgttcctagaagagcttcatttcagtgaatctggtgacctccatctgcttgctgtcataacccgacacggacttatttttgtcattagcaagggggaaaaggccaaaggacaagggcctcttctcccattggttttcctgtgggcagaagggctgaggaagatggcccagcccgtgggggctgctgggtcaccagcagtgggtagggtgcaatctggtgtgtgttccagcagtgagacggtgttattgtgaaggtggcattcatctgcggagccaaaacccagccatcggggaagggtcagggcttctgtggaacttggaacgtgccaggaccacctgcaaaagccagggtgcgttgatcattctcagatcattgattggcctccacttgggtatgtgaattattcatgtcccagaagaccaaaaagtgctctggttctgagatgagtattttattcgtgttctgtttccgaaacacttagcaaagaaggtcacagtgatgtggagtcgccgcacccatctttgaagatagccagtgtccctggatgaggtgatgatttcccgtcccaaggactctgtgaagtttagagtacagtttgttggggtccaaaagacaccatctctaccccacccaaataaaaatgcactcatctctgtagaacatctgctgtcaaaggccagcctgtcgttagggcatggcttatgcttgacaaaccagtaacaactgtgggatggcgatggtgggatgtgtcgcaagcaattcactagacaatcttcacatgaatgtcggtagccagggtctctcccgagggatggctttagtcttgatgaatgtgaaccatgtcggaattgttaggtagaaacctgggctgggaggcctcggaccccaggctccatccctggcttccccagcctgcggccgcaagcaaaaccaagcgcgagatgcagctagcacccttcatatccatccccgttctcagcgggacaacaccatggacagccgttttcagagcctccagcatttgcacaccactactcaccctctctgctgctggcatgttggtagagtcatccctgtaatcaagaaatggcctgtggaatgttattgttcaacgttgtttacagctcttaaaacatggtgaggaatgcctaagtcttagtgaccaaacgtgaccttgaaagcagacatagcatgacagaccttcctagagtgtttggtcgggttcacagtgaccgagagtcaggtccagcacacacctgggaaagggatgctgccccaagggggaccaaaagggccggacgttacagggtgaaaccctctgacccctcgcgacaccgtaggacttgacttttgtttagtctttctaagaaatagatcatggagccaagtgaagtgcactttgtcaaatgtaagggtctgctttgttcttgttgcttttctgttttttaaccttttgttccgccatttaaaaaaagaaaaaaaaaaagcttatgtttcttgtcaaatgcagaaatgttccttccgccactcactgaagttttgcattctggcttgtgcagtttttattgtctgtgtcagacgtacagccagacatgttctctattggcatttttccgattctgttcagatgacagcgaccgccttttcattccccccgccacctgtactcaccctcacgctctttgaagaaaaaaaaaaaaatcaccttgtgtgttgtagctcatttgtttcaagagagaatcaacagatcatattcagtgtcttgaataaattgctctattttgatattaga

SEQ ID NO: 683 - DNA, 2240 bp, Homo sapiens
cggagcggggaacgaggccgtcggccattttgtgtctgcttcctgtgggacgtggtggtagccgttgggttgggaaagtgagggatttttggcctcgtttctcctgcttcttttctcctcccttttactttgccggtagaacacagttatgggtcgcaagaagaagaagcagctgaagccgtggtgctggtattgtaatagagattttgatgatgagaagatccttattcagcaccaaaaagcaaagcattttaaatgccatatatgtcacaagaaattgtatacaggacctggcttagctattcattgcatgcaggtacataaagaaacaatagatgccgtaccaaatgcaatacctggaagaacagacatagagttggaaatatatggtatggaaggtattccagaaaaagacatggatgaaagacgacgacttcttgaacagaaaacacaagaaagtcaaaaaaagaagcaacaagatgattctgatgaatatgatgatgacgactctgcagcctcaacttcatttcagccacagcctgttcaacctcagcaaggttatattcctccaatggcacagccaggactgccaccagtaccaggagcaccaggaatgcctccaggcatacctccattaatgccaggtgttcctcctctgatgccaggaatgccaccagttatgccaggcatgccacctggattgcatcatcagagaaaatacacccagtcattttgcggtgaaaacataatgatgccaatgggtggaatgatgccacctggaccaggaataccacctctgatgcctggaatgccaccaggtatgcccccacctgttccacgtcctggaattcctccaatgactcaagcacaggctgtttcagcgccaggtattcttaatagaccacctgcaccaacagcaactgtacctgccccacagcctccagttactaagcctcttttccccagtgctggacaggctcaggcagctgtccaaggacctgttggtacagatttcaaacccttaaatagtacccctgcaacaactacagaacccccaaagcctacattccctgcttatacacagtctacagcttcaacaactagtacaacaaatagtactgcagctaaaccagcggcttcaataacaagtaagcctgctacacttacaacaactagtgcaaccagtaagttgatccatccagatgaggatatatccctggaagagagaagggcacagttacctaagtatcaacgtaatcttcctcggccaggacaggcccccatcggtaatccaccagttggaccaattggaggtatgatgccaccacagccaggcatcccacagcaacaaggaatgagacccccaatgccacctcatggtcagtatggtggtcatcatcaaggcatgccaggataccttcctggtgctatgcccccgtatgggcagggaccgccaatggtgcccccttaccagggtgggcctcctcgacctccgatgggaatgagacctcctgtaatgtcgcaaggtggccgttactgatcttacttcatccagtctaataggtttggagattaaaccttttctcaacttgtgctgtttatatagccaagcttccgtcaataaggcttcattgtgactttaacaaacattatcttcccacataccaggaactattggacatttattttacatgggaaaaattatttggaataataaagcaggaacttttcctgaagttgcaatttatactgtatggcttctttttcatgtttcatctaggtttttagaagtgaagtatagtaaatttggttcgttaaattgtgaaggcgctggaattacatgaacataccaccctagtaaaggcaagttctgtaagcttacattgctatttgtaaagtttgccttcacagcatttcagatgctgttggacttcatgtccccaacctagcttggtgagggctgtaactgtttccaagtacttgtacattggaagtctgaatgtgtaacaatatttaatgtatttagagttcctcatgttgcagggtttaagaaatctgacccaccaaggtcatgtgacttttctgtactgttaaacttcattgtaataaaatgagagaaaaatttatgcctttttattcataacccagctgtggaccactgcctgaaaggtttgtacagatgcatgccacagtagatgtccacataataaaattcatagttaccaatgcaaaaaaaaaaa

SEQ ID NO: 684 - DNA, 2329 bp, Homo sapiens
tcctcccgctgtcccccacggaggggactgctctcccccgctgcatcctttctgtgaggtaccttacccacctcagcacctgagagggtgaaatagaattctaacctcgacattcgggaagtgtttttgagaagtctcggtcggtaagggaagtcttccaagtccgtgcagcactaacgtattggcacctgcctcctcttcggccaccccccagatgaggcagctgtgactgtgtcaagggaagccacgactctgaccatagtcttctctcagcttccactgccgtctccacaggaaacccagaagttctgtgaacaagtccatgctgccatcaaggcatttattgcagtgtactatttgcttccaaaggatcaggggatcaccctgagaaagctggtacggggcgccaccctggacatcgtggatggcatggctcagctcatggaagtactttccgtcactccaactcagagccctgagaacaatgaccttatttcctacaacagtgtctgggttgcgtgccagcagatgcctcagataccaagagataacaaagctgcagctcttttgatgctgaccaagaatgtggattttgtgaaggatgcacatgaagaaatggagcaggctgtggaagaatgtgacccttactctggcctcttgaatgatactgaggagaacaactctgacaaccacaatcatgaggatgatgtgttggggtttcccagcaatcaggacttgtattggtcagaggacgatcaagagctcataatcccatgccttgcgctggtgagagcatccaaagcctgcctgaagaaaattcggatgttagtggcagagaatgggaagaaggatcaggtggcacagctggatgacattgtggatatttctgatgaaatcagccctagtgtggatgatttggctctgagcatatatccacctatgtgtcacctgaccgtgcgaatcaattctgcgaaacttgtatctgttttaaagaaggcacttgaaattacaaaagcaagtcatgtgacccctcagccagaagatagttggatccctttacttattaatgccattgatcattgcatgaatagaatcaaggagctcactcagagtgaacttgaattatgacttttcaggctcatttgtactctcttcccctctcatcgtcatggtcaggctctgatacctgcttttaaaatggagctagaatgcttgctggattgaaagggagtgcctatctatatttagcaagagacactattaccaaagattgttggttaggccagattgacacctatttataaaccatatgcgtatatttttctgtgctatatatgaaaaataattgcatgatttctcattcctgagtcatttctcagagattcctaggaaagctgccttattctctttttgcagtaaagtatgttgttttcattgtaaagatgttgatggtctcaataaaatgctaacttgccagtgattaaatgagtgcccttccaaagtttctttttaccagaaatacagtggattgagactagaacattgctttcatttgggtttgtaggtttaaaaatctgattctaatcagaagtatatttagaacaaaacactttatttataaaagatgactccaaaattcatcttagtatttcaccatgttatatattattatcagcaagtccttctgaatattatcacagattactccatgtctctaaaatatattggcattgagctcatttgttaggtttgcccaccttattgaacagatttattttccttatacatacttgtgttgtccttggttacgtgtgtccccaaatgtaaataccaaatttttataaatcaaaaattttttagtgtgtaagagattttatgtaattttaagggccttttcagttcatccttttgcaaaaccatcaccacttaattatacttttgcatcagtctagaagactgcatattggaaagcagtgtaaatctataatgatgtatattctggtgagctgaatagggcattatgcatgtcctacaggtctccgccacctctcatgcccatcatcttccttttgtaggtgtaattcataacatatgcctttctgctgtctttaggtataatcagcaacagcagtcattctttgagtgactaatgtatacttggggttggggttgaaattccttaagccaaatgagttttagcttactgttttgaagtgccattttgtattgttaacaagtgtcatgaagggaaggaactaaaatcaaactgacagagtgtcaaggcaacaaaataacataaacaaaataataacattgtaaaaaaaaaaaa

SEQ ID NO: 685 - DNA, 2911 bp, Homo sapiens
gcggccgcctccccctccccctccccctctttcttctcctccctcgtcgccgccgccgccgccgccgcctcagccttcgcctcagccgccgcccgctcccgcccgcgcgcggcgggatggacgatcaatccaggatgctgcagactctggccggggtgaacctggctggccactcggtgcaggggggcatggccctgccgcctcccccgcacggccacgaaggggcggacggcgacggcaggaagcaggacatcggcgacatcctccaccagatcatgaccatcaccgaccagagcttggacgaggcgcaagcaaagaaacatgccctgaactgtcacagaatgaaaccagcgctcttcagcgtcctgtgtgagatcaaagagaaaacaggtctcagcatcagaggagcccaggaggaggaccctcccgatccccagctaatgagactggacaatatgcttttggcagaaggggtttcaggtcctgagaaaggtgggggatcggcggcagcagctgcagccgcggcagcctctggaggttcttcagataactctattgaacactcagattacagagccaaattgacccagatcagacaaatctatcacacagaactggagaaatatgaacaggcatgtaatgaatttactacacatgtgatgaaccttctccgagaacagagtagaacacgtcccatttctccaaaagagattgaaagaatggtgggcatcatccatcgaaaatttagttccattcagatgcagctcaaacaaagcacttgtgaagcagttatgattttaagatcaaggttccttgatgccagacggaaaaggcgtaacttcagtaaacaggccacagaaatcttgaatgaatatttttactcacacctcagcaacccctaccccagtgaagaagccaaagaggagctggccaagaaatgcagcatcacagtgtcacaggtatccaattggtttggcaacaaacgaatcaggtacaagaagaacattggcaagtttcaggaagaagccaacctctatgctgcaaagacggccgtgacagctgcacacgcagtagcagcagctgtgcagaacaaccagaccaattcgcccaccacaccaaattccggttcttctggttcttttaacctcccaaattctggggacatgttcatgaacatgcagagtctgaatggggattcttaccaagggtcccaagtcggagccaatgtgcaatcacaggtggataccctccgtcatgttatcaatcagacgggaggctacagtgatggccttggaggaaattcactgtacagtccacataatttaaatgctaatggaggctggcaggacgcaacaactccatcttctgtgacttctcctacagaaggcccaggaagtgtgcactcggatacctctaactaatctctggccacacttttccctgagctacatgccttgataagtgcattcagagcaataggaggaaaaggaaagcgtttttgtagcccaccatctacagctttactgtaaaaccttgtcttattcgagaacttggtaaatctgttttttaaggaatcataatcatttgtatttatacttaaaaacacacaatgttaaaaaaaataaagcactttatccaattaggccaagatttaacattgttgacagtcctgtagctattttatcataatttattatcaatattttacattaatggtttcacagttgccaattacttggccttaagggtaaaaagtacaatatacactaaacctcaaccgttaaagcagatgcaaaaattcacctcacctaaattgaacttcttgcatatttccattactgacttggattgtctttctttcatatcactaatggagttggaataaagagctgtttgcctatccctgttaatgatggttgtgtttaagaatcttcctcgtcacgtttgtgttcagatctcttatgttataattagatcagagactggtagcatcgtttctctctctgaaagcaccagtgcccagagtctgctcggtaataaaattatggatccagattgttctgagagacgaagatacttgctgctgatagaggtgaaaacgagattgatccgtctggggttttacggtgtgcactgggtgctgcacagacttgtcaaggtttgctacgtcctctgggcatctgcaaaaggccctgctctctggagtgttgtatatagtgtagcaaaagagtatttatacatcccaccaatcaaaacacagctttattacctcatgcgaactcatacaaaccaatagaatttcaacatgttctgtagcttagagtgctcacttactacctctgaacaatactcacgctgtagtttgtctctttcttatctttttgcatcttgtaattaactctttgtttcccttcataaaatgtaatgtacattgtaatcttttaaaagaaaaatcagggttgcacttgcaacttttaaaaaaccgagtgtggaaacattgggtcttaattcaacacaggatcggtaaaactgttgtaaatactgagaaacattttgaatgttcttcatcttattactaatccatgcaaaaaaaaaaaaaaaagcagcgactaattgtgatgcattcagatttcagtattcagtactgtatatttcaccctgtgtaatggggccccctctcctttctctctttttgtattgtatgcgattctgaaactgattgagtcatgaaaataatttgtggcggtgattctaatgtattaaaaacgtttcgtgttcctttctaactggattacaccctggattgaaaaagtcttcctcgtggtagttatatgtagtttcaaacatgaataaactttttgctttcatgattaaaaaaaaaaaaaaaaaaaaaaaaaaaaaaaaaaaaaaa

SEQ ID NO: 686 - DNA, 4348 bp, Homo sapiens
cttctcacactttcaggctctgatcgcggccgcagtttttccttttttcttctgccgtcgccttctctgcctcttctcatcctttctcgctctgctgctctgcagtgtgacgagtccgaatcctcttcccacccagcccgcgcctttcttcttttgcctgcgctgttctatttctccttcggccgccgccgccactgctgcacacagctggtgtcggtgccgcgcttttacccccaagtcgttcccgcagcctatggcccaggccgccttgggtatttctgctcaaggtaaccacatccctctttaaaaattccgccgaaaaagagaagacgctttacccgactctttgggccgttatctcacggcgaactttctgaccaagtatacaactacccagagggcctaggagaagtgctgtatagagagcagttcgacttcaacgctgagccaccttgggaacctagctgatgataggggggttccatctcccaacttgtccatggaggtcttcacttcagaaatccaagactcatattcatccagcttggtgtcaagtgggctgttgctgccagaattatcttgtgattatttgagagatgtatcagtttcttctgaagtacaatcaactgtagaagcctttgtagcagtttgttgcatattctaaggacccagacataggcttggtggcccgtctcttgtctttcctggtttatgactttcggctttgtggaatacggctgagatgaaaggatttattgatgatgcaaactactccgttggcctgttggatgaaggaacaaaccttggaaatgttattgataactatgtttatgaacataccctgacagggaaaaatgcattttttgtgggagatcttggaaagattgtgaagaaacacagtcaatggcagaatgtagtggctcagataaagccattctacacagtgaagtgcaactctgctccagctgtacttgagattttggcagctcttggaaccggatttgcttgttccagtaaaaatgaaatggctttagtgcaagagttgggtgtacctccagaaaacattatttacataagtccttgcaagcaagtgtctcagataaagtatgcagcaaaagttggagtgaatatcctgacatgtgacaatgaaattgaattgaagaaaattgcacgtaatcacccaaatgccaaggtcttactacatattgcaacagaagataatattggaggtgaagagggtaacatgaagtttggcactaccctgaagaactgtaggcatctcttggaatgtgctaaggaacttgatgtccaaataattggggttaaatttcatgtttcgagtgcttgcaaagaatctcaagtatatgtacatgctctatctgatgctcgatgtgtgtttgacatggctggagaaattggctttacgatgaacatgttagacattggtggaggattcacgggaactgaatttcaattggaagaggttaatcatgttatcagccctctgttggatatctactttcctgaaggatctggtgttaagataatttcagaacccggaagctactatgtgtcttctgcatttacactcgcagttaatatcatagcaaagaaagttgttgaaaatgataaatttccctctggagtagaaaaaaccggaagtgatgaaccagccttcatgtattatatgaatgatggtgtttatggttcttttgcaagtaaactgtctgaggacttaaataccattccagaggttcacaagaaatacaaggaagatgagcctctgtttacaagcagcctttggggtccatcctgtgatgagcttgatcaaattgtggaaagctgtcttcttcctgagctgaatgtgggagattggcttatctttgataacatgggagcagattctttccatgaaccatctgcttttaatgattttcagaggccagccatttattacatgatgtcattcagtgattggtatgagatgcaagatgctggaattacttcagactcaatgatgaagaacttcttctttgtgccttcttgcattcagctgagccaagaagacagcttttccgctgaagcttaaacaggcattaacgcttctttagatctgaagttgcaggttaagcttgtctggtcaacattccagtgtggaaaaataatttaaacaatcttattctcttaattcttttggcaacaaaaactattagtaatagctatttgggaccagacaaaatcagctttcatctataattcattggggataatgggagatttagataatgtatccagatttaaacctaccagtttgtcctaccccttaagcgtttaaaataaaatatgcaacaaaatggatgacttagtggagatggaagcccattaattgggttccccattaaatcgtttacatacaagaacacagtttttatactaaggatttgtgtttaaagtcttgtaaagttcatgtctttcacccagatatatcaaatgttagaagaccagtgtgacttcattagataacgtttagtgtatttagaatgtgtaaatttgtgctttgaactgtagtttaataaatgtaaaattgcatcatagtatttgttgacctaatgtaacccttgtatgattgcaataaaattttgtgtagattttactgttttttcaggctaaaactttgggaaaggggctagctagcaaaggtagttttgaaatagatgtgtatatggactgttttgaagggtttttttctttatagcccagttaagttttgtttggctcggtgcatttttcatttatttaattagtaatttaagtaaagtgtttggtaaatcattgtgaagttcagattcattatggagagttgatgtgcagtaagcatgatgtttaacaattttaacaccaaaaatgttaatcctgcataaatcaactgtaataataaataggtgtttctgtatagatagaatgcatagagtaccttagtaaatctttgaatcacaatcttttggctgaaatggaagattctgttaaatactttgaataaacttggggggagggaaataaaattgcagaaaactgcagagcactaaaacttaaagaagggctacatctttatccagaaacctgttgctcttttgcacggaatgtttaaattcagagttgggatgggggttggggtgaagcacacttattatcttcagttgcagtgatttcaaatttaggattttttgttgttggtttgaactgtccccttagtttcttgttatttccaatttgttctgcttagtcattacttttaattcttttcttactaaaattttatggtggttgggggaagggagttagcatcactaacctgacagttgttgccaggaatttgctttgtttactgctagtatattagaaatcctagatctcagaatcacaatagtaataaacaacaggggtcattttttcctaacttactctgtgttcaggtgtggaatttctgtctcccaagaggaaatgtgacttcactttggtgccaatggacagaaaattctacctgtgctacataggagaagtttggaatgcacttaatagctggtttttacaccttgatttcgaggtggaaagaaattgatcatgaatctctaataaatttaaatctcttaaaccagtaggtgcttaatattttttgatttgattaatgcccatttaaatctcatgggttctattaaaaatatatatatatagggccccaatccattgccatcaaattgcccttggacttttccaaggtatattatggggttttatgcaaaattccaagctaccatgtaactttttttaaccatttaacaaggagggggaactgtttcctaccttctttacatgttgtgcattgttgtggtccagaaatgccaaacctttttaaagatggtgcaactttgagtccttggcttgactatacaggccttgaacttcatggcatatcaactttgccatatctgcaggagagctgttctataagaaatagctcagagttgcaaatatcacatgtgaatgatacggtaacttttaagaaatgtctgtattgtatttgaagactgtttgccataaatctgaaatttgaacctatgtatttcaatttggtatgctaaaaagttctgaattaatgtaaagttttttgttataatattgtaatctcagttcaaaagttaactgcaaatataaaacccaatgatttctatatagtaaattgaactgtaaaggtaacttgtgtgtgattctgaatacatagataaatgtttttattcctcatgttttactttggcttctatctgaaatagaggtaaaattttacatatca

SEQ ID NO: 687 - DNA, 1861 bp, Homo sapiens
gttcttcgtgaaagggatgacgggagctgtatgaaagcggaagagttatagaccgctaacacctgtcactggccactggtttcccggagttagcggcaacgaccttgcagcctggacactagccaggcgctccctcttctcacagcggcccacgtctccttgcttgggagcccatcgtcctggctccggtggcctcgctgggtctcggggaggcagaggactgttctttcctgtggcgaaaagccggagtcggccctagacacccacgactcgcagggtccatggttccggaggccgtgagacctgccggggctgacaggtgccagggcccatgctgcgggagcctgtgtgctcagccttcttgcggacggtaaagaagctaagtggaagagtgtttcctcctctggccgtaaagcagctgtccccgccctactccggaccgccccaaagactccatgggatggacctgagtcagccgaatcccagccccttcccttgggcctgctgtggtgctggacatcagtgacagacggaagcaggagaccatcaaggctacgggaggcccggggcgcttgcgaagatgaagtttggctgcctctccttccggcagccttatgctggctttgtcttaaatggaatcaagactgtggagacgcgctggcgtcccctgctgagcagccagcggaactgtaccatcgccgtccacattgctcacagggactgggaaggcgatgcctggcgggagctgctggtggagagactcgggatgactcctgctcagattcaggccttgctcaggaaaggggaaaagtttggtcgaggagtgatagcgggactcgttgacattggggaaactttgcaatgccccgaagacttaactcccgatgaggttgtggaactagaaaatcaagctgtactgaccaacctgaagcagaagtacctgactgtgatttcaaaccccaggtggttactggagcccatacctaggaaaggaggcaaggatgtattccaggtagacatcccagagcacctgatccctttggggcatgaagtgtgacaagtgtgggctcctgaaaggaatgttccagagaaaccagctaaatcatgacaccttcaatttgccatcatgacgcagacctgtatacattaggttaaatctgaatttccactgctttggagagtcccacccactaagcactgtgcatgtaaacaggttcctttgctcagatgaaggaagtagggggtggggctttccttgtgtgatgcctccttaggcacacaggcaatgtctcaagtactttgaccttagggtagaaggcaaagctgccagtaaatgtctcagcattgctgctaattttggtcctgctagtttctggattgtacaaataaatgtgttgtagatgactggttagtgtttgaggctttgttctatgttttcccctgatttgttctggtcaaaactcatcaaatgtgtaactagcatccaggcgacaatacagaaagtctgggacctggcactgaatgtttgcctggtagtgactagccgttaatcaaccgactcatccaggatgaagaggacgtcagacttagagcagctgtctgtcctttcaggttactctcactcttctgaaagtgtctgtcagtttctgaagcatgtgtgttacctgcatcacacagctacttcctatcctagcaatacatccaaaatacagctctagtagagtgaggttaacttggaaatgtgatcagtagtgttgttttattttgtagtaattttttttttttttggtgatttagcaaagtttctagttgttatccatgaggatgatgggcatttccccccaggtattgactgcagtgg

SEQ ID NO: 688 - DNA, 3609 bp, Homo sapiens
gaatcctgctttttttttttctttgagacacggtctcgctctgtcacccttgctggagtgcagtggtgcaatcacagatcacggcagtgtctaattcctgggctcaagtgaaccttttgcatcagcctcctgaatagctgagaccacaggatatgaaagatggcaagtccagatagaagtaaacggaagatattaaaagccaaaaagacaatgcccctaagttgccggaagcaagtagagatgctgaataagtcaaggaatgttgaagcgctgaaaacagcaattgggagtaatgttccaagcggtaatcagagtttcagtcctagtgtcataactaggacgactgaaataaccaaatgtagcccttctgaaaatggtgcatcctcattggactctaataaaaattcaatatcagagaaaagtaaagtattctctcagaattgcataaaaccagtagaagaaattgttcattcagaaacaaaattggaacaagttgtttgttcgtaccaaaagccaagtagaacaacagaatcccccagcagagtcttcacagaagaggcaaaagattcactgaacacttctgaaaacgattctgagcatcagacaaatgtaacaagatccctttttgagcatgagggggcttgtagtctaaagtccagttgctgtccacccagtgtattgagtggtgttgttcagatgccagagtctacagtaaccagtaccgtgggtgacaagaaaactgaccagatggttttccatttagaaacaaactccaattcagaatcacatgataaaaggcaaagtgacaacattttatgttcagaagactcaggttttgtgcctgttgagaaaacacctaatttggtgaattcagtcacttctaacaactgtgctgatgacattttgaaaactgatgagtgtagtagaaccagtatttcaaattgtgaaagtgcagactcaacatggcagtcatcacttgacactaataacaacagccattatcaaaagaagaggatgttttcagaaaacgaggaaaatgttaaacgcatgaaaacttcagagcaaattaatgaaaatatttgtgtaagtttggaaaggcaaacagcattcctggaacaggtcagacatttgattcagcaggagatctatagcataaattatgaactatttgataagaaactgaaagaattgaaccaacgcattgggaagacagagtgcagaaataagcatgaaggaatagctgataaacttttggcaaaaatagcaaaacttcaaagacgtattaaaacagtattattatttcaaaggaattgtttgaaaccaaacatgttatccagtaatggagcctctaaggttgcaaattcagaggctatgattttggataagaatcttgagtcagttaatagtccaattgaaaagtcttctgtgaattatgagccttctaacccttccgaaaaaggaagtaaaaaaattaatttgtcatcagatcaaaataagtctgtttctgaaagtaacaatgatgatgttatgttgatttctgtggaaagtcctaatttgacaactccaattacatcaaatccaacagataccagaaaaattacatcaggaaattctagcaattctcccaatgctgaagttatggctgtacagaagaaacttgattctataattgatttgacaaaagaaggcctatccaactgcaatacagaaagtccagtatcccccctggagtcacattcgaaagctgcttcaaactcaaaggaaacaaccccattggcacaaaatgcagtccaggttcctgagtcctttgagcacctgccacctctcccagaaccaccagcaccactacctgaattagtagacaaaacccgagacacacttcctccccagaagcctgagctcaaagtgaaacgggttttcagacccaatggcattgccctgacttggaatataaccaaaatcaatcccaagtgtgctcctgtagaaagctaccacctcttcctgtgtcatgagaactctaataataagttgatttggaagaagattggagaaattaaagctttaccactccccatggcctgtactttatctcagtttttagcttccaacagatactattttactgtccaatcaaaagatatttttggacgatatggaccattctgtgatataaaatctatccctgggttttctgaaaatcttacgtaaaaggtgtttaataatgatatactactttttttttcatatttgtttgtttgcaatgttactgtaatactatttgccattgtaaaaggccagctcagattgtgagccctttctattgggacagtcctcttctatatgttttaagtggccagtaatttaatgaatttctggtttgtattaaatatgtccttccaatggataagttctaaaacatacgctatcattggcccatgttgctgaggtgcattgtgaacaatacctttagtgactgtggaactgctgcttctatcagaagacctaggatacaagcagccactgtttcctccgttaacaatcagcttttagtaacctgctgtggtcagcatagctacaggaaaagtcagcccttgactgagggccagatcatccctggagtgcacctctactaagattttatgaaaagatgacatgttgggctgcatgataaaagttaattataaaaattaaaagatttttttttttgagatggaatattgctctgttgcccaggctggagtacagtggtcactgcaacctccatctccctggttcaagcaattctcctatgtcagcctcccaagtagctgggactatagtcacttgccaccatgcccggctaatttatttttagtagagatgaggtttcaccttgttggtcaggctggtctcaaactcctgacctcaggggatccacccgcctcggcctcccgaagtgctgggattataggcgtaagccaccatgcctggccaaaaattaaaagattttatgaaacgaaatggcttcccattctttctattcagcttctaagtgggctattcatttgtgctctcctcttttttgttttgttttgcactttgtcaatcatttggggaaatagcctggaggtctttcctgaatctgtttgtagacataataaaatttgtgtgctgtgtacacaaaaacataatgtatcttatgaaagcattacccaacctgtttgagttgagaatgcatttgtccacctttgatttgaggctttagtttgctgatttcctaaatgctaccctttgatcatttcctggccaccatcacaatactaaggggctcagatgtgtcttgtgcccacctcttcctgagaagagatggaagtggagctgtgactagtacaagcagcccaagaaactctgaacggggcccaatggaggcaaacttgagcaaataattgggatgataagaaacaaaaataatcccaactgtttgaaagttcgaaagaggggcattcttttctggtacatggtgagagttcaggctccagagactcaaaacggaatggttttccttggcattttgtaaatgctctcacatctgtagcaataaagctgttattttctgcaaaaaaaaaaaaa

SEQ ID NO: 689 - DNA, 4263 bp, Homo sapiens
gaattcggcgctgagtgacccgagtcgggacgcgggctgcgcgcgcgggaccccggagcccaaacccggggcaggcgggcagctgtgcccgggcggcacggccagcttcctgatttctcccgattccttccttctccctggagcggccgacaatgtccaccacggtcaatgtagattcccttgcggaatatgagaagagccagatcaagagagccctggagctggggacggtgatgactgtgttcagcttccgcaagtccacccccgagcggagaaccgtccaggtgatcatggagacgcggcaggtggcctggagcaagaccgccgacaagatcgagggcttcttggatatcatggaaataaaagaaatccgcccagggaagaactccaaagatttcgagcgagcaaaagcagttcgccagaaagaagactgctgcttcaccatcctatatggcactcagttcgtcctcagcacgctcagcttggcagctgactctaaagaggatgcagttaactggctctctggcttgaaaatcttacaccaggaagcgatgaatgcgtccacgcccaccattatcgagagttggctgagaaagcagatatattctgtggatcaaaccagaagaaacagcatcagtctccgagagttgaagaccatcttgcccctgatcaactttaaagtgagcagtgccaagttccttaaagataagtttgtggaaataggagcacacaaagatgagctcagctttgaacagttccatctcttctataaaaaacttatgtttgaacagcaaaaatcgattctcgatgaattcaaaaaggattcgtccgtgttcatcctggggaacactgacaggccggatgcctctgctgtttacctgcatgacttccagaggtttctcatacatgaacagcaggagcattgggctcaggatctgaacaaagtccgtgagcggatgacaaagttcattgatgacaccatgcgtgaaactgctgagcctttcttgtttgtggatgagttcctcacgtacctgttttcacgagaaaacagcatctgggatgagaagtatgacgcggtggacatgcaggacatgaacaaccccctgtctcattactggatctcctcgtcacataacacgtaccttacaggtgaccagctgcggagcgagtcgtccccagaagcttacatccgctgcctgcgcatgggctgtcgctgcattgaactggactgctgggacgggcccgatgggaagccggtcatctaccatggctggacgcggactaccaagatcaagtttgacgacgtcgtgcaggccatcaaagaccacgcctttgttacctcgagcttcccagtgatcctgtccatcgaggagcactgcagcgtggagcaacagcgtcacatggccaaggccttcaaggaagtatttggcgacctgctgttgacgaagcccacggaggccagtgctgaccagctgccctcgcccagccagctgcgggagaagatcatcatcaagcataagaagctgggcccccgaggcgatgtggatgtcaacatggaggacaagaaggacgaacacaagcaacagggggagctgtacatgtgggattccattgaccagaaatggactcggcactactgcgccattgccgatgccaagctgtccttcagtgatgacattgaacagactatggaggaggaagtgccccaggatataccccctacagaactacattttggggagaaatggttccacaagaaggtggagaagaggacgagtgccgagaagttgctgcaggaatactgcatggagacggggggcaaggatggcaccttcctggttcgggagagcgagaccttccccaatgactacaccctgtccttctggcggtcaggccgggtccagcactgccggatccgctccaccatggagggcgggaccctgaaatactacttgactgacaacctcaccttcagcagcatctatgccctcatccagcactaccgcgagacgcacctgcgctgcgccgagttcgagctgcggctcacggaccctgtgcccaaccccaacccccacgagtccaagccgtggtactatgacagcctgagccgcggagaggcagaggacatgctgatgaggattccccgggacggggccttcctgatccggaagcgagaggggagcgactcctatgccatcaccttcagggctaggggcaaggtaaagcattgtcgcatcaaccgggacggccggcactttgtgctggggacctccgcctattttgagagtctggtggagctcgtcagttactacgagaagcattcactctaccgaaagatgagactgcgctaccccgtgacccccgagctcctggagcgctacaatatggaaagagatataaactccctctacgacgtcagcagaatgtatgtggatcccagtgaaatcaatccgtccatgcctcagagaaccgtgaaagctctgtatgactacaaagccaagcgaagcgatgagctgagcttctgccgtggtgccctcatccacaatgtctccaaggagcccgggggctggtggaaaggagactatggaaccaggatccagcagtacttcccatccaactacgtcgaggacatctcaactgcagacttcgaggagctagaaaagcagattattgaagacaatcccttagggtctctttgcagaggaatattggacctcaatacctataacgtcgtgaaagcccctcagggaaaaaaccagaagtcctttgtcttcatcctggagcccaagcagcagggcgatcctccggtggagtttgccacagacagggtggaggagctctttgagtggtttcagagcatccgagagatcacctggaagattgacaccaaggagaacaacatgaagtactgggagaagaaccagtccatcgccatcgagctctctgacctggttgtctactgcaaaccaaccagcaaaaccaaggacaacttagaaaatcctgacttccgagaaatccgctcctttgtggagacgaaggctgacagcatcatcagacagaagcccgtcgacctcctgaagtacaatcaaaagggcctgacccgcgtctacccaaagggacaaagagttgactcttcaaactacgaccccttccgcctctggctgtgcggttctcagatggtggcactcaatttccagacggcagataagtacatgcagatgaatcacgcattgttttctctcaatgggcgcacgggctacgttctgcagcctgagagcatgaggacagagaaatatgacccgatgccacccgagtcccagaggaagatcctgatgacgctgacagtcaaggttctcggtgctcgccatctccccaaacttggacgaagtattgcctgtccctttgtagaagtggagatctgtggagccgagtatgacaacaacaagttcaagacgacggttgtgaatgataatggcctcagccctatctgggctccaacacaggagaaggtgacatttgaaatttatgacccaaacctggcatttctgcgctttgtggtttatgaagaagatatgttcagcgatcccaactttcttgctcatgccacttaccccattaaagcagtcaaatcaggattcaggtccgttcctctgaagaatgggtacagcgaggacatagagctggcttccctcctggttttctgtgagatgcggccagtcctggagagcgaagaggaactttactcctcctgtcgccagctgaggaggcggcaagaagaactgaacaaccagctctttctgtatgacacacaccagaacttgcgcaatgccaaccgggatgccctggttaaagagttcagtgttaatgagaaccagctccagctgtaccaggagaaatgcaacaagaggttaagagagaagagagtcagcaacagcaagttttactcatagaagctggggtatgtgtgtaagggtattgtgtgtgtgcgcatgtgtgtttgcatgtaggagaacgtgccctattcacactctgggaagacgctaatctgtgacatcttttcttcaagcctgccatcaaggacatttcttaagacccaactggcatgagttggggtaatttcctattattttcatcttggacaactttcttaacttatattctttatagaggattccccaaaatgtgctcctcatttttggcctctcatgttccaaacctcattgaataaaagcaatgaaaaccttgaaaaaaaaaaaaaaaaaa

SEQ ID NO: 690 - DNA, 3213 bp, Homo sapiens
gccgccgccgccgccgccgccgccgccgccgccgccgccgccgccgccacagcccgctgggccggaggaggcggagctggcgctgtcccggctctcttgcggggaagcaactgagggggcggcgcggcgggccccggcggccgaagaggctggcaggtggcgccgtggggtgggtgctcctggtgagaggagtccactccgtgcgtgcgggcggaggccggcccccgagagccgccgacatgaagaaagacgtgcggatcctgctggtgggagaacctagagttgggaagacatcactgattatgtctctggtcagtgaagaatttccagaagaggttcctccccgggcagaagaaatcaccattccagctgatgtcaccccagagagagttccaacacacattgtagattactcagaagcagaacagagtgatgaacaacttcatcaagaaatatctcaggctaatgtcatctgtatagtgtatgccgttaacaacaagcattctattgataaggtaacaagtcgatggattcctctcataaatgaaagaacagacaaagacagcaggctgcctttaatattggttgggaacaaatctgatctggtggaatatagtagtatggagaccatccttcctattatgaaccagtatacagaaatagaaacctgtgtggagtgttcagcgaaaaacctgaagaacatatcagagctcttttattacgcacagaaagctgttcttcatcctacagggcccctgtactgcccagaggagaaggagatgaaaccagcttgtataaaagcccttactcgtatatttaaaatatctgatcaagataatgatggtactctcaatgatgctgaactcaacttctttcagaggatttgtttcaacactccattagctcctcaagctctggaggatgtcaagaatgtagtcagaaaacatataagtgatggtgtggctgacagtgggttgaccctgaaaggttttctctttttacacacactttttatccagagagggagacacgaaactacttggactgtgcttcgacgatttggttatgatgatgacctggatttgacacctgaatatttgttccccctgctgaaaatacctcctgattgcactactgaattaaatcatcatgcatatttatttctccaaagcacctttgacaagcatgatttggatagagactgtgctttgtcacctgatgagcttaaagatttatttaaagttttcccttacataccttgggggccagatgtgaataacacagtttgtaccaatgaaagaggctggataacctaccagggattcctttcccagtggacgctcacgacttatttagatgtacagcggtgcctggaatatttgggctatctaggctattcaatattgactgagcaagagtctcaagcttcagctgttacagtgacaagagataaaaagatagacctgcagaaaaaacaaactcaaagaaatgtgttcagatgtaatgtaattggagtgaaaaactgtgggaaaagtggagttcttcaggctcttcttggaagaaacttaatgaggcagaagaaaattcgtgaagatcataaatcctactatgcgattaacactgtttatgtatatggacaagagaaatacttgttgttgcatgatatctcagaatcggaatttctaactgaagctgaaatcatttgtgatgttgtatgcctggtatatgatgtcagcaatcccaaatcctttgaatactgtgccaggatttttaagcaacactttatggacagcagaataccttgcttaatcgtagctgcaaagtcagacctgcatgaagttaaacaagaatacagtatttcacctactgatttctgcaggaaacacaaaatgcctccaccacaagccttcacttgcaatactgctgatgcccccagtaaggatatctttgttaaattgacaacaatggccatgtatccccatgcccggttacgctgtatgtgcacctgcaacaggtgtacattttgcatctgtcagaacttcctcaactcagacttgctgcaatctgtaaagaacaaaatcttcactgcagttcttaacaggcacgtgacacaagctgacctcaagagctccacgttttggcttcgagcaagttttggtgctactgtttttgcagttttgggctttgctatgtacaaagcattattgaaacagcgatgatataaaaagaaatactgtccctaccaaaaacaaatacttttatgtacattctgaatgctttaagttctgctagaattattgagatatttatacatgcagagttactttattaatatttgtaattcatgcataagagtattttaatgatagttataactgcagtattggctagcatatggaaagaaaacagctaacagccaaactaaaatggctaaattccagaggccaaaagggaatattttgtaaatatatgtacatattcaggcaagatatggtctcccaagctgagttctagaaatgatgtttctagacatttctaagtggtattgttagtgctcacttggctcactcttctaggtttaagttagcccagagattgtatttactcatggatcactttatttatttcacatttactcagaatgatcctttgggttctataaggacataaggtacaatttgccattgtctctccatttttaaaaacatacaagtcagtgtcagcttaccaacatgacattttttcagtcagttgtggtaggccagccttgaagccatcgcacagtctagaaacttgtgtagctgagtgtgcagctcacctttaagggtgaagttaggtaaaagcaattagcagaggcgttatctatgtgattatgttgcttccttgtcagtatgttgaattttatagccctttcaatgaaataaaaaaaaaatttgtatattaccaatgtttttagtttaaataaagagtcacccttactactgttgaatttcatcccaagtgtaaatcattctataatggctgtgtctgttatagtatattacagtaactgcatgtgtcaccaagtgttctatatcaggctaggataacctagaggcagtaattttttaaatgataaaataaatctaatgaatataaactctcatgataaacctattttttccatcatcagccttttcaagtatttaaataaataactgctgtgtactgtga

SEQ ID NO: 691 - DNA, 2235 bp, Homo sapiens
gtggagcagaagccacagtcacttcctgaaggcagcggccccagctcgggtcccactcatcccatggcccatcacctgcctgcagccatggagagccatcaggacttccggagcatcaaagcaaagttccaggcctctcagccggagcccagcgacctgcccaaaaaacctccgaagcctgagtttggtaaactgaagaagttctcccagcctgagctaagcgagcaccccaagaaggccccgctgcctgagtttggtgcagtgtccttgaagcccccgccgcctgaggtcactgacctccccaagaagcccccgccgcctgaggtcactgacctccccaagaagcccccgccgcctgaggtcactgacctccccaagaagcccccgccgcctgaggtcactgacctccccaagaagccgtccaaactggagttgagtgacctctccaagaagttcccacagctgggggccactccgtttccaaggaagcccctgcagcctgaggtcggtgaggcccctttgaaggcctcgctgccggagcctggtgcgccggcccggaaacccctgcagcccgacgaactcagtcaccccgccagacccccctccgaacccaaatccggcgcattccccaggaagctctggcaacccgaggccggtgaggctaccccgaggtccccgcagcctgagttgagtacctttcccaagaagcctgcgcagcctgagttcaacgtgtaccccaaaaagcctccgcagcctcaggtcggtggcctccctaagaagtccgtgccgcagcctgagttcagcgaggccgctcagactcccctctggaagcctcagtccagcgagccgaagcgcgactccagcgcctttcccaaaaaggcctcccagcctccgctgagtgactttcccaagaagcctccgcagcctgagcttggggacctcaccaggacctcctcagagcccgaagtcagcgtgcttcccaagaggccgcggccggccgaattcaaagcgctctccaagaagcccccgcagcccgagctgggcggcctccccaggacctcctcagagcccgagttcaactcactccccaggaagctgctgcagccggagcgccgggggccaccccgcaagttctcacagcctgagcccagcgctgtcctcaagagacacccgcagcctgagttcttcggtgatctccctcgaaagcctccactccccagctccgcttccgagagctcactgcctgcggccgtggccggcttcagctcccggcacccgctcagccctgggtttggagcggctgggacaccccgctggaggtcaggaggcctggttcacagtggaggggccaggccaggcctcagacccagccatccaccccggcggaggcctctgccccctgccagcagcctgggacaccctccagccaagcccccgctgcccccggggcccgtggatatgcagagctttcggagaccctctgcagcatccatagatctacggaggacccgctcggccgctgggctccacttccaggaccgacagcctgaagacatcccgcaggtcccagatgagatctacgagctgtatgacgatgtggaacccagagatgactccagccccagccccaagggcagagatgaagcgccctcagttcagcaagccgccaggaggccaccacaagacccagcgctcaggaaggagaaggatccccagccacagcagttgccacccatggacccaaagttgctgaagcagctgaggaaggcagagaaggccgagagggagttccggaagaagttcaagtttgaaggggagatcgtggttcacacgaagatgatgatcgaccccaacgctaagacacgtcgcgggggtggcaagcacctcgggatccggcgcggggagatcctggaggtgatcgagttcaccagcaatgaggagatgctgtgccgggaccccaaaggcaaatatggctacgtgcccagaacagcgctcctgcccctggagacggaggtgtacgatgatgtcgacttctgcgatcccctggaaaaccaaccactccccctgggacggtaagaccggtaggcgtggggccaggacagccagccagcccagcgcccgctcacccaggagccctggatcccggcgcgggaaagtcacagagctgcctgggcttgtacctggccacataaagccccagtttaaagcaaaaaaaaaaaaaaaaaaaaaaaaaaa

SEQ ID NO: 692 - DNA, 5039 bp, Homo sapiens
ctgatgctgtgggcgtgggctgtgcagcagagggcagctgagaggctgggtggctgggcctgggagacacacagaggccaggccttagcgcggctcagccatgagcaacaggagtagcttttcccggctcacctggttcaggaagcagaggaaagctgtggtcagcaccagcgacaagaagatgcccaacggaatcttggaggagcaagagcagcaaagggtgatgctgctcagcaggtcaccctcagggcccaagaagtattttcccatccccgtggagcacctggaggaggagatccgtatcagatccgccgacgactgcaagcagtttcgggaggagttcaactcattgccatctggacacatacaaggaacttttgaactggcaaataaagaagaaaacagagaaaaaaacagatatcccaacatccttcccaatgaccattctagggtgattctgagccaactggatggaattccctgttcagactacatcaatgcttcctacatagatggttacaaagagaagaataaattcatagcagctcaaggtcccaaacaggaaacggttaacgacttctggagaatggtctgggagcaaaagtctgcgaccatcgtcatgttaacaaacttgaaagaaaggaaagaggaaaagtgccatcagtactggcccgaccaaggctgctggacctatggaaacatccgggtgtgcgtggaggactgcgtggttttggtcgactacaccatccggaagttctgcatacagccacagctccccgacggctgcaaagcccccaggctggtctcacagctgcacttcaccagctggcccgacttcggagtgccttttacccccattgggatgctgaagttcctcaagaaagtaaagacgctcaaccccgtgcacgctgggcccatcgtggtccactgtagcgcgggcgtgggccggacgggcaccttcattgtgatcgatgccatgatggccatgatgcacgcggagcagaaggtggatgtgtttgaatttgtgtctcgaatccgtaatcagcgccctcagatggttcaaacggatatgcagtacacgttcatctaccaagccttactcgagtactacctctacggggacacagagctggacgtgtcctccctggagaagcacctgcagaccatgcacggcaccaccacccacttcgacaagatcgggctggaggaggagttcaggaaattgacaaatgtccggatcatgaaggagaacatgaggacgggcaacttgccggcaaacatgaagaaggccagggtcatccagatcatcccgtatgacttcaaccgagtgatcctttccatgaaaaggggtcaagaatacacagactacatcaacgcatccttcatagacggctaccgacagaaggactatttcatcgccacccaggggccactggcacacacggttgaggacttctggaggatgatctgggaatggaaatcccacactatcgtgatgctgacggaggtgcaggagagagagcaggataaatgctaccagtattggccaaccgagggctcagttactcatggagaaataacgattgagataaagaatgataccctttcagaagccatcagtatacgagactttctggtcactctcaatcagccccaggcccgccaggaggagcaggtccgagtagtgcgccagtttcacttccacggctggcctgagatcgggattcccgccgagggcaaaggcatgattgacctcatcgcagccgtgcagaagcagcagcagcagacaggcaaccaccccatcaccgtgcactgcagtgccggagctgggcgaacaggtacattcatagccctcagcaacattttggagcgagtaaaagccgagggacttttagatgtatttcaagctgtgaagagtttacgacttcagagaccacatatggtgcaaaccctggaacagtatgaattctgctacaaagtggtacaagattttattgatatattttctgattatgctaatttcaaatgaagattcctgccttaaaatattttttaatttaatggtcagtatattttgtaaaaatcatgttaatttatttcatagttgacattaatatcttccctaatttctttgtatatattttgttatgccttaaaggccacctgctatacagttgttaaatcttaaatatgctttttaaaaattggaataatgtattaaggtcaaataatatcccataaaatatatatttctgctaatattagtaaatatcttaatttttcattagattcatatcatttaatttcacatattcaacacctttaaatgttgtaatcttaatatgcgaagtgtgcctctgcaagatactaacacaaagctcatgttaagaaaacagttgaggactcagaagtcagttcgaaaatgcactttcctaacagtgaattcacaaccctgaacagcagcatttttggaaggcaaactgttcgtgatggtacaatgtaaatggggacttctgtaaagttctcagtttcggtccatgtggtttatctttacattttaaagatcaaagaagtctttacaacctgaatccaggtctaaaacacactagagtagctggtgactataaataatattttaaaatgctgtgtctacaccatcaagactgtgtctacactatcttggctgaacgagaagagatgtaaatgctgggtggtcccgttgacccacggcgttgggtacaacaaaaccagccatcggagttacaccccaaagcaccatttgctgtccagctgcctgtcgtttggcccagaccaccctcagaaaaaaaccagctgcctctcccattctcccctcccgttctgccacagcggcctgggctggtccagtgctatgcctggaggctcaacacaaaacttcccatccaaacattcagatgaactgagcgtcttacacacgcagtacagaggagcacacattaggatagaaacagtagaataaccacgggcaattaaactttaaattttctgagcagcattttggtatttaaacatttcttgtaaaaagctgagacagtttgtaagaaaagaatccttaaaatctagatttataccattttttaaagtcccacctttcaatgtttaataaaacaaaaagagaaatccttaatctaaaagctaaattatttttgaatggaaatactactgagaccattgacactggataacagtaatgatcccattaccagataagattgactgacggggaaaaaaaaaaaaaaagaatggggtgtgaatgtaccaacactgaatcttacagcagttatctttctatggccattaggtacctagcagatgtgcacaatataaacaaaaagatatctggcctaccttactactaaaagcatttaacacgtgcatttttggtacttttttttttgttttctaaaagctacataaaggccttatttgacattttcactgataactgatcgcaccctcatgttgcagtgttcgtcccctattcattaacagtgtgtgcaaatgcaaccccaggacacattattgttctgatagatgctcacagggaatcaagcttctcgcccactccacggctctgagccccatccaagggcaagacttggtgcccagctggaaggacgaaagcacactttgtgaccgccatcctcaccagctgcatgcctgggctgcacactgctgaacgtgctcctctctccttctctgtacaatgattcagcatctcggcggaagaggaaaatggagctttttgaggctcgccaggtcccttttgttttcaccattaaaattccaaacccaaagcctttgtttgactgaaggagaagagagggaagtaagcttctgttcagcacctgaaccctagaaaaagagccagtttgctacgatgaaggtgacatttctctggtcatttatttgagagttcgaagtcaaagtcgaggggcaccggctttggttcatgtctaggagccctctgtcagaatccttgaagccctttaatggtctaactggcatctcttgtatcaagaagtacctttaaggtagaccttttcagggtgccctcaggaaagggccctgctcatgtttttttcctgtccccttagaccaaccccaggtgtccactgcaggggttctgcctgttcccaaactttttccattccaggaacaaaggagaagccactttccccaggacgcaagactctcccctccactgtccgggacagcgttcgccctttagcggggaggtcattacagcctcatggcctctaccaaggccccagatcacaggatctcctgggccttggagcacctcacgctgggggaatcaatccctgagggactcagaatcttctccgtgcaacctggaaagttcatctcttgtttccttcagtcaaagaaagtccattgtacataacaaaacagcccccaaacagcccagtgccgacaccattgttcctttcacactttcctttgttgcatgcagttgggttcaaatgccaaatagtgattagaagacgaccattctgatctgtgtgtgatctggtcactatgtgactgcctttacggtttctctccatgtgctatatgaatgaagaatgcataccagtgttttaaaaggtatttttatgtgtttttaaacacttttttaaatgagcctgacacctgtgtttcagcatttggagacatccccatgttattcttttaagtgtataattactgatacttttttgtttgtttgtttaactaagttgtgtttaacttatgtgcagtctttataatgtatgtatgttattacagtttcaactatcatattttctttgattacatttataatttgatcttgctctgattataatgccagtgaatgttgctgaactctttgtatatgcaaattgcaagatttaaaccattctgatgcaaggataaacctttactttgactaccagcctgtgtttttgtctttaaatctcttaatttcattcctctgcaaaaaaaaaaaaaaaaaa

SEQ ID NO: 693 - DNA, 3782 bp, Homo sapiens
acccgcctctgcgcgcccccgggcacgaccccggagtctccgcgggcggccagggcgcgcgtgcgcggaggtgagccgggccggggctgcggggcttccctgagcgcgggccgggtcggtggggcggtcggctgcccgcgcggcctctcagttgggaaagctgaggttgtcgccggggccgcgggtggaggtcggggatgaggcagcaggtaggacagtgacctcggtgacgcgaaggaccccggccacctctaggttctcctcgtccgcccgttgttcagcgagggaggctctgcgcgtgccgcagctgacggggaaactgaggcacggagcgggcctgtaggagctgtccaggccatctccaaccatgggagtgaggcacccgccctgctcccaccggctcctggccgtctgcgccctcgtgtccttggcaaccgctgcactcctggggcacatcctactccatgatttcctgctggttccccgagagctgagtggctcctccccagtcctggaggagactcacccagctcaccagcagggagccagcagaccagggccccgggatgcccaggcacaccccggccgtcccagagcagtgcccacacagtgcgacgtcccccccaacagccgcttcgattgcgcccctgacaaggccatcacccaggaacagtgcgaggcccgcggctgttgctacatccctgcaaagcaggggctgcagggagcccagatggggcagccctggtgcttcttcccacccagctaccccagctacaagctggagaacctgagctcctctgaaatgggctacacggccaccctgacccgtaccacccccaccttcttccccaaggacatcctgaccctgcggctggacgtgatgatggagactgagaaccgcctccacttcacgatcaaagatccagctaacaggcgctacgaggtgcccttggagaccccgcatgtccacagccgggcaccgtccccactctacagcgtggagttctccgaggagcccttcggggtgatcgtgcgccggcagctggacggccgcgtgctgctgaacacgacggtggcgcccctgttctttgcggaccagttccttcagctgtccacctcgctgccctcgcagtatatcacaggcctcgccgagcacctcagtcccctgatgctcagcaccagctggaccaggatcaccctgtggaaccgggaccttgcgcccacgcccggtgcgaacctctacgggtctcaccctttctacctggcgctggaggacggcgggtcggcacacggggtgttcctgctaaacagcaatgccatggatgtggtcctgcagccgagccctgcccttagctggaggtcgacaggtgggatcctggatgtctacatcttcctgggcccagagcccaagagcgtggtgcagcagtacctggacgttgtgggatacccgttcatgccgccatactggggcctgggcttccacctgtgccgctggggctactcctccaccgctatcacccgccaggtggtggagaacatgaccagggcccacttccccctggacgtccagtggaacgacctggactacatggactcccggagggacttcacgttcaacaaggatggcttccgggacttcccggccatggtgcaggagctgcaccagggcggccggcgctacatgatgatcgtggatcctgccatcagcagctcgggccctgccgggagctacaggccctacgacgagggtctgcggaggggggttttcatcaccaacgagaccggccagccgctgattgggaaggtatggcccgggtccactgccttccccgacttcaccaaccccacagccctggcctggtgggaggacatggtggctgagttccatgaccaggtgcccttcgacggcatgtggattgacatgaacgagccttccaacttcatcaggggctctgaggacggctgccccaacaatgagctggagaacccaccctacgtgcctggggtggttggggggaccctccaggcggccaccatctgtgcctccagccaccagtttctctccacacactacaacctgcacaacctctacggcctgaccgaagccatcgcctcccacagggcgctggtgaaggctcgggggacacgcccatttgtgatctcccgctcgacctttgctggccacggccgatacgccggccactggacgggggacgtgtggagctcctgggagcagctcgcctcctccgtgccagaaatcctgcagtttaacctgctgggggtgcctctggtcggggccgacgtctgcggcttcctgggcaacacctcagaggagctgtgtgtgcgctggacccagctgggggccttctaccccttcatgcggaaccacaacagcctgctcagtctgccccaggagccgtacagcttcagcgagccggcccagcaggccatgaggaaggccctcaccctgcgctacgcactcctcccccacctctacacactgttccaccaggcccacgtcgcgggggagaccgtggcccggcccctcttcctggagttccccaaggactctagcacctggactgtggaccaccagctcctgtggggggaggccctgctcatcaccccagtgctccaggccgggaaggccgaagtgactggctacttccccttgggcacatggtacgacctgcagacggtgccagtagaggcccttggcagcctcccacccccacctgcagctccccgtgagccagccatccacagcgaggggcagtgggtgacgctgccggcccccctggacaccatcaacgtccacctccgggctgggtacatcatccccctgcagggccctggcctcacaaccacagagtcccgccagcagcccatggccctggctgtggccctgaccaagggtggggaggcccgaggggagctgttctgggacgatggagagagcctggaagtgctggagcgaggggcctacacacaggtcatcttcctggccaggaataacacgatcgtgaatgagctggtacgtgtgaccagtgagggagctggcctgcagctgcagaaggtgactgtcctgggcgtggccacggcgccccagcaggtcctctccaacggtgtccctgtctccaacttcacctacagccccgacaccaaggtcctggacatctgtgtctcgctgttgatgggagagcagtttctcgtcagctggtgttagccgggcggagtgtgttagtctctccagagggaggctggttccccagggaagcagagcctgtgtgcgggcagcagctgtgtgcgggcctgggggttgcatgtgtcacctggagctgggcactaaccattccaagccgccgcatcgcttgtttccacctcctgggccggggctctggcccccaacgtgtctaggagagctttctccctagatcgcactgtgggccggggccctggagggctgctctgtgttaataagattgtaaggtttgccctcctcacctgttgccggcatgcgggtagtattagccacccccctccatctgttcccagcaccggagaagggggtgctcaggtggaggtgtggggtatgcacctgagctcctgcttcgcgcctgctgctctgccccaacgcgaccgctgcccggctgcccagagggctggatgcctgccggtccccgagcaagcctgggaactcaggaaaattcacaggacttgggagattctaaatcttaagtgcaattatttttaataaaaggggcatttggaatcaaaaaaaa

SEQ ID NO: 694 - DNA, 3002 bp, Homo sapiens
agaggggtggggtggaggagggaggcgggcgcgccggattggcctctgcgcgccacgtgtccggctcggagcccacggctgtcctcccggtccgccccgcgctgcggttgctgctgggctaacgggctccgatccagcgagcgctgcgtcctcgagtccctgcgcccgtgcgtccgtctgcgacccgaggcctccgctgcgcgtggattctgctgcgaaccggagaccatggccaaaccagcacagggtgccaagtaccggggctccatccatgacttcccaggctttgaccccaaccaggatgccgaggctctgtacactgccatgaagggctttggcagtgacaaggaggccatactggacataatcacctcacggagcaacaggcagaggcaggaggtctgccagagctacaagtccctctacggcaaggacctcattgctgatttaaagtatgaattgacgggcaagtttgaacggttgattgtgggcctgatgaggccacctgcctattgtgatgccaaagaaattaaagatgccatctcgggcattggcactgatgagaagtgcctcattgagatcttggcttcccggaccaatgagcagatgcaccagctggtggcagcatacaaagatgcctacgagcgggacctggaggctgacatcatcggcgacacctctggccacttccagaagatgcttgtggtcctgctccagggaaccagggaggaggatgacgtagtgagcgaggacctggtacaacaggatgtccaggacctatacgaggcaggggaactgaaatggggaacagatgaagcccagttcatttacatcttgggaaatcgcagcaagcagcatcttcggttggtgttcgatgagtatctgaagaccacagggaagccgattgaagccagcatccgaggggagctgtctggggactttgagaagctaatgctggccgtagtgaagtgtatccggagcaccccggaatattttgctgaaaggctcttcaaggctatgaagggcctggggactcgggacaacaccctgatccgcatcatggtctcccgtagtgagttggacatgctcgacattcgggagatcttccggaccaagtatgagaagtccctctacagcatgatcaagaatgacacctctggcgagtacaagaagactctgctgaagctgtctgggggagatgatgatgctgctggccagttcttcccggaggcagcgcaggtggcctatcagatgtgggaacttagtgcagtggcccgagtagagctgaagggaactgtgcgcccagccaatgacttcaaccctgacgcagatgccaaagcgctgcggaaagccatgaagggactcgggactgacgaagacacaatcatcgatatcatcacgcaccgcagcaatgtccagcggcagcagatccggcagaccttcaagtctcactttggccgggacttaatgactgacctgaagtctgagatctctggagacctggcaaggctgattctggggctcatgatgccaccggcccattacgatgccaagcagttgaagaaggccatggagggagccggcacagatgaaaaggctcttattgaaatcctggccactcggaccaatgctgaaatccgggccatcaatgaggcctataaggaggactatcacaagtccctggaggatgctctgagctcagacacatctggccacttcaggaggatcctcatttctctggccacggggcatcgtgaggagggaggagaaaacctggaccaggcacgggaagatgcccaggtggctgctgagatcttggaaatagcagacacacctagtggagacaaaacttccttggagacacgtttcatgacgatcctgtgtacccggagctatccgcacctccggagagtcttccaggagttcatcaagatgaccaactatgacgtggagcacaccatcaagaaggagatgtctggggatgtcagggatgcatttgtggccattgttcaaagtgtcaagaacaagcctctcttctttgccgacaaactttacaaatccatgaagggtgctggcacagatgagaagactctgaccaggatcatggtatcccgcagtgagattgacctgctcaacatccggagggaattcattgagaaatatgacaagtctctccaccaagccattgagggtgacacctccggagacttcctgaaggccttgctggctctctgtggtggtgaggactagggccacagctttggcgggcacttctgccaagaaatggttatcagcaccagccgccatggccaagcctgattgttccagctccagagactaaggaaggggcaggggtggggggaggggttgggttgggctcttatcttcagtggagcttaggaaacgctcccactcccacgggccatcgagggcccagcacggctgagcggctgaaaaaccgtagccatagatcctgtccacctccactcccctctgaccctcaggctttcccagcttcctccccttgctacagcctctgccctggtttgggctatgtcagatccaaaaacatcctgaacctctgtctgtaaaatgagtagtgtctgtactttgaatgagggggttggtggcaggggccagttgaatgtgctgggcggggtggtgggaaggatagtaaatgtgctggggcaaactgacaaatcttcccatccatttcaccacccatctccatccaggccgcgctagagtactggaccaggaatttggatgcctgggttcaaatctgcatctgccatgcacttgtttctgaccttaggccagcccctttccctccctgagtctctattttcttatctacaatgagacagttggacaaaaaaatcttggcttcccttctaacattaacttcctaaagtatgcctccgattcattcccttgacactttttatttctaaggaagaaataaaaagagatacacaaacacataaacacaaaaaaaaaaa

SEQ ID NO: 695 - DNA, 5324 bp, Homo sapiens
gaacggcgatgccccagacgcggctgcagttttcaaaccgcgactgcaagcttcggtagtcctctccgctgctgtcgccaggagtcacttcacgagaagccaggtcacaaccgtcggcccttgtctggaaaagtaaaagtggatcctgccacgttcggagctccctggcgcctcgcccggctggagctagagaactcgtcctgtggcggcccccggcgtggggcgggacagcggccccctggagggggcagtcccgggagaacctgcggcggccggagcggtaaaaataagtgactaaagaagcagacctgggaatcacctaacatgtcgaggaggagatttgattgccgaagtatttcaggcctactaactacaactcctcaaattccaataaaaatggaaaactttaataatttctatatacttacatctaaagagctagggagaggaaaatttgctgtggttagacaatgtatatcaaaatctactggccaagaatatgctgcaaaatttctaaaaaagagaagaagaggacaggattgtcgagcagaaattttacacgagattgctgtgcttgaattggcaaagtcttgtccccgtgttattaatcttcatgaggtctatgaaaatacaagtgaaatcattttgatattggaatatgctgcaggtggagaaattttcagcctgtgtttacctgagttggctgaaatggtttctgaaaatgatgttatcagactcattaaacaaatacttgaaggagtttattatctacatcagaataacattgtacaccttgatttaaagccacagaatatattactgagcagcatataccctctcggggacattaaaatagtagattttggaatgtctcgaaaaatagggcatgcgtgtgaacttcgggaaatcatgggaacaccagaatatttagctccagaaatcctgaactatgatcccattaccacagcaacagatatgtggaatattggtataatagcatatatgttgttaactcacacatcaccatttgtgggagaagataatcaagaaacatacctcaatatttctcaagttaatgtagattattcggaagaaactttttcatcagtttcacagctggccacagactttattcagagccttttagtaaaaaatccagagaaaagaccaacagcagagatatgcctttctcattcttggctacagcagtgggactttgaaaacttgtttcaccctgaagaaacttccagttcctctcaaactcaggatcattctgtaaggtcctctgaagacaagacttctaaatcctcctgtaatggaacctgtggtgatagagaagacaaagagaatatcccagaggatagcagcatggtttccaaaagatttcgtttcgatgactcattacccaatccccatgaacttgtttcagatttgctctgttagcacttttttctttgactcatttggactgaatttgaaattttatatccactccagtgagattatgatttgtagcttcatatatgacatgtttatattgtaaatgcacttttccatggaataatttagggaagtgttttaatgttaaattactagttgctagcatgttatgatttcatatcctgagatagctctgcagataagaaaatatttaaatatatgacaaaaagtaaaattgtacatgtgagtttacatgttaatgaaataattcaacttcaaatgaacttaccagaatgttttgcatatcaacaaaaaaagtggcttgagttttattatagttggtgtaaactgaacacagtgaagacattggaatttaataggttctctctctaaggtgactcttataccatgcctctatcaacataatttgtttaggaaagcagtatgaagtttaagccaaaataatttctactttatagatgctcaagagacattttacaattgaaaatgtctttcaattacaaatattttgaaacttcgtaagattttcattctctgtggtctgttatatgagagagatcctttaactagagcaaagagggagttagaaacctgatcagggatattctttacaagttggagcagaggaaagagtagcatgccttcgtattttaacgcaaatgtctttttcctcctcccaacctacttgagatctgataaggtctggaagatggagatatttggtatgcaagtgtagagttttttaatcctccagaatttctagagtagaagatacttaggtatagttaaatattctgtatttttagtcaaacatatttattaattgaatatagaagaaaatgttgacacactcagacagcttactgaattttagatgtcttctgcatcttagaatacaagccagtcattcagagttctaaaagtatgcataaaaaattacagcaccggtaggtctattaacacagtgcccgagtcagcggtagcaagactgatgtgatcataaaacatgacatcaggctcgtctgaagttcttgtgtgaaattcctagtgagtgaggaggctcagcttaaagccatctgcagagtggcccctcattgtggtcttttgctgggaccaatgcaagagactagggagagcaaaatgtttgcttatggctagagactatatccagccctaatgatggggaaagttagtccttttcgggtaatcttttatgaattttcacctgatgaccgttatattggtctgttatcatgttacgataactgtgatctcatgaccatgttgctgtatcagaagaaatagtttgacaaatggtaacaacaacctgatgttccccctttagacctttaacttctcaaaattttggtaagtttccaaattctttaataataacttaaaactttttgaataactatcaggtcactttatttgaccacatggtgaattcctttaatgtcttcagcatttgttaaggaaaagttttctctacttgtgtgtgtatgtgtgcacatgtgtgtatgtacaggtgtatgtatatatctatagatagatacaatacattctttagacacttttcaagattctttgctgtggtatattgtgctcaactcaggtgccaaaggagctttttttttttttttttttttttgagatggagttttgctctgtctctcaggctggagtgcagtggcatgatctcagctcacggcaacctctgcctcccgggttcaagcaattctcctgtctcagcctcctgagtagttgggattacaggcgcatgccaccgtgcccagctaatttttgtatttttagtagagacggggtttcaccatgttggccaggctggtcacaaactcctgacttcaagtgatccacccgcctcggcctcccaaagtgctgggattacaggcgtgagccactgcgcccccgcccaggagctcttttcttatgacatataaattatgacatttatattctttatatgactttatgttctcttcttatgacatttaaattctttaagtagtttgttggtccaataaactagacgttgtataatctaaattgagcccttgtatatctaaaactgatgagttgtttctaaattgttgattgtccatttacttgcctttggtattaagataatgcaagtaaagtttagtaagtcattggataatgaaatgattatgtttctgaagaccatattatatttttaatttttagaggaatcatgccatcccccaaaaaatcaagaaatatttgaattttaaattataagttcatttgttaaaagacatttttacaaatgtctgaaaatcttaaaatactttacatctacctttaagtagtagaatacagagctgtaaatttccatgccttttttcctgatattaagttttatagtaaaaaagcaactagtgattgcacaaagaatataaaaatccactctttttacaaaggtgtgaatttaaataacgttattgattggaatatgaaaatagaccaatcatttaagagctttttagcaaatgattcaattcttactctttttctcccaagattgaaaagcataatgtatttctctaaagtaggaatctagagagcccctgtgagtggacaaatgtcagtaacacttgaacacatgagaagataagtgttatgttgtgataatttaaagttaaatttgctttttgggtaggatccctaaatagatgggatttttaaatagatgatatatagatgacaattgcaattgtcattttaattattttccctacagtaaagaacctagctctgagcagtgaaattgtaatggcactttaaaggaagtaagccgttaactgttctctagtggagcgatctccaactgttttggcactagggacgggttttgtggaagaaaatttttccacaggactgggggtttagggggatggtttcaggatgattcaagtacattacatttatcattagattctcataaggagcatgcaacctagatctcttgcacgtgtggttcacagcaggattcgagctcctttgagaatctaatgccatggctgatctaacaggaaactgagctcaggcagtaatgcttggcaccgccccccaccttctatgcagcccggtcgtggcctggggactggggacccctgctctagtcagtaataaggtacttgtgccagaatataaatcaacacattgcttcctttatcaaagaagtcttgttatttaaaaaaagtcaactgagccagtatgattagtgatgtaattgattttcattctggcacaagcctctttcattctggacagctcacaaatagttaatggaccatgctttgaatagccttcctctaagcaacatttataaatactgatattttagaactgtttacatttcttctgtttatttttgaattttcagtttgatatcttgtccttattcattgttgtataaacaactgtactttaatttcaagtagtattaaaagtatttcacttcagtttggggggattattatcaatttataattttataaaagtattttaaagaataattgtaaattttccataaattacaacttcctgccatattttattaaataataatcttgcttaaggcatatagacagacattattatgagtattccagtaaaaaaaatctacatcaacttgaccattctggctaaaaattaaaaagcacttttttatatctgtggttgtcatttgtttcaaagcatttctaaatttattgttcttaaaagtatgtctgcatgttctagcctttgacctaggtcatctatgaaccctctttgtgtctaataaacatatctgtaaaggcaaaaaaaaaaaaaaaaaa

SEQ ID NO: 696 - DNA, 7667 bp, Homo sapiens
gtccgggttcgcttgcctcgtcagcgtccgcgtttttcccggccccccccaacccccccggacaggacccccttgagcttgtccctcagctgccaccatgagcgaccaagatcactccatggatgaaatgacagctgtggtgaaaattgaaaaaggagttggtggcaataatgggggcaatggtaatggtggtggtgccttttcacaggctcgaagtagcagcacaggcagtagcagcagcactggaggaggagggcaggagtcccagccatcccctttggctctgctggcagcaacttgcagcagaattgagtcacccaatgagaacagcaacaactcccagggcccgagtcagtcagggggaacaggtgagcttgacctcacagccacacaactttcacagggtgccaatggctggcagatcatctcttcctcctctggggctacccctacctcaaaggaacagagtggcagcagtaccaatggcagcaatggcagtgagtcttccaagaatcgcacagtctctggtgggcagtatgttgtggctgccgctcccaacttacagaaccagcaagttctgacaggactacctggagtgatgcctaatattcagtatcaagtaatcccacagttccagaccgttgatgggcaacagctgcagtttgctgccactggggcccaagtgcagcaggatggttctggtcaaatacagatcataccaggtgcaaaccaacagattatcacaaatcgaggaagtggaggcaacatcattgctgctatgccaaacctactccagcaggctgtccccctccaaggcctggctaataatgtactctcaggacagactcagtatgtgaccaatgtaccagtggccctgaatgggaacatcaccttgctacctgtcaacagcgtttctgcagctaccttgactcccagctctcaggcagtcacgatcagcagctctgggtcccaggagagtggctcacagcctgtcacctcagggactaccatcagttctgccagcttggtatcatcacaagccagttccagctcctttttcaccaatgccaatagctactcaactactactaccaccagcaacatgggaattatgaactttactaccagtggatcatcagggaccaactctcaaggccagacaccccagagggtcagtgggctacaggggtctgatgctctgaacatccagcaaaaccagacatctggaggctcattgcaagcaggccagcaaaaagaaggagagcaaaaccagcagacacagcagcaacaaattcttatccagcctcagctagttcaagggggacaggccctccaggccctccaagcagcaccattgtcagggcagacctttacaactcaagccatctcccaggaaaccctccagaacctccagcttcaggctgttccaaactctggtcccatcatcatccggacaccaacagtggggcccaatggacaggtcagttggcagactctacagctgcagaacctccaagttcagaacccacaagcccaaacaatcaccttagccccaatgcagggtgtttccttggggcagaccagcagcagcaacaccactctcacacccattgcctcagctgcttccattcctgctggcacagtcactgtgaatgctgctcaactctcctccatgccaggcctccagaccattaacctcagtgcattgggtacttcaggaatccaggtgcacccaattcaaggcctgccgttggctatagcaaatgccccaggtgatcatggagctcagcttggtctccatggggctggtggtgatggaatacatgatgacacagcaggtggagaggaaggagaaaacagcccagatgcccaaccccaagccggtcggaggacccggcgggaagcatgcacctgcccctactgtaaagacagtgaaggaaggggctcgggggatcctggcaaaaagaaacagcatatttgccacatccaaggctgtgggaaagtgtatggcaagacctctcacctgcgggcacacttgcgctggcatacaggcgagaggccatttatgtgtacctggtcatactgtgggaaacgcttcacacgttcggatgagctacagaggcacaaacgtacacacacaggtgagaagaaatttgcctgccctgagtgtcctaagcgcttcatgaggagtgaccacctgtcaaaacatatcaagacccaccagaataagaagggaggcccaggtgtagctctgagtgtgggcactttgcccctggacagtggggcaggttcagaaggcagtggcactgccactccttcagcccttattaccaccaatatggtagccatggaggccatctgtccagagggcattgcccgtcttgccaacagtggcatcaacgtcatgcaggtggcagatctgcagtccattaatatcagtggcaatggcttctgagatcaggcacccggggccagagacatatgggccataccccttaaccccgggatgcaaggtagcatgggtccaagagacatggaagagagagccatgaagcattaaaatgcatggtgttgagaagaatcaggagagggatacaagagaggagatggggtcccggcacccatctgtatcatcagtgcctctttgaaggtgggaaacattagtgaaaattctgttggtgccacgctttgatgagcatttgtttgaccccagtttcttcttacacttcttaccccagcctacccttcctgcatttctcttctcagctcttccatgatggattcccccccctttcctaaagccatcatgccttgataaatatatatgatcattgaaatactttttaacaaaaaacagattctatattattatatatatatatatatatataaagatatatagagatgcattcacaggggttggctgggaggaggaagaccattctgtgaccaaaataccttggtcattttttttatattgccttatttccctatggctgagccttgttgtgacacatcaagcttttctgtagatgttgtcttggcttcccaccagcttaagcgttcatatgctctgcttttagttcatatatacatacataatgtttttcctttcttaattttgtctttttgtttgggatcagcttcttgcactccttccctaactcaactgttgccgtctcatcttctctcatctgatcacttcatgttttgtttttgttactgcctggatgaggcacttctgtcaattttttcaggaccttagttccagcagcagaatggaaaaatccttgaagcccaggctgatgcttgaagtaactgtggagggagtgttcaaaatactactgacgcaggcaccttcttggcgctggagagtcaaaggcatctcccttcattagctgctctgagcatcaagaattagaagtctttcagtggaattgtacaagagtccctttgaagataataatcttggctcagtttgtataaactgtcaaattttcaaataataggtagggggctttcactaggaaaatcatgtgctcagaagaggaaatgactcgtagtcaggttcaggagttagtggagtatttggactttggtactgctgtcttccaaggtagctctaagttttgatgtgtgggcttctgagtttatattctgaaaggaaatacacttcttttgaacatccccactaggttcttttccattgtcaataaggagcatcagccagtgaatctgtttcaggtttccattctgcagaactcctccaaagcatgtgctagtggcaagacagtggttcttatgatgttttcccttaacttttccttgtatgttcttgggtggttcctaagggaaagggaagcacatgatcatgggaatgatagcccagaacaaaaagaaatcttgtcttaccacagtgttttataggagagattgggagaaatcatcctgttttctctgtgacctgatttcagaagagactgatccaaaaattataacggcagggaacctagtgcatttggcactgagatttaaatgcaaccagaattgtcctcaaggcccagccataaaagcattgtctctctcgaccttctggtatcttgttagagagcttttcactgtgaggaagtgtggaaaaatagctctgtgtgtgtgtgtgtgtgtgtgtgtgtgtgtgtgtgtaatctgttaggttggggataggttttctgctagccaatattaaaagagacctgcaataaaaaaattaccctgatctgatagaaagcaagtgtttttgtatgtgtgggtgaatgtgtgttcatgcccgtatatgtctacacacagatgacaaattatatttgaaatcgttggaaaataaattcagatcaaaatgcctttcaggcccattacctagaaatctatcttaaaacctgggtatgttcctaaggtcatttctttgcttatgctaaattaattacaattatgaatggaggatattctactgtacttttttaaaaagaaactatttttgtgtttgaaagtgaaaccaacatccagatctatagcagagtccttattcttctcataaatctttttactttggctacaaatagatgatggtatgattctattatatattttatataaaatccatccaaattaagttttgggtaagtgtgttgtttaatctgaactatagtaacttaatactctaaacaatagttcactccatttggtcctttctccacagatgtaattatgttttcaactcaggaactatggcaaggaactttccccagatcaaattctattaacgctgagatacaagtcatccatgcacagccactatcataccctttattctcactgaaaggcagaactcagaacctgttattttatgtctgtaatcatgtactttggcatcttttggaggaaaggggcaggataactcactggaatgtacagtattttgctagtgcatttcaaggaatggaatcttctccagtatgaaattaccagatataaaataatgtaatgatgctgaggatataagcttttagaaggtaatttgatggtatttctttctcgaatgaaaagctgctggtttaccctcaaccctattcattagcattaccatgagtgaatttatatctaattatttccacttgccctgttctcttcacaccaaggaagctccagatccagtatcttgtttggcctcaaaacagaagcagcttcttttgtctcccagcagtagtgagccactcagtctcttccacaggaagtttggagcctacattccttgagtcaggagcttattacagaaaaaccccgtttccctgaacttttggctaacagaaattaatttaactgacatgcatattgattctgaaatttttttcctaagtttttttcatttttttgaatgagttttttaaattttttagatgaccaaaacttgcagggcaggggatgcccagaagagtggtgagatagtaaaacacttattccctcatcctttcaggttttcaggttgcccatttatattcatttacatgtcatttgactgtctcactttttacccagaacagtaacaacccacaccgtcttccttcagggatttccaactggcactctgtgggtgctacacagaatgcaatttaatggatatttctcagcctggttcagaataaattgatcctttgatcccagaaagtatatactgaagtgtgggataaagattatgattaggggagggttggagacaaaagctgtaaattactatggctgatttatttctactatatacatatatattttttgcttttgtatatcctatataggaaactaagcattgtattttttttaacaaatctaaaaaagcactatgaactacaggtgtttgactttcaaaatatattttgtattgttaatatcttcacattgtgtgaatactggaagctgcagatctttgctaggacgcaataaatttatatactttttgaggggttcttctggggtgctaatcaggcccctgttatgcttagggggagccctggtgctacttgcttgaagttttcagtgtaagtaccctgatgccttttggaccttgggatcagatcaagagttttggagatcaggtaccaaggaaataaggacagtctagctgcctcaagtgaggggccctttgcatagctctccttccccctcactgaagctgggtagcctattggggttgagagggaaaatgtgaaatctcagaatttatctcccttagaagagagccagtaacttatgtacaaggatgaaagaaaggtcgcagcagtagctttggggaaagggaggaagatatggcacttctccaaccccggaaaacattgcttttgaaaactgctgataaaatatgagccggttattacttctgtttgggagactgtgctctctgtggtgcctctcttggctctactccacagataccagacctcttctaagaggatgagcagaccagctttgaggttgacctgtttctctttgtctgccttcccaaaacaccagcccccaggaagacattaagcagccttaagcttaaattcctactccctcttccaaatttggctcacttgccttagatccaaggcagggaaaggaaaagaaggggggtctctggctttattactcccctaagtctttactctgacttccccaaacccagaaagattttctccacagtgttcatttgaaagaggagtattttgtcccattttccccttcctcattatcaaacagccccagtcttccttgtctctgctaagaaagtagaggcatgatgatctgcctctcaactgccctaagtcctagctaagtatcaggggaaaaaaaaaaaaaaaaagcctaacaaatgggattagactagggctgcaagtagtgaggattttgttgatacctctgctgggatgtgtgctttcccatatcttgccttcaggaattacactgtgccttttccccagggatatgggctctgtctacccagtgctccagtttcccggtaactgctcttgaacattgtggacaagggcaggtcttcatatttttgatcatccctttctcccagtgaaatcccatagcccttacctagagtctagggcacaaagacttcggggaagatacactgagattgacctgaggagacatctacacacaccagtggcagctgccccagggcctgcttccccttcctaagtctgtcatcctctggaagggatgggtggtgctccaatctctggtgcctaaaaacccaagtttatttctctcttaacactggcaataaccagtccacaccactgttgccttttaaaacctcttaataatctcatgctgtgtttgttttgattccaatccaattatcaccagggctgtgtgggtaaatgcttttaaatgctctctcatcttgttcttccccctcaccccccactcttaggtatgtatgatgctaatcttgtccctaagtaagtttcttcctgctccttttgtatcttcctttcttgtctttcctcctaccttttgtctcttggtgttttgggacttttttttttttttttttggccttttgtacaaagattagtttcaatgtagtctgtagcctcctttgtaaaccaattaaaaagttttttaataaaaaaaaaaaa

SEQ ID NO: 697 - DNA, 1163 bp, Homo sapiens
ccgtgcgggaatgggcgtggcctgggcggggcgggcgctaggacccaccggagcgccgtgaacgtcaccgagcggcgccgaggccccgggttgagcgggaggcgcgatcggtccggtcggtggctccccgcggcggggccgggcccgatctcgggcgggaaccgagcgcagagccggtagcgggaaggatgaccacgctcacacgacaagacctcaactttggccaagtggtggccgatgtgctctgcgagttcctggaggtggctgtgcatctcatcctctacgtgcgcgaggtctaccccgtgggcatcttccagaaacgcaagaagtacaacgtgccggtccagatgtcctgccacccggagctgaatcagtatatccaggacacgctgcactgcgtcaagccactcctggagaagaatgatgtggagaaagtggtggtggtgattttggataaagagcaccgcccagtggagaaattcgtctttgagatcacccagcctccactgctgtccatcagctcagactcgctgttgtctcatgtggagcagctgctccgggccttcatcctgaagatcagcgtgtgcgatgccgtcctggaccacaaccccccaggctgtaccttcacagtcctggtgcacacgagagaagccgccactcgcaacatggagaagatccaggtcatcaaggatttcccctggatcctggcggatgagcaggatgtccacatgcatgacccccggctgataccactaaaaaccatgacgtcggacattttaaagatgcagctttacgtggaagagcgcgctcataaaggcagctgagggggcacctgccaccccactgatgcccaaactgtcagactttgggggatccccgcctagggcagtgctgcatggctgccctgattccaagtgctcttatcgcctctgtgtgtggatcgcccgccccagcccggggccgctcaggtctgcttggaggatgcctcccccaggagggcagtgagggatgccgcaacctcgacttctcagcctcctggggttccgccggccaacactgtctgtctcaaatactgtgctgtgagttgtttcaataaaggggccccaagggctgggctgaaaaaaaaaaaaaaaaaaaaaaaaaaaaaaaaaaaaaaaaaaaaa

SEQ ID NO: 698 - DNA, 6850 bp, Homo sapiens
gaggagaggaggcgtgagagagcgtgcctgcccgccgcacacggggctggtttccggagtgcgtctctagagggatgcacgttgccttagccgagcttcggagagaagcctgatatgtaacccaggcaggtgggagcctcagtctgtcgggctgaggtctggcatctacaaagcctcttggccgtgttctgaacttgaagcctggaggagttctctgctcagcacagccaaggaacagaattagaagaaaaggaaccctggcctgaggcaggtgacaaacattaccaccccagctgtgcacgatgcagcagatgcaaccagatgttcacagaaggagaggaaatgtatcttcaaggctccaccgtttggcatcccgactgtaagcaatctacgaagaccgaggaaaagctgcggctgccaaacattcggcgttcttcatccgatttcttttattccaaaagtctgattcgacgcacaggacggtctccgtctctgcagcctaccaggacatcctcggaaagtatttattctaggccaggctccagtattcctggctcaccaggtcatactatctatgcaaaagtagacaatgagatcctggattacaaggatttagcagccattccgaaggtcaaggcaatttatgacattgaacgtccagatcttattacctatgagcctttctacacttcgggctatgatgacaaacaggagagacagagccttggagagtctccgaggactttgtctcctactccatcagcagaagggtaccaggatgttcgggatcggatgatccatcggtccacgagccagggctccatcaactcccctgtgtacagccgccacagctacactccaaccacgtcccgctctccccagcatttccacagacctgatcaaggaatcaacatttaccgaaagccacccatctacaaacagcatgctgccttggcagcccagagcaagtcctcagaagatatcatcaagttttccaagttcccagcagcccaggcaccagaccccagcgagacaccaaagattgagacggaccactggcctggtcccccctcatttgctgtcgtaggacctgacatgaaacgcagatctagtggcagagaggaagatgatgaggaacttctgagacgtcggcagcttcaagaagagcaattaatgaagcttaactcaggcctgggacagttgatcttgaaagaagagatggagaaagagagccgggaaaggtcatctctgttagccagtcgctacgattctcccatcaactcagcttcacatattccatcatctaaaactgcatctctccctggctatggaagaaatgggcttcaccggcctgtttctaccgacttcgctcagtataacagctatggggatgtcagcgggggagtgcgagattaccagacactcccagatggccacatgcctgcaatgagaatggaccgaggagtgtctatgcccaacatgttggaaccaaagatatttccatatgaaatgctcatggtgaccaacagagggcgaaacaaaatcctcagagaggtggacagaaccaggctggagcgccacttagcccctgaagtgtttcgggaaatctttggaatgtccatacaggagtttgacaggttacctctttggagacgcaacgacatgaagaaaaaagcaaaactcttctaagtcccactcgtgaatggcaattagagaaaggactgacagtggcggtgccccataggatgtcatattgaggcccaaacttgattggagaatttgcaaactaccgtcgctcagcaacaccaaaaagagaaagtctggttaaaacaccatgagtcaaatgtcgggccagccaacagtaacacttgccaagaagcatggcgtagaaatttctatgttccgaaacacagagtagtgtccacatgtgagcttttcacattaccttatgtatacaacaggagctgcgttgttttcttctttttcttttcctttatctgttgtccaacaacagtgctgactgtccggataagagctggcaagtgcccttaggatgccgcatgggaaaaatcggttatcataatttcaaagtataaatatatttattaagtagcgctgcggctaagaaggaagagtgaggggtctgtccatggggtggcagtgatttcacacccgcctttcttgaatggcttcgtgttactcagccgtgccctggcaggaatggaactccatcagggaacagggcagctctgtttgaatggggtgaaaaacagcaaaattaattcttagcaagctccttgttctctactgttcaccgggacctggctggcaaatgacttagctattagtatatttaaaaactgttcaaaagcaaaagagaaggaacaggaatgaaaggaaaccttcccttaactctttctgcttcccatagcaggtctggttcctgctccccgcctaggacaggagctgtctggagctccacctttgcaaagaaaggaaaaacacaaattgcccccagattggcccagtggcatgccattaggtgattttgcataggggccatatcattcatggccaaaaaaaaccaaaaagcaaaaaacaaaaacaagtcccatgtcctactgactctagttcttccagtcgttatcctctgctgtctctctggcatcctatgaatcagatcaagcccatgctgttgttggtttttaaggtttctttcaataataggctaaggaaagacatgtttttctcttttaaatctctgcaactccaaagtagactccttcgaacgtatttaatttggccttttcagctttcttcttgcccagctctgtcgaattcatgggtgtgtgtgcacatgttggtttcactcacccagagtaattttgtgagcatgcatgtgctttttaatttctgcttgaatgtttgtcctgctgtgttgcagcttctaaagacattgtcaccgagtgtgtgtgactcaaagatcaagagtgaggctaaactgcgaccccaacatcacttccttcatggaaaggtgttggcgctgatgtagctcatggaaggatcagactgggaaccacagaggaaggatgaggtgggatgtggaggtcagagcatctcacgagagtccctcaggctctgcaacactagattcgaatatgagcctagggtttccccaacacgtgcgtgcatatgaaaccacatcatgattcccgacgtgagttagatgagggagagtttgtgtaactccacacccaggagggtaagccactttattatcatgctttggggctgtgcttaagaatttaagctctgttttaaagccgaagaagaaaacatttgaatttaccttcatatgccactaagaacaaaagctctgaagttcttcctgctggcaccaaatattaggattacaagctgtctctctgacaccagtggtaaaaaagcaagtagaatagtttctgagtctgtgttgcagcctctgacacgtggctcaccgctgtcatttgggggatggaatgaacagtcactgttctatagcatcctcctgtgctcttacctaaggaatctaaattgtcctagccttccattgctatgcactgaatgaggactactctcgtgtgtgtgtgtgtgtgtgtgtgtgtgtgtgtgtgtgtgtgtgtgtgtgttggatctactaacatgtttagcaaatggctctgacagggtggccatgagcagatgagaccagctcttgcttggttggaagccacactgcagtttgcagtttagcctttggtgtctcagtggcttcttgcttattccatgctttttctatcccatcctctctctgtgccctcctgcaatggcagccttggcacaatgcctgggtgtcctcatccttgctttactctggaaagtgtggggatggagaggatggtgcatttccagtgcttccttacctgtcaataacaatggtggccacctgggtcccagcacttggctggtggagagatttttttcattatggagctaataaagggtccctacgttttacattgattaatgaattatcacccagacatgtgcagatgaaatgtcaatataagaaaaatcaaggtatttgggaaacatgggcataatcaggtagttttgctaaaattcctcttccttggtctacataaagaagacatgggtctgtcatagaatggggacattagactgaaaactgggacaacccccttccttattttatagagactaggagttaaggggcctgcctaagattgcagtgataaagaactgaaccctaaatcagctcccactaatgaaaccctgctttccttgtatcttttaaactcagttctgcatccaacttgagaagaaaaaaagcttctttccatatcaagtaccatatgagttcatttaaactgcaccttgcagaaatgcattgccagaaagcaccagtagcctcctatctgcaagcagagtagtgctctgctctggggaggggtcattggaaaccataatgcagagtgggccccctactccatttcccagcaaaaggctccagctggagggatgggttgtggggcaacctggttcctgctaactgccagattgaatgtgtgggctagaatgcctgcacatttagttaaactgggctcagcatgcttgtcctcaaaatgtccatcctggtcacagcacacaagatggctattggtctgcttttaccctaccctgtactatacatgaaaattccagttattaacacactcaaactggtggagcttgttcaccctaggaaggggattgtatatatggcaggcttccctggtgccgatgtaaagggctacatttgggaacatttgacttccttgggactcttaagtgcataatgatggcatgaagtaaaaggggcctcaatgatgataggaaaatcagttcttttaaaatttcttcaagaaaatccaggctatcacatagtctttctgtgtgacttattaggagataggaagagcattgggaaacttgcacagctagctatgcatctacattttggtttggggttagttatgaaatgttcttaatatgacgtgttcaataacttcacataaacttcctgttctccaaaacctcaaagagatagagttaatgagttgttgtttttttttaaatgggggtagttttctatctgtcatgggctctagcatctactccgctacccaattctgtcatctccaagctgagtttcctcttctgaggcagaggctggagcagttctttttcagttctcatcctctccatcccaatccagtatatcaatcaactctaactcggagacgtctagctggcaatgtttctaaaactttcactggatttctttagacattgaagcaaacatttttttctaagaattgcttctcagatgatgatatcaaatgtatatgcttttgcaagtttgaaaagttcaaattaaccacttttgactaggtaagtctttctaaaaaccatttaaagctaactgggtcttagcatcctcctgtgtatggaagagacaggtgaccgctccaggttgggtgctcacagaacccttttcctgactctcatggaagatggtggaaggaaaatagactgtctcatcaaccctcctgtgtcctctgaagcaatctcagtttttattaaccacctcttctgtgtttctggtagctatttaacctgtatttaatctgtacttcctatgccagcctcaattttatttgatttttacaattattctcttctaaccaatgaagtgtttgtcagtatgccccaaagcttgctcttttgtgctcccttttgaataactttctatccagaaaaagagattatttgggacttgagatttgcagtgataccaacttatagcaatgatgtactttaagggaactacccaactatgttgtgatagaagaaagagaaaccttcactttggcatttttttttaatcactgtttatttttctgtttgcggcccaggaagcagtgggaggtggtggcagatatgctttgcatatggattgttatgtttttatttgggcaagtttaatcatggaaaactcaaaaagaaggggggaaatggtcagtttaagccaaaagaaactttctaaacaatgtataggtacacagcaaaattaaacaaatccaacaatttctgaagcttagtgtaattgagtggtggttgttattcaataaaattattcccaaaagtgtttctcctaagagtgcagttcccatgagtcacttcctgaacccattgaccaaaggtggacagagacaatcctgtagaccttgacattcagaaagatgtgagctgcttactgatcatatatgcatacgtttctttacagcagaggaaaccattgtccacaaaactgatgttcttttggggttttatgtacagacttgtccaatcatgtgtgtggttcctgcgagttgctgatgactccgcattgaagctctctgagttctttgattttaagttgggtttatggaattttttcaaatgttggaaggtgtgtggttcttcctgccctccctccccttttggaaatatgaaagcaaatgtttagaagaattccttttgaaaagctgtgtcgtgttccctgtgaaactgagcaggtgtgtgttggcgcgctaagtgccacatgcttgtgtgtagaggaggaggtggccctgccggctccgcgctgctgtgcctgtgatccctacctgctccccgctcctgttgccagcagcactcactgcactcctttgtcatatactctgcatcactgtcatactcacaacttcgtgaataaagttgtgtgctttattcgtagaaaaaaaaaaaa

SEQ ID NO: 699 - DNA, 3812 bp, Homo sapiens
aatcaaaaaactaattcttccaaagagcgactcttactgtttctcatggtgagaagacaatatttgctttctctttttcctttcttccggatgagaggctaagccataatagaaagaatggagaattattgattgaccgtctttattctgtgggctctgattctccaatgggaataccaagggatggttttccatactggaacccaaaggtaaagacactcaaggacagacatttttggcagagcatagatgaaaatggcaagttccctggctttccttctgctcaactttcatgtctccctcctcttggtccagctgctcactccttgctcagctcagttttctgtgcttggaccctctgggcccatcctggccatggtgggtgaagacgctgatctgccctgtcacctgttcccgaccatgagtgcagagaccatggagctgaagtgggtaagttccagcctaaggcaggtggtgaacgtgtatgcagatggaaaggaagtggaagacaggcagagtgcaccgtatcgagggagaacttcgattctgcgggatggcatcactgcagggaaggctgctctccgaatacacaacgtcacagcctctgacagtggaaagtacttgtgttatttccaagatggtgacttctatgaaaaagccctggtggagctgaaggttgcagcactgggttctaatcttcacgtcgaagtgaagggttatgaggatggagggatccatctggagtgcaggtccaccggctggtacccccaaccccaaatacagtggagcaacgccaagggagagaacatcccagctgtggaagcacctgtggttgcagatggagtgggcctatatgaagtagcagcatctgtgatcatgagaggcggctccggggagggtgtatcctgcatcatcagaaattccctcctcggcctggaaaagacagccagcatttccatcgcagaccccttcttcaggagcgcccagccctggatcgcagccctggcagggaccctgcctatcttgctgctgcttctcgccggagccagttacttcttgtggagacaacagaaggaaataactgctctgtccagtgagatagaaagtgagcaagagatgaaagaaatgggatatgctgcaacagagcgggaaataagcctaagagagagcctccaggaggaactcaagaggaaaaaaatccagtacttgactcgtggagaggagtcttcgtccgataccaataagtcagcctgatgctctaatggaaaaatggccctcttcaagcctggtgaggaaatgcttcagatgaggctccaccttgttaaataaattggatgtatggaaaaatagactgcagaaaaggggaactcatttagctcacgagtggtcgagtgaagattgaaaattaacctctgagggccagcacagcagctcatgcctgtaatcctagcactttggaaggctgaggagggcggatcacaaggtcaggagatcaagaccatcctggctaacacggtgaaaccccgtctctactaaaaatacaaaaaataaaaaattagccgggcatggtgacgggcacctgtagtcccagctactcgggaggctgaggcaggagaatggcatgaacccggaaggcagagcttgcagtgagccgagatcacgccactgcactccagcctgggagacagagcgagactctgtctcaagaaaaaaaaaaaaaaaaaaaaagaaaagaaaattaacctctgagtataaagcatcagtgggcagaatcaatgtggggagggaaacaacaaaaatgtagaaagaggatccttgttgcttcttggggccgcatcagggtattgggttaggcagatactgaccttactttcatttcccctctggtcactagacccctggggctttcaccaatgacattgatgagagaatcacattcagggcaggctagggacacggggttctggaaggacctcctcagcatggcccaagccttgcatgctgtggctcttaaatccaggaaaaatggctgaccccatggacacctcctcaaactctctgcagcagatgtaattctgtatccagacatggcaaatgccatcctccttgtttctgaggaccagaggagtgtacagcgtgctgaggagccccatgacctaccagacaaccctgagagatttgaatggcgttactgtgtgcttggctgtgaaagcttcatgtcagagagacactactgggaggtggaagtgggggacagaaaagagtggcatattggggtatgtagtaagaacgtggagaggaaaaaagtttgggtcaaaatgacaccggagaacggatactggactatgggcctgactgatgggaataagtatcgggctctcactgagcccagaaccaacctgaaacttcctgagcctcctaggaaagtgggggtcatcctggactatgagactggacatatctcgttctacaatgccacggatggatctcatatctacacatttctgcacgcctcttcctctgagcctctgtatcctgtattcagaattttgaccttggagcccactgccctgaccgtttgcccaataccaaaagtagagagttcccccgatcccgacctagtgcctgatcattccctggagataccactgaccccaggcttagctaatgaaagtggggagcctcaggctgaagtaacatctctgcttctccctgcccagcctggagctaagggtctcaccctccacaacagccagtcagaaccataaagctacaggcacacactgaagcactttactgatattcattcaattattccataggacagttgtttgagtttggtgccaccttattggcccctttatacagataaggaaactggggtgtagaaaagtgtattgactttacaaagcagacaggaatagtgaacaacagagctgggatctgaacaacaatgactaacattaatggagaatttaaaacgttctgagtgctgtgttatgagctttggtgggtgtcactcctttaatcctcacaacaccctgtcaggtagtctcatttggcaagtatggaagcagaggcagggcaacattaagtagcttacataactcacacggtaatttgtgcagttgggagatgttcagcttcagtccctggccaattgcccgttcttttccagcctgatttttcctgcatgggaagagcccacatgtagccctgaggttcccttcccaggacagctccaggatcgagatcactgtgagtggttgtggagttaagacccctatggactccttcccagctgattatcagagccttagacccagcactccttggattggctctgcagagtgtcttggttgagagaataacgttgcagttcccacagggcatgtgactttgaaagagactagaggccacactcagttaataatggggcacagatgtgttcccacccaacaaatgtgataagtgatcgtgcagccagagccagccttccttcagtcaaggtttccaggcagagcaaataccctagagattctctgtaatattggtaatttggatgaaggaagctagaagaattacagggatgtttttaatcccactatggactcagtctcctggaaaaggatctgtccactcctggtcattggtggatgttaaacccatattcctttcaactgctgcctgctagggaaaactgctcctcattatcatcactattattgctcaccactgtatcccctctactgggcaagtgcttgtcaagttctagttgttcaataaatttgttaataatgctgactcttcaa

SEQ ID NO: 700 - DNA, 3675 bp, Homo sapiens
cgaccacccggcctcggccaataagcgccgccctctcgcccccgtgttactgggtagaagaaaacaaaaacaaacagagcgagaagggccagagactctccgaggcggcggcagagacagaagagcggggtcggggccggctgaccaggaacctgggcgagcagcggcgggggcccgagggattctgaaggaagatttccattaggtaatttgtttaatcagtgcaagcgaaattaagggaaaatggatgtagaaaatgagcagatactgaatgtaaaccctgcagggtattttccctaattctccatggtgcttcaatagcatgttattatcataaaaatgaacagttttgtggaatagatgaccaaatatcctgataacttaagtgactctctcttttccggtgatgaagaaaatgctgggactgaggaaataaagaatgaaataaatggaaattggatttcagcatcctccattaacgaagctagaattaatgccaaggcaaaaaggcgactaaggaaaaactcatcccgggactctggcagaggcgattcggtcagcgacagtgggagtgacgcccttagaagtggattaactgtgccaaccagtccaaagggaaggttgctggataggcgatccagatctgggaaaggaaggggactaccaaagaaaggtggtgcaggaggcaaaggtgtctggggtacacctggacaggtgtatgatgtggaggaggtggatgtgaaagatcctaactatgatgatgaccaggagaactgtgtttatgaaactgtagttttgcctttggatgaaagggcatttgagaagactttaacaccaatcatacaggaatattttgagcatggagatactaatgaagttgcggaaatgttaagagatttaaatcttggtgaaatgaaaagtggagtaccagtgttggcagtatccttagcattggaggggaaggctagtcatagagagatgacatctaagcttctttctgacctttgtgggacagtaatgagcacaactgatgtggaaaaatcatttgataaattgttgaaagatctacctgaattagcactggatactcctagagcaccacagttggtgggccagtttattgctagagctgttggagatggaattttatgtaatacctatattgatagttacaaaggaactgtagattgtgtgcaggctagagctgctctggataaggctaccgtgcttctgagtatgtctaaaggtggaaagcgtaaagatagtgtgtggggctctggaggtgggcagcaatctgtcaatcaccttgttaaagagattgatatgctgctgaaagaatatttactctctggagacatatctgaagctgaacattgccttaaggaactggaagtacctcattttcaccatgagcttgtatatgaagctattataatggttttagagtcaactggagaaagtacatttaagatgattttggatttattaaagtccctttggaagtcttctaccattactgtagaccaaatgaaaagaggttatgagagaatttacaatgaaattccggacattaatctggatgtcccacattcatactctgtgctggagcggtttgtagaagaatgttttcaggctggaataatttccaaacaactcagagatctttgtccttcaaggggcagaaagcgttttgtaagcgaaggagatggaggtcgtcttaaaccagagagctactgaatataagaactcttgcagtcttagatgttataaaaatatatatctgaattgtaagagttgttagcacaagttttttttttttttttttttaagcacttgttttgggtacaaggcatttctgacattttataaacctacatttaaggggaatttttaaaggaaatgttttttcttttttttttgtttttcgagggggcaaggagggacagaaaagtaacctcttcttaagtggaatattctaataagctaccttttgtaagtgccatgtttattatctaatcattccaagttttgcattgatgtctgactgccactcctttctttcaaggacagtgttttttgtagtaaaatcactggtttatacaaagctttatttagggggtaaagttaagctgctaaaaccccatgttggctgctgctgttgagatactgtgctttgggagtaaaaaaagaaagttatttctttgtcttaaagaatttttaaaaaattagtcatgagacttattcatctttccagggaacatactgattggtcttaaaagactagacagttaagtaaaaggtggctggaacatctatttttctacaaaactggaaaaatgaacctggttctagaagaatgtacaccaaaataaaacatgtgaagcagtattgattctttattgggagtacatttttttaggtctcttaaactttaatttcacacagtaaattttgaatctcataaggaagcatatttgaacctagtcaatttaatcttagtgttcccttgaaaactttttttccctacaaaattttaagtgaaaaatacaatagtaaattaagattacactggggaaaaaaatgcaggtatcactttactccattgttatctgacctagagcttaattaagttttagaaatatgtaataccttccatcattccatcatccttaaattctgttaccaaataatggctaatgttacaaaaagttatactccagagacccaaagcttgacatttacctaatgtatgagaaaatattaccaattaacaataaagaatgatcatatttttaacctcttttacatagcctaataactcagcaaggcctcaacgtctgtgctaatttaaactgccaaatattgactgcagcaaacaagaattatattcagaatttatgagggtactgttaggagtatactgcttacaggtttagatatagtctgttagaattaaaaccaagtttagtgttcatatttacctcatgggctttatcaagcccatattacctcagcttatatatagttaccatttttaggtttttaattgtttgacacttggatgataaatgcagtcattttattctcaagtgcttaaaattaatgtaattaaaagcttagctgactacagaataggtgagggtttcttaaaaatgagatttaagggctgggcacggtggctcatgcctgtaatcccagcactttgggaggccgaggtgggcggatcacttgaggttgggagttcatgaccagcttgaccaacatgaagaaaccctgtctctattaaaaatacaaaagtagccaggcatggtggcgcatgcgtgtaatcccagctacttgggaggctgaggcaggagaattgcttgaacctgggaggcagaggttgcagtgagtcgagatggtgccattgctctcgtttgggcaacaagagtgaaactcttgtctcaaaaaaaaaaaaaaatgaggtttaagacagttttgtcattactggtgggatctggtcacacaagatagcattaaacgtgacatggcacataaaattggttaaaaaattttgttttttaattacgtaatgtaaaagcccaacaaacactttatgcaagattggaatgtatcttcaaattcagatttaataaacatgtaaagatcctctgtaaaaaaaaaaaaaaaaaaaaa

SEQ ID NO: 701 - DNA, 1437 bp, Homo sapiens
agaacccgccccggaggggagggacgcagggaagagtcgcacggacgcactcgcgctgcggccagcgcccgggcctgcgggcccgggcggcggctgtgttgcgcagtcttcatgggttcccgacgaggaggtctctgtggctgcggcggcggctgctaactgcgccacctgctgcagcctgtccccgccgctctgaagcggccgcgtcgaagccgaaatgccgccaccccggaccggccgaggccttctctggctgggtctggttctgagctccgtctgcgtcgccctcggatccgaaacgcaggccaactcgaccacagatgctctgaacgttcttctcatcatcgtggatgacctgcgcccctccctgggctgttatggggataagctggtgaggtccccaaatattgaccaactggcatcccacagcctcctcttccagaatgcctttgcgcagcaagcagtgtgcgccccgagccgcgtttctttcctcactggcaggagacctgacaccacccgcctgtacgacttcaactcctactggagggtgcacgctggaaacttctccaccatcccccagtacttcaaggagaatggctatgtgaccatgtcggtgggaaaagtctttcaccctgggatatcttctaaccataccgatgattctccgtatagctggtcttttccaccttatcatccttcctctgagaagtatgaaaacactaagacatgtcgagggccagatggagaactccatgccaacctgctttgccctgtggatgtgctggatgttcccgagggcaccttgcctgacaaacagagcactgagcaagccatacagttgttggaaaagatgaaaacgtcagccagtcctttcttcctggccgttgggtatcataagccacacatccccttcagataccccaaggaatttcagaagttgtatcccttggagaacatcaccctggcccccgatcccgaggtccctgatggcctaccccctgtggcctacaacccctggatggacatcaggcaacgggaagacgtccaagccttaaacatcagtgtgccgtatggtccaattcctgtggactttcagcggaaaatccgccagagctactttgcctctgtgtcatatttggatacacaggtcggccgcctcttgagtgctttggacgatcttcagctggccaacagcaccatcattgcatttacctcggatcatggtttcctcatgaggacaaatacctgattttgaataaagcagcattcagttgaaataaccctttctgtggtaattccaagtgaatatttttcttctaggtgatgagtttctacttcctctggtttttacaacaggaaatgaaatggtatctaaaataaacaagctgtggtatgatgattattcaaaaaaaaaaaaaaaaaaaaaaaaaaaaaaaa

SEQ ID NO: 702 - DNA, 3181 bp, Homo sapiens
gcggtgagcgctggggctgcgcgggcggcaggcaacggctgaggcggcggcggcggcggcggcggcgtgggttgggctcgagcgggcggcggcgcctcagactccccggaacgggagcccacgcgggcgggcgcctgaaacaaagggaagcgggcgtccgggcgccgcgggtgggcggtcagtcggtcagcgcggagccagccagcgggtgcccgcgcaagccccgagcgcggccggccggcgcggcctcagggcgggaagatgccgcgcgtcgtgcccgaccagagaagcaagttcgagaacgaggagttttttaggaagctgagccgcgagtgtgagattaagtacacgggcttcagggaccggccccacgaggaacgccaggcacgcttccagaacgcctgccgcgacggccgctcggaaatcgcttttgtggccacaggaaccaatctgtctctccagttttttccggccagctggcagggagaacagcgacaaacacctagccgagagtatgtcgacttagaaagagaagcaggcaaggtatatttgaaggctcccatgattctgaatggagtctgtgttatctggaaaggctggattgatctccaaagactggatggtatgggctgtctggagtttgatgaggagcgagcccagcaggaggatgcattagcacaacaggcctttgaagaggctcggagaaggacacgcgaatttgaagatagagacaggtctcatcgggaggaaatggaggtgagagtttcacagctgctggcagtaactggcaagaagacaacaagaccctagtcctggttccaatttaggtggtggtgatgacctcaaacttcgttaattaatagcacagcagatgtgtgctgcccatctttacatacacattgcttctagttggcagaaataattgattaaaagaccagaaactgtgataactggaggtactacggtctatttctcaaccttaggcagtaatagacatcacaaactgccatggttttgcactatgattataatacctgcatttctaattttttaagcatgtagccagtaataatttgaagttttttttctatgcaagcttaccttgttggcattattttagggagttgaaactatcaactgtaaagctccttttcttccactttaatttaaaagttcatgtcatttaaaaacaagtcaagaaattaaaattgtatcagagggttttctctaatcattttttctatttttttttttgtacttctagatgttttggttatacagcttcattttagatgagcattcttattttttgttttgtttgccccatttccttttgtgtttttatagtctatagcattttaaaactgctgatgttgtttgcattatttacaggctaaaaacttagtagcatagagctgtctgccacagccttctgacaaagtttacagttattaaagttgcagtatccttttaaatgctagtaatcagcactctttcttttttttttttttaatagagacagggtctcgcagtgttgcccaggctggtctcgaactcctggcatcaagcgatcctcctgccttagcctcccagagtactgggattacaggctctttctttttaaacataaaagttttaaattggtattaactctgtactctgccctagattgttttagcttctgttctgtaatcatgagtttggttggagatattctccatagatgatcttctactgaaatgcctaaagaagtcacaggctggcttctgttttattcagggatttttttaaaaagtcaatcagaaaagggatactggagcttcttcatgtatgtaacagcatattaaactggagacagtgatgaatcagctacaaaggtaatattgtattaaaatcatgtttaagatagctgcttttatgtgtattttatattgcatgcttttgtaaaaacatgctgggtgatgaaagattagttttagagagaaaatgttcatctgtgcagaggatgcattttcttccattaattctggaaaaaacgttcacagttatatatatggtattttgcaaaaggactattaatagaaccttttgagatgaattaatgtaagaatattttttaaataggcttactgtcaaattgcaactttttttttagatacagagtggaaaacagtgctaagtcatttggcacctccttacaaatatttttcatggtcacatttattaaatgttactacatttctgaatttttgaaaaatgtattttatcattaaatggcattattttaaagggtgaaaaactgacacagtcaattcagaaaatggactgaagtctgaataaggtcattgcatttaaaaagcatataactgtacttgactgatgagggaggtgttactttcattgtatataggtcttatttcataaacagatatcctgtatcaaataaaagtatttgttatatatttgaagttatgcatggaaaggagtgtgtttaaattgttacaaacaataatgcgtcattaaaggccatgctgatcttgcataactataagtactatgaatgaatttggttggttttggtgttgtacagctcacatgtttacacactcagtgccctaatttcccctgagggaatcgctttttaagtgatccttacagtggtgttttatgttactttattacagagctccttggttttttacttctgcacttaaatttttttaaataacatgatgatggtacattttcctctattgtctagctaagggctttcggtccaccagtaaataagatcaaatgctcttaaatgttcctgttaccatcctaatgtaaatactggatttttctgtcatttagcaccatgctgcttctgtctgtcttaatgctggcattaagatcatgagccctttttctccagtagtacaggctttgaaaactacttctattaagttattgatgcaatttgatattttttcataatctatatttaaacaaaattacatcattgcatcatcttttctaaattcatctccattaaaacttgccttaagctaccagattgcttttgccaccattggccatactgtgtgtttgtttgtttaatttactttcacaataaacttctgtgtagtaaaaaaaaaaaaaaaaaaaaaaaaaaaaaaaaaaaaaaaaaaaaaaaaaa

SEQ ID NO: 703 - DNA, 3505 bp, Homo sapiens
agtttcactttcccttttgtaacgtcagctgaagggaaacaaacaaaaaggaaccagaggccacttgtatatataggtctcttcagcatttattggtggcagaagaggaagatttctgaagagtgcagctgcctgaaccgagccctgccgaacagctgagaattgcactgcaaccatgagtgagaacaataagaattccttggagagcagcctacggcaactaaaatgccatttcacctggaacttgatggagggagaaaactccttggatgattttgaagacaaagtattttaccggactgagtttcagaatcgtgaattcaaagccacaatgtgcaacctactggcctatctaaagcacctcaaagggcaaaacgaggcagccctggaatgcttacgtaaagctgaagagttaatccagcaagagcatgctgaccaggcagaaatcagaagtctggtcacctggggaaactatgcctgggtctactatcacatgggccgactctcagacgttcagatttatgtagacaaggtgaaacatgtctgtgagaagttttccagtccctatagaattgagagtccagagcttgactgtgaggaagggtggacacggttaaagtgtggaggaaaccaaaatgaaagagcgaaggtgtgctttgagaaggctctggaaaagaagccaaagaacccagaattcacctctggactggcaatagcaagctaccgtctggacaactggccaccatctcagaacgccattgaccctctgaggcaagccattcggctgaatcctgacaaccagtaccttaaagtcctcctggctctgaagcttcataagatgcgtgaagaaggtgaagaggaaggtgaaggagagaagttagttgaagaagccttggagaaagccccaggtgtaacagatgttcttcgcagtgcagccaagttttatcgaagaaaagatgagccagacaaagcgattgaactgcttaaaaaggctttagaatacataccaaacaatgcctacctgcattgccaaattgggtgctgctatagggcaaaagtcttccaagtaatgaatctaagagagaatggaatgtatgggaaaagaaagttactggaactaataggacacgctgtggctcatctgaagaaagctgatgaggccaatgataatctcttccgtgtctgttccattcttgccagcctccatgctctagcagatcagtatgaagacgcagagtattacttccaaaaggaattcagtaaagagcttactcctgtagcgaaacaactgctccatctgcggtatggcaactttcagctgtaccaaatgaagtgtgaagacaaggccatccaccactttatagagggtgtaaaaataaaccagaaatcaagggagaaagaaaagatgaaagacaaactgcaaaaaattgccaaaatgcgactttctaaaaatggagcagattctgaggctttgcatgtcttggcattccttcaggagctgaatgaaaaaatgcaacaagcagatgaagactctgagaggggtttggagtctggaagcctcatcccttcagcatcaagctggaatggggaatgaagaatagagatgtggtgcccactaggctactgctgaaagggagctgaaattcctccaccaagttggtattcaaaatatgtaatgactggtatggcaaaagattggactaagacactggccataccactggacagggttatgttaacacctgaattgctgggtcttgagagagcccaaggagttctgggagagggaccagattggggggtaggtccacgggcttggtgatagaattatttctcgattgacttcttgagtgcaatttgaactgtaacatttgcttagtcacctttagtggagtaatctactgggcttgtttctatatttatataaagcagccaaatccttcatgtaatattgaagtccatttttgcaatgttgttccatacttggagtcattttgcatcccatagaggttagtcctgcatagccagtaatgtgctaagttcatccaaaagctggcggaccaaagtctaaatagggctcagtatcccccatcgcttatctctgcctccttcctcctccttcccagtctatcatcaaccttgagtattctacacaatgtgaattcaagtgcctgattaattgaggtggcaacatagtttgagacgagggcagagaacaggaagatacatagctagaagcgacgggtacaaaaagcaatgtgtacaagaagactttcagcaagtatacagagagttcacctctactctgccctcctcatagtcataatgtagcaagtaaagaatgagaatggattctgtacaatacactagaaaccaacataatgtatttctttaaaacctgtgtgaaaaaataaatgttccaccagtagggataggggaaaagtaaccaaaagagagaaagagaaaggaatgctggtttatctttgtagattgtaatcgaatggagaaatttgcagtattttagccactattaggaattttttttttttgtaaaatgaagactgaactctgttcaaatgctttcatgaacctggtttgagacggtaggaaagcaacaaaacgtgggaacctggtgactaagggcctggtgcaaggacttgggaaatgtcattgataatagatggtggggttttcccccctttagaaatgttggatattaagtgatataaacacttcttttaactccgaaaatcttctgagaaatcacaaaattcacggtatgcttggaacgattgagattttctaggtagatgctgaatagcctagacatcaaagttggtgtgaaccaaaatagagtcagctgacccagcatcagccacactctgggttggaaaatgtttgcctgttggaattaatttaagcttaagtatatatcaacattattttattgtgcaattaaaacaatacaaattcatggttttttaaagttaaaaattctaaccactgtaacaacagtttttgtgttattttctgtattaaacatcttgttgcacgcatttgaggtcatcagggtgcaaaatttgtattcctgaaaatgtcatatattttcattaataaataacctaaatatgataaaacataaagcagtgttctggttcatctggaattttgctgtactttaaatctttcagactcagctactgataaatgaaacgttacacaggtgtgaaccaaatccaaataacctcgactggtctactatcataatcacctgaacagaacaaaactttttcctcagctttaagagtccagggcttcggataacagctgccatctgccacctgctaccattgacctacgtgaacacagacattctgtctccaccttgatggtgggtgggctgctccccttttctttgttaaattttgtgctttcatcacattttctctattctgacctctgttatgagaaataaaagtcactgattccattttaaaaaaaaaaa

SEQ ID NO: 704 - DNA, 1674 bp, Homo sapiens
ccttccttcctctcccaggcccgagccatggcaacagcgtgacgtgggggtaccgagatctgcgggagcagcggtcccggcttcagttctagcctacccggcagcctggacgggagcaaggcgagaggtgctgccgcctcccgtcgcccctgcgctcagaggtcccgaaccagcccagccgctgcctcttgccgctccgcctttggagtgaggagggcgcagcccgcgtcagaacttagagggccaggcagggtcgcgcgcatggcctgggcgggctcgcggcgggtcccagctgggacgcgcgcggcagccgagcgctgctgccggctctcgctcagcccgggcgcgcaaccggccccgcccccaggccctctgccaccgccgcgaccaatgaggtttctgacctcctgcagcctcctcttgcctcgggctgcccagatcttggcggctgaggctggcttaccttcgagccgttccttcatgggatttgctgctcccttcaccaacaagcgaaaggcttactcggagcgtagaatcatggggtactcaatgcaggagatgtatgaggtggtgtccaacgtccaggagtatcgtgagtttgtgccctggtgtaagaagtctctggtggtatccagccgtaagggtcatttgaaagcccagctggaggttggctttccacctgtcatggaacgttacacctctgcagtttccatggtcaaacctcacatggtcaaggctgtttgtactgatggcaagctcttcaaccacttagagactatttggcgattcagccctggtattcctgcctatcctcgaacctgcactgtggacttttcgatttcctttgaatttcgttctctgctgcactcccagctggccaccatgttttttgatgaggttgtcaaacagaatgttgctgcctttgagcgtcgggcagccaccaagtttggtccagaaacagccatcccccgtgaactgatgttccatgaggtgcaccagacttgaggcaagggattgctccctgacctcccttctaccccacttccctacacaattctcttatttatttggtttggctcctgttccaatttgaaaggagtctgtgttcataatactgtttctcctctcaatttcccagaaattgggttctatgctggctggaaatgttgggggaaagagaaggcaaaggatgtggaaatgagatgtgcttaggaaagggtcaggcccatcgtaggagcaccatatgcctgcagccttttcactacgaattagaataaggactatgtggttgtctctggaccttatcaagacaccttagtgtctgaccaggggacgatagtaacttttctaaggattgaataaattgagcttttcttctggcacagaggtactgagtggtaagtaacttttaccctgcctgagattcctcaggagaaaaggcaacctgcctccagcctgaaatacataaagcctcattttaagactgtaagtccatgctgcctggctactagagagcaaggggctttcttaccaccagtgctgaggagaaaagtactgaacggaaacggagttgtctttgtactcttgagttgtaccttattcttccacttggcctgagtttttataaaatttcaataaattgtgacagtgtgaaaaaaaaaaaaaaaaaaaaaa

SEQ ID NO: 705 - DNA, 2717 bp, Homo sapiens
agtgtcgcgataaatgggcgccggcggagcggagggagatccgagcggcggcggcaagctggctgcgagcggctgagcagcactccaagctcgccggcctttggtctccaggacttgtcccagcagcccctcgaactgagaattacaccatcggacccctggctctgaggccttcagacttggactgtgtcacactgccaggcttccagggctccaacttgcagacggcctgttgtgggacagtctctgtaatcgcgaaagcaaccatggaagacctgggggaaaacaccatggttttatccaccctgagatctttgaacaacttcatctctcagcgtgtggagggaggctctggactggatatttctacctcggccccaggttctctgcagatgcagtaccagcagagcatgcagctggaggaaagagcagagcagatccgttcgaagtcccacctcatccaggtggagcgggagaaaatgcagatggagctgagtcacaagagggctcgagtggagctggagagagcagccagcaccagtgccaggaactacgagcgtgaggtcgaccgcaaccaggagctcctgacgcgcatccggcagcttcaggagcgggaggccggggcggaggagaagatgcaggagcagctggagcgcaacaggcagtgtcagcagaacttggatgctgccagcaagaggctgcgtgagaaagaggacagtctggcccaggctggcgagaccatcaacgcactgaaggggaggatctcggaactgcagtggagcgtgatggaccaggagatgcgggtgaagcgcctggagtcggagaagcaggagctgcaggagcagctggacctgcaacacaaaaaatgccaggaagccaatcagaaaatccaggaactccaggccagccaagaagcaagagcagaccacgagcagcagattaaggatctggagcagaagctgtccctgcaagagcaggatgcagcgattgtgaagaacatgaagtctgagctggtacggctccctaggctggaacgggagctgaagcagctgcgggaggagagcgcgcacctgcgggagatgagagagaccaacgggctgctccaggaagagctggaagggctgcagaggaagctggggcgccaggagaagatgcaggagacgctggttggcttggagctggagaacgagaggctgctggccaagctgcaaagctgggagagactggaccagaccatgggcctgagcatcaggactccagaagacctttccagattcgtggttgagctgcagcagagggagcttgccttgaaggacaagaacagcgccgtcaccagcagcgcccgggggctggagaaggccaggcagcagctgcaggaggagctccggcaggtcagcggccagctgttggaggagaggaagaagcgcgagacccacgaggcgctggcccggaggctccagaaacgggtcctgctgctcaccaaggagcgggacggtatgcgggccatcctggggtcctacgacagcgagctgaccccggccgagtactcaccccagctgacgcggcgcatgcgggaggctgaggatatggtgcagaaggtgcacagccacagcgccgagatggaggctcagctgtcgcaggccctggaggagctgggaggccagaaacaaagagcagacatgctggagatggagctgaagatgctgaagtctcagtccagctctgccgaacagagcttcctgttctccagggaggaggcggacacgctcaggttgaaggtcgaggagctggaaggcgagcggagtcggctggaggaggaaaagaggatgctggaggcacagctggagcggcgagctctgcagggtgactatgaccagagcaggaccaaagtgctgcacatgagcctgaaccccaccagtgtggccaggcagcgcctgcgcgaggaccacagccagctgcaggcggagtgcgagcgactgcgcgggctcctgcgcgccatggagagaggaggcaccgtcccagccgaccttgaggctgccgccgcgagtctgccatcgtccaaggaggtggcagagctgaagaagcaggtggagagtgccgagctgaagaaccagcggctcaaggaggttttccagaccaagatccaggagttccgcaaggcctgctacacgctcaccggctaccagatcgacatcaccacggagaaccagtaccggctgacctcgctgtacgccgagcacccaggcgactgcctcatcttcaaggccaccagcccctcgggttccaagatgcagctactggagacagagttctcacacaccgtgggcgagctcatcgaggtgcacctgcggcgccaggacagcatccctgccttcctcagctcgctcaccctcgagctcttcagccgccagaccgtggcgtagcctgcaggctcgggggcatagccggagccactctgcttggcctgacctgcaggtcccctgccccgccagccacaggctgggtgcacgtcctgcctctccagccccacagggcagcagcatgactgacagacacgctgggacctacgtcgggcttcctgctggggcggccagcaccctctccacgtgcagaccccatgcgtcccggagcctggtgtgtgggcgtcggccaccagcctgggttcctcaccttgtgaaataaaatcttctcccctagacacaaaaaaaaaaaaaaaa

SEQ ID NO: 706 - DNA, 9145 bp, Homo sapiens
acgtccctcgtggagccgccgacgtcagcagtcgaatggcaacattgtggcgatgctgaggcgcagagtttaggagacgggttcatcagtcaggccggctccgggctttctgcagcagcaccaggggcgggggcggggatcttgacctgggcgagcgaccgggacgcatacagcgccggcctgaccccgcgggacccgcgcctcaccaccggagcgccgcagacgcagctccacggcctcgcgcggggggcggcgggcggccgcgaggcgctgcggcagcgcggagcttgtaaacagatccggccgcaggtgaccatgtgaactacctgctcccgggacgcttattgtccttctctcgatccgcgccacaaaggagctcggcggtcggggcgcggagggacaggcgaacgagccgggagagccggccggcgcactaagatggctgaaggcgcccggcgagggtgagcggggggcgcggcgcagccagcggggagtcctcgggcgggccgggccggcggcccttccccgcggcgagaagccggagccaccatgtcgttcgcgctggaggagacgctcgagtcggactgggtggctgtgcggccccatgtgttcgacgagcgcgagaaacacaaattcgtctttattgtggcctggaacgagattgagggcaagtttgccataacctgccacaaccggacggcccagaggcagaggagcggctcccgggagcaagcgggggcgcgagggggcgccgaggccggcggagctgcgtccgacgggagccgcgggcccggcagcccggcgggcaggggtcggcccgaggccactgcctctgcaactctggttaggagccccgggccccggcggagctcggcctgggcggagggcggctctcctcggagcactcgcagccttctgggggacccgcggctgcggagtcctggcagcaaaggggcggagagtcgtcttaggagcccagtgcgggccaaacccatcccgggtcagaaaacatctgaagccgacgatgcggcgggggcagccgctgcagcagcccggccggcgcccagagaggcccaggtgtcctctgtacggatagtgagcgcctctgggacggtctccgaggagatagaggtgctggaaatggtgaaggaggacgaggcacctctggcgctctcggacgcggagcagccgccgcccgccaccgagctggagtctccggccgaagagtgcagctgggccggactgttttctttccaggacctgcgcgccgtgcaccagcagctgtgctcggtgaactcgcagttggagccgtgcctgccggtgttccccgaggaaccttcgggcatgtggactgtgctgtttgggggcgcccccgagatgaccgagcaggaaatcgacactctgtgttaccagctccaggtctacctgggccacggcctggacacctgcggctggaagatcctctcccaggtgctcttcaccgagaccgatgatcccgaggagtattacgaaagcctcagcgagctgcggcagaagggctacgaagaagtgcttcagcgggccaggaagcgcatccaggagctcttggataagcacaagaatacagagagcatggtggagcttctggacttgtatcagatggaggatgaagcctacagcagccttgcagaagctacaaccgaactctatcagtatttactacagccattccgagacatgagagaacttgccatgctacgaagacagcagatcaagatttccatggagaatgattatctgggacctcgaagaattgagagtctacaaaaagaagatgctgattggcagcggaaagctcacatggctgtactgtctattcaagatcttactgtcaagtactttgaaataacagctaaagctcaaaaagctgtgtatgatcgaatgcgagctgatcagaagaaatttggtaaagcatcatgggcagcggctgctgaacggatggaaaaactccagtatgcagtttctaaggaaactttgcagatgatgagagctaaagagatatgcttggaacagcggaaacatgcactaaaggaagagatgcagagtttgcggggtggtacagaagcgatagcacgattggatcagttagaagctgattattatgatctgcaacttcagttgtatgaagtacagtttgaaatcttgaagtgtgaagagttactattgacagcgcaactagaaagcatcaaaagacttatatcagaaaaaagagatgaagtggtatactatgacacttacgaaagcatggaggccatgctggagaaggaagagatggcagcatctgcgtacttacagagagaagagctgcagaaacttcagcagaaagcacgccagctggaagcaagacgtggacgggtttctgccaagaaatcctacctcagaaataaaaaggaaatatgtattgcaaaacacaatgaaaaaatccaacagcgcactcggattgaagatgaatatagaacccatcacacagtacaactaaagagagaaaaattacatgatgaagaagaaagaaaaagtgcctgggttagccaagagagacagagaacactggatagacttcgaacatttaaacagaggtatcctgggcaagtcatacttaaatcaaccagattacgactagctcatgcaagaagaaaaggtgcagcaagtcctgttctccaagaggatcattgtgactctttaccaagtgtgttacaggtagaagagaaaactgaagaggtgggagaaggaagagtcaagcgtgggccatcacagacaacagaaccccagagccttgtgcaacttgaagatacttcattaacacaacttgaagccacctcattacctctcagtggtgttacctctgaactgcctcccactatatctcttccacttttgaataacaacctcgaaccatgttctgttaccataaatccactcccatcccctcttcctccaacaccaccacctcccccacctcctccccctcccccaccaccaccacctctgcctgttgctaaggacagtggcccagagacactggagaaagatctgcctagaaaggaggggaatgagaagaggatcccaaagtcagccagtgccccctcagcacacctctttgacagcagccagctggtcagtgcacggaagaagctcagaaagactgctgaaggtttgcagaggaggagagtgagctcacccatggatgaggtgctagcctccttgaagcgtggtagttttcatctgaaaaaggttgaacagcgaactctgcctccttttcctgatgaagatgatagtaataatatcttggcacaaataaggaaaggggtaaaattgaagaaggtacagaaggatgttttgagagaatccttcacacttctacccgatacagaccctctaacacggagcatccatgaagctcttagaagaattaaagaagcatccccagagtcagaggacgaagaggaggctttaccttgcacagactgggagaactaacaagtgacataacagaagaaaaatatcattcaagattggttctgattcttttggaaaatgacagtttaagcacttggttcctcagttggataacattagatccaaagttcattggttcagtggtgtgaagaaaggaagcacaattggcaggttatcactttccagtcgttccaatagatgatggttaacatgaattttacatgtgcaatgttcctgactgcaatgaagaaaaggccttctggagatttctgttttttaagcacattctccttccatccacatatttacatccttgtaatggccagttaagctagggcttgctgtaagttggaagaacactgggttgacagagatctactgtgagctgtattgggactgctttgagaaccatctttcaatgcactgaaaagtcatctgaaaaaatagcttcttccatatcagcttatattaaatactgtgacactctgagaaagtttatcatcatgatagctgtaagtcaggcattaaaatcaaatggaaatacacctaaaatgtccgcattactcatttccaaaggatttttcataaagatgttcagcaacatctgaaaagctgcatttatggagatacatctattaatatgttcacaacatgatacatttaacatggcatatttttaggagtcttatactttgtaaggttttgaagtttccgtgcttttaaatcactcttcatatttcttgaatttataatagtttgaattttatgtgcatccttgtttatggaaggcagtactttgataatatttcaaattatttttattttgtttgaattattgcttgattgctatgactgacatgactttcctattgagaatcaaaaatcaagattcaatcatagggatgcagatcttaactcttttcacaaattaccattttaagtttttatttttatgctccacagtgaaaagcatgtgctctacaaagatagaaagtagagacaagtctccgtggctggcatttcaccatcttcacatgcactgaatggaattttgggagaatgcctttgttatagtcactaaaattttaaacttatacacagctttaggtgctgattttggctgtgatggagtcctgaaggacacatttatatgttccagattttcagcaggattgttgtgggcttgaatacatgtagatcattggactcagtgtgcagtaccctgtacatataattctgcataagacagatcttggcctttctgtggagggagttaagaactaaaataccaaaaatcactttatttcttttaagacaattatctggcctaaacccagaaagcagtactggagcaaaagcccagtgtatatgaattggtattcctagagaaaaaaagaaatgctcacacctttgttattttaaagtgttttcttgaaaataattagggagaaaattttctggcaacaggttatgtaagacaacaactttttttattatttcaaaacaaaacaggcacatgccaccatgccccagctaatttttatattttttatagagacagggttttgccatgttgcccacgctggtcttgaactcctggactcaagcaatctgccagcctcggcctgctaaagtgctaggattataggcgtgagcctctgtgcccagcctgacaaaatcttttatttatttaaatgttagtaatacgtttattgatgagactaggagcttctctgcagcatcttcataatacattggttttagttcccacactattcccacatcttatctgggaagattagaaatacagatgtaatatggaagcttcaacagcatgggggtggtgatagtgtcctatttgcccttggtaaaatattaaagcgtatttcttaacccaaagagtgattggttatatgaatatatttgaaaaagttaaagcaaatttgcaaacctttacaaaatcatgtatcaattttatgctatccagtttttacgtacccatgtgtcaacatttcatatatccagttctttgggtgctggttcactttttttcatttattcaaattcagaaaaatacggacggatctaatgttaaattaaccagaaaccctggaacattcatatcttgagagggaatttgctactcttttacttttgggatttcattataaaataggctcattttatacatatgtcctgtggtctgtcttccagagtgtgctgtaatcataagtctctagcaaagagtggagggtggagggtgtgtagaactccactcagcctcatggatacatctacaagtctctcaacccatcctgttacagttctccatgagagtcacctcacacttggaaaagaaggaggttaaagcagagtattgttggcagccagctatgcccatcctcttgtaaataactttccaacacacccatttccttgccttaaggtgcaggttcctacttctacaaaatttcaaatgattgcaggtcaaaaacctttggagttactcacaaataataataaaatttcaaataactagggtctacttgtccatcaagatgacattaccagtggaacccacctgttaattttaaagtagcttcagaacccaacaaaaattatgtaagcctggttaaatgtccttttttcttcttgcctctaataaaatcaggatcttcggccttgatactaaatatgtgtatatttagttatgatggtacttgtagatgctcacatttccagttccaaactcgcccgtactttttatgtgcttcaaaatattggacacatttctgttaatatatgatttctgtatccacaaaccgctgtttgcttatgctgagtcaatttagaagttaatttccaatctagtctcaactgcaatgcatttaaaataggtaaaacaagtaaatgagtttgggacattttgagattaatgttactgcccacttgactgtcaatttcaaatggctcctaatgcaaccaaaattataaccaatgtagcatgtgtaggaaaggtatttttaattatttaaaatcattgtgtatattacagcagtatgaggaatgcctggctaaagaggattttttaaaagatgaagaatggttttgcttgtattatataggcttactgagtttgtgagcagcataaaaacaatcattccttaattcttcattgtggaactgaaatatttctgtaatgcattttttaaaaggagactcctagacacagctgtaatagtgggaatagaaatgtagagcttttctcataacacaaaaccagaaaataattttcagcactttgacttactctatgtaataaggaaaaaaattgtttccacaaagttgaactatgtagtaatatttggtaacatatggcatggccactttatatcacagaatgtgtgtcaagttgcaaagcatacttgggccatagtagacactaagaattaaaactcttaaatcagtgaaacaaaaactaatgggcagcattctctctgtttggaatgggatcagtatacaattaatacaatttaattttacacattccctaagacaccatttttaagttacagtcacatgagtgtttgtataaatttaagtcaatgcttttagcctaggcaaagctaaatacaaggtttttggggttttcttttttcagctttattattgaagtattacaaacttaacatcagataccaatgtgtaaaaagtactattgggtccttaagggctctatcagggagttgaaatttcatacgctttaccaggttacttgtaaaaaatgaacagctgtaagacatttcaaaaccattgcagacacattgttaaaatgcagccatttgataatgaaagcagaaaccttaagttttacctaattattgcactaaatgtaaatgataacataaaattaagtgtgcattttaaacagattctatttcccacttactgcttagcatagaaaaagagctatggttagaggagtgaccagcaagatttatttcagatggaaaaggggtgagaaagtggaagcaccttactgttagagcatgttgcatctatttagtgctactgaacaattcagtagttatttctgaactttgctgcaaagtgctctttagttaaagcacattaagaagggtcactgcttaattgctttgtaaaatgaagcaatggtattttttatccgatatagtgtaatttaaaagttttcctacaaagtgagtttatattgttgcctaaactatgttatgtaagcaaagggtttggaaaggcgggagggagtctagattcggcgagagtgtgcgtttgtgtgtgtgaatgtatgaaaagtttccccattgggttattcttaagatgtgtttattgtaaagttttctacgttttgcccacagtaaatgtacaacttcgcaattgtaggatttaattgattgaattccaaatttatactgtctcttcccttctgcagagacattatgccactgtaaggtgcatgtacagaaaatacctctgaggttgacttgttaaataactgatgaatgttatttcacactgaatctcaaagcagtcatttgttttgcgggttaggggaaagttttgttttttgctggtgttttttgttgtttttaattaggcacactaagagtggctaaatttgggggaattggtggataggaaagaccttgaaaagtgatgtgtagatgaaaacacaaggtatggatgttggttacagagttcagttttaacaagggaaatttggggattttttttttttttacttgcatgttctatgggtagctatcaaagggtgtaacaaattattccagcttttcccaatactaattatattggttttaaaaagtctgcataatcactaggtggcattttcccttcatttgtgaaccaagaggggtaaatgatgctacccatacagtgacttctgagttctttaactttgacagaatctccattgtttcattgaatttctcattgtattatatgtctttccaagtgtgcaaactataatatgtagttaatgaaaaatggaaggctgcagattattttgcatgaataattaattgcccattagggctaaggagactgacatgatttttatcggttctgggtaaatgaaaattttaatggaaaactcattcaccatttactagctttgtgcaatattataaaaggtagaagcaaaacactagcacattgtgctttgcttggcttgtaaggatggctttagtaccattacattaaatggacagtgtgcacagtgtattgtaaatgccaactcttgcaaatttacaatacttaaatatgttcaattaacatcctaaagtattaaaagtacagaggaaaaactaagcaagcatttatagcaataccatgaaatctccagtaatcgttttgactgttgccttttgctctttagtgcagcttttctgcattgtaattgtattgctttgtatttcatgttttttacactcatgacttcagagttaagtacttgtacaccaagtattgcaatcacctttctcttgttgtacatgcaatgtaacaacctacagttttggtgcttttaacaatattcctctttttctttaataaaggatatttatttgaattaattaaaaaaaaaaaaaaaaaa

SEQ ID NO: 707 - skipped

SEQ ID NO: 708 - DNA, 735 bp, Homo sapiens
gctgcccctgaaccccagaacaaccagctggatcagttctcacaggagctacagcgcggagactgggaaacatggttccaaaactgttcacttcccaaatttgtctgcttcttctgttggggcttctggctgtggagggctcactccatgtcaaacctccacagtttacctgggctcaatggtttgaaacccagcacatcaatatgacctcccagcaatgcaccaatgcaatgcaggtcattaacaattatcaacggcgatgcaaaaaccaaaatactttccttcttacaacttttgctaacgtagttaatgtttgtggtaacccaaatatgacctgtcctagtaacaaaactcgcaaaaattgtcaccacagtggaagccaggtgcctttaatccactgtaacctcacaactccaagtccacagaatatttcaaactgcaggtatgcgcagacaccagcaaacatgttctatatagttgcatgtgacaacagagatcaacgacgagaccctccacagtatccggtggttccagttcacctggatagaatcatctaagctcctgtatcagcactcctcatcatcactcatctgccaagctcctcaatcatagccaagatcccatctctccatatactttgggtatcagcatctgtcctcatcagtctccataccccttcagctttcctgagctgaagtgccttgtgaaccctgcaataaactgctttgcaaattc

SEQ ID NO: 709 - DNA, 2249 bp, Homo sapiens
cgggccctgggcggggccttcccggctgacggcctgcgtgcactgcgcttgcgcgggttgagggcggtggctcaggctcctggaaaggaccgtccacccctccgcgctggcggtgtggacgcggaactcagcggagaaacgcgattgagagcagtgtgtggattacactatcactggaaaaatacgaattgagaagaaggaaaagactggaagatgcagaccttggttcctgttagtggaaacactgtaaggtcccagaaatggaaaagaaaatgaaataaatcagcagttatgaggcagagcctaagagaactatggcaacatcaggtgactgtcccagaagtgaatcgcagggagaagagcctgctgagtgcagtgaggccggtctcctgcaggagggagtacagccagaggagtttgtggccatcgcggactacgctgccaccgatgagacccagctcagttttttgagaggagaaaaaattcttatcctgagacaaaccactgcagattggtggtggggtgagcgtgcgggctgctgtgggtacattccggcaaaccatgtggggaagcacgtggatgagtacgaccccgaggacacgtggcaggatgaagagtacttcggcagctatggaactctgaaactccacttggagatgttggcagaccagccacgaacaactaaataccacagtgtcatcctgcagaataaagaatccctgacggataaagtcatcctggacgtgggctgtgggactgggatcatcagtctcttctgtgcacactatgcgcggcctagagcggtgtacgcggtggaggccagtgagatggcacagcacacggggcagctggtcctgcagaacggctttgctgacatcatcaccgtgtaccagcagaaggtggaggatgtggtgctgcccgagaaggtggacgtgctggtgtctgagtggatggggacctgcctgctgtttgagttcatgatcgagtccatcctgtatgcccgggatgcctggctgaaggaggacggggtcatttggcccaccatggctgcgttgcaccttgtgccctgcagtgctgataaggattatcgtagcaaggtgctcttctgggacaacgcgtacgagttcaacctcagcgctctgaaatctttagcagttaaggagtttttttcaaagcccaagtataaccacattttgaaaccagaagactgtctctctgaaccgtgcactatattgcagttggacatgagaaccgtgcaaatttctgatctagagaccctgaggggcgagctgcgcttcgacatcaggaaggcggggaccctgcacggcttcacggcctggtttagcgtccacttccagagcctgcaggaggggcagccgccgcaggtgctcagcaccgggcccttccaccccaccacacactggaagcagacgctgttcatgatggacgacccagtccctgtccatacaggagacgtggtcacgggttcagttgtgttgcagagaaacccagtgtggagaaggcacatgtctgtggctctgagctgggctgtcacttccagacaagaccccacatctcaaaaagttggagaaaaagtcttccccatctggagatgacagttgatgctttatttggaaagcagtgtgcatatcttgaggggtgatgaacacaagcaaaccaagttgcacctggcttctgcacactcctgcgaaagtcggtgaacattcactccacattgacccctccctagcctggcaggtgacgtcagggtccttcacagacaaacacgcttgggctcggcaggagctgccgtggccacccccgctgcccagtgtctgccctctagaagtaggctgtgtttccaggtgttcacccgtggtgcccacagtgccgacccgtggctgggtcggagctccatgttcctaagctaggtctaggtctacactcctaggacgcacgcatatcagcccgtgtaccctgtgacagtgactgtccccacctcctatgttagtggtgcccttactgccgtcgctcatccactcgtgtgggacgtaggattgcacagggctgtgccagtggcgtgtagggaacactgccctggctcagcgtgcgagctaaggtggtgatgtatgcgatgggactctgcatgggatagtacagttgtgtagacgtcttccaaataaattatgtgttggtccatcgcacatgctcaataaatatttttaaatgagtgaatgtcaaaaaaaaaa

SEQ ID NO: 710 - DNA, 622 bp, Homo sapiens
cataaaccctggcgcgctcgcgggccggcactcttctggtccccacagactcagagagaacccaccatggtgctgtctcctgccgacaagaccaacgtcaaggccgcctggggtaaggtcggcgcgcacgctggcgagtatggtgcggaggccctggagaggatgttcctgtccttccccaccaccaagacctacttcccgcacttcgacctgagccacggctctgcccaggttaagggccacggcaagaaggtggccgacgcgctgaccaacgccgtggcgcacgtggacgacatgcccaacgcgctgtccgccctgagcgacctgcacgcgcacaagcttcgggtggacccggtcaacttcaagctcctaagccactgcctgctggtgaccctggccgcccacctccccgccgagttcacccctgcggtgcacgcctccctggacaagttcctggcttctgtgagcaccgtgctgacctccaaataccgttaagctggagcctcggtagccgttcctcctgcccgctgggcctcccaacgggccctcctcccctccttgcaccggcccttcctggtctttgaataaagtctgagtgggcagcaaaaaaaaaaaaaaaaaa

SEQ ID NO: 711 - DNA, 3374 bp, Homo sapiens
gcggccgccgcccccgggctggggtttgggggaccgagccgctccgggttcgggatgctgaggagaccgcgggcccgcgccagcctcccacacacacacactctcccggcgcctcggccggccgggcgcggtgtgcaggggtgaggcggtgtctccaggctgaggagggacgcggaggagggtccggcgcggccccgggactggagggtgagtccctcacaaagggcggagcggggctgtcacctggagatcacggagggaagttcatccatgagctcggatttcccacattacaacttcaggatgcctaatattggattccagaatctgcctctcaacatatatattgtggtttttggtactgctatatttgtcttcatccttagtttactcttctgttgctacttgattaggctaagacatcaagcacacaaagaattttatgcctacaaacaggttatattaaaagagaaagtaaaagaattgaatttacatgagctctgtgcagtgtgcctagaagacttcaagcctcgagatgagttggggatttgcccatgtaagcacgccttccacagaaagtgccttattaagtggctggaggttcgtaaagtgtgtcccctgtgcaacatgccagttctacagctggcccagttgcacagtaagcaggaccgtggaccccctcaggggccccttcctggggcagagaacattgtatagcttaccgcaaggatcagactgttgctggacacgacgtctgtgtggagccaggaggaacacatgtggtgtctgtatggctgctctctacctaggacaccagctgccacttcttttgcctcatgaagaactcttgggccagccaaactgggaacctaggtgtctgggtcttgtgacaaccaaagcactttgacactaccccctgccgagagaagaggagtggatgagcctgcgggtttgcctcaagaaacttcatgagggtctcttactaactccattacactctctctcctggagcctcatctccatgtcaagcaggagggtaaagaagggaactaagagcaggtctttcaagccacacccccacctgcggatggatgggtttctctgtaggccatgcaggcctttgtcgcagcaaaccttcccagcagcccttgagccaagtaaaaccagcacaaccagccaccagtggttggtgaggcagtgcccacaaggctcatgttgtatgcctttgataaggccatcttggctttgagtagcagtgttcctcgtcacccatttccccctcaggattacaacacctgctatcaaatcatctaagctgaaaacatgagatgcgcttggaaaggcctagtcagaagccatttcctcttatcatttccctctcctatgcaccagtaaggcccgtccagagccccagcagggagtgggccctgagtccacactgtccctgagtgatccaggaggctgcccacatccccacatgtgcactgtggttccagtgtagctgctgtgagcccactgccactgcctcagaagggagccactgtgaacctctcgagtggctccaaagagcagtggctttttgagaatggcccatacttctggcccggctggatgaagggaatgccgaccctttggcctctccccctccttccatctcttctctctcttgccctatctctctttctacttcagaaaaaaaaaaaaaaaaaaaaaaaagcctgtcattcactttttaacactttatcccaaataagatccctgtgtaattctgaagctggtgatccacttggaattgtagatagtttcaggaagctcctgcagggctgtccaccgttggtgtgtgcctcagtatttggacttccgaaactgaaagtgaaagtgtctttataggagagaaacgcatgctgctctttggctctttctgtccaacttttctagaaatgactcaaagtccattaagatttgtgaatattgtataaattagctatggaaagtagcaggtcagatggaaaattcttttccacagccctgctctccgcctccctccatcttaggagcgcctgcctcaattcctcgtcaactgctttgctccactccatcccacaggtgtgagtgggggaagtttttcattaggaatacagtctgcgtgacatggagaatggatggagggagctttgctactctgctcttggcatgactccaggatttttttctggaatccaacctctgtcctcttaggagaaggaacctgtccttggttcagatggctgggcatgaggaggaaaatttccattagtgtagaacagtgctggacagaatccggtttggaaaattacaaatccagttggtcaaaataggccatttcctatgtgtgacctattcgtggtatgccaactggactgcttcctaaacaggacgaggaaagtgaggaatatttttatatgaaagccttagcctgtctggcacccatgaaaaaaactatttatgcactcctactttcaccgtctttttgcattctctatttgtagcacaacagagttgaatgccacaaaacaccccgtttatagtgagctgttttcagtgaccaatatcagaaggaggcttgcttctggactagcctcactaattgccagcagccaccattttccatggaatggccttgggacagatgtcacctctgttatggggctctaataggaaagagaatgttttttcccttcctatgatcaatactgcaaattattgctgctcacagcttttataggattctcccaactgaaagttgcaggctttttctgtccctgtgcatcagtactaacaaaagacagcctcaccaagtctgtatatttgaacagaggcaagttaattcatccccccgtgtcagagccacaggcatgttgagggggttgatacgtagcactggaccagggcgcaaagcccagatagttccagccatgagaggagagcacaagaatgctctgcactctgcactcagcaccaccttgggtctgctttgcccagatgagggaccactaacaaccttctcagcacatgtgaatgtggactggttttaaaatgcattcattctgctaggattgggctggaagctggaacagtgagagtactttttctgctcctagtcatctccctttctcagcgtgacatcctcctgcagcaagcctagtatcactagcagtagttcctgcgactcttagcaacacaacccgaatatttgctccctgcatctgggtcctccaccaggatgggcctgcgcatctgcattgctgtacagacaaacaggccttttaatttacatcctcctttaattctcattaaaatcgcagggtttttgtttgaaaaaaaaaaaaaaaaaa

SEQ ID NO: 712 - DNA, 2956 bp, Homo sapiens
gacagggccgcggacgcccgggcagccacggcggcggggccgcggcgggcgccggctcagcccgcccctttctcccgccgcctccccgccccgccccgcgccgcgccggccgctgtcagctccctcagcgtccggccgaggcgcggtgtatgctgagccgctgccgcagcgggctgctccacgtcctgggccttagcttcctgctgcagacccgccggccgattctcctctgctctccacgtctcatgaagccgctggtcgtgttcgtcctcggcggccccggcgccggcaaggggacccagtgcgcccgcatcgtcgagaaatatggctacacacacctttctgcaggagagctgcttcgtgatgaaaggaagaacccagattcacagtatggtgaacttattgaaaagtacattaaagaaggaaagattgtaccagttgagataaccatcagtttattaaagagggaaatggatcagacaatggctgccaatgctcagaagaataaattcttgattgatgggtttccaagaaatcaagacaaccttcaaggatggaacaagaccatggatgggaaggcagatgtatctttcgttctcttttttgactgtaataatgagatttgtattgaacgatgtcttgagaggggaaagagtagtggtaggagtgatgacaacagagagagcttggaaaagagaattcagacctaccttcagtcaacaaagccaattattgacttatatgaagaaatggggaaagtcaagaaaatagatgcttctaaatctgttgatgaagtttttgatgaagttgtgcagatttttgacaaggaaggctaattctaaacctgaaggcatccttgaaatcatgcttgaatattgctttgatagctgctatcatgacccctttttaaggcaattctaatctttcataactacatctcaattagtggctggaaagtacatggtaaaacaaagtaaatttttttatgttcttttttttggtcacaggagtagacagtgaattcaggtttaacttcaccttagttatggtgctcaccaaacgaagggtatcagctattttttttaaaattcaaaaagaatatcccttttatagtttgtgccttctgtgagcaaaactttttagtacgcgtatatatccctctagtaatcacaacattttaggatttagggatacccgcttcctctttttcttgcaagttttaaatttccaaccttaagtgaatttgtggaccaaatttcaaaggaactttttgtgtagtcagttcttgcacaatgtgtttggtaaacaaactcaaaatggattcttaggagcattttagtgtttattaaataactgaccatttgctgtagaaagatgagaaaacttaagctttgttttactacaacttgtacaaagttgtatgacagggcatattctttgcttccaagatttgggttgggggcactaggggttcagagcctggcagaattgtcagctttagtctgacataatctaagggtatggggcaaggatcacatctaatgcttgtgttccttatactctattatatagtgttattcatgattcagctgatcttaacaaaattcgtagcagtggaaccttgaaatgcatgtggctagatttatgctaaaatgattctcagttagcattttagtaacacttcaaaggtttttttttgtttgttttctagacttaataaaagcttaggattaattagaagaagcaatctagttaaatttcccatttgtattttattttcttgaatacttttttcatagttatttgtttaaaaagatttaaaaatcattgcactttggtcagaaaaataataaatatatcttataaatgtttgattcccttccttgctatttttattcagtagatttttgtttggcatcatgttgaagcaccgaaagataaatgatttttaaaaggctatagagtccaaaggaatattcttttacaccaattcttcctttaaaaatctctgaggaatttgttttcgccttacttttttttcttctgtcacaatgctaagtggtatccgaggttcttaatatgagatttaaaatcttaaaatgtttcttattttcagcacttacatcatttggtacacagggtcaaatagggcaaataattttgtctttgtataatagatttgatatttaaagtcactggaaataggacaagttaatggatgtttttatattttaatagaatcatttatttctatgtgttatgaaattcacttaatgataaatttttcaacatacttgccattagaaaacaaagtattgctaagtactataacatattggccactaaaattcatattgagattatcttggtttcttggaagagataggaatgagttcttatctagtgttgcaggccagcaaatacagaggtggtttaatcaaacagctctagtatgaagcaagagtaaagactaaggtttcgagagcattcctactcacataagtgaagaaatctgtcagataggaatctaaatatttatagtgagattgtgaaagcaaccttaaagttttgaagaagactgatgagactaggtgctttgcttcctttcatcaggtatctttctgtggcatttgagaacagaaaccaagaaacatggtaattactaaattatgaggctttgctttttgtttgcttttaagtagaaaaacatgttggcaacattgagttttggagttgattgagataatatgacttaactagttttgtcattccatttgttaaagatacagtcaccaagaatgttttgagttttttgaaagaccccaatttaagccttgcttatttttaaattatttccattcagtgatgttggatgtatatcagttatttagtaaataatctcaataaattttgtgctgtggcctttgctaaaaaaaaaaaaaaaaaaaaaaaaaaa

SEQ ID NO: 713 - DNA, 5403 bp, Homo sapiens
ctcgctgccgccggagtttccaggtctcgacttcactgctctgtgtcctctgctccaggaggcccagcctgtgtggccctgtgacctgcaggtattggagagccacagctaagatgccaggaacccctggaagcctagaaatgggactgttgacatttagggatgtggccatagaattctctccggaggagtggcaatgtctggacactgcacagcagaatttatataggaatgtgatgttagagaactacagaaacctggccttcctgggtattgctctctctaagccagacctgattacttatctggagcaaggaaaagagccctggaatatgaagcaacatgagatggtggatgaacccacaggtatatgtcctcattttcctcaagacttttggccagagcagagcatggaagattcttttcaaaaagtattactgagaaaatatgaaaaatgtggacatgagaatttacagttaagaaaaggttgtaaaagtgtggatgagtgtaaggtgcacaaagaaggttataataaacttaaccagtgtctcacaactgcccagagcaaagtatttcaatgtgggaaatatttgaaagtcttctataaatttttaaattcaaacagacatacgataagacatactggaaagaaatgcttcaaatgtaaaaaatgtgtcaagtcattttgcatccgtttacacaaaacccaacataaatgcgtttatattacagagaagtcctgtaaatgtaaagaatgtgaaaaaacctttcattggtcctcaacccttactaatcataaggaaattcatactgaagataaaccctacaaatgtgaagaatgtggcaaagcttttaagcagctctcaacccttactacacataaaataatctgtgctaaagagaaaatctacaagtgtgaagaatgtggcaaagcatttctatggtcctcaaccctaactagacataagaggatacacactggagagaaaccctacaaatgtgaagaatgtggcaaagcttttagccattcttcaacccttgctaaacataagagaattcatactggagagaaaccctacaaatgtgaagaatgtggcaaagcttttagccgttcttcaacccttgctaaacataagagaattcatactggagagaaaccctacaaatgtaaagaatgtggcaaagcttttagcaattcctcaacccttgctaatcataagataactcatactgaagagaaaccctacaaatgtaaagaatgtgacaaagcttttaagcgactctcaacccttactaaacataaaataatacatgctggagagaaactctacaaatgtgaagaatgtggcaaagcttttaatcgatcttcaaatcttactatacataagtttattcatactggagagaaaccttacaagtgtgaagaatgtggcaaagcatttaactggtcctcaagccttactaaacataaaagatttcatactagagagaaacccttcaaatgtaaagaatgtggcaaagcatttatatggtcttcaaccctaactagacataagaggatacacactggagagaagccctacaaatgtgaagaatgtggcaaagcttttaggcaatcctcaacccttactaaacataagataattcatactggagagaaaccctacaaatttgaagaatgtggcaaagcttttagacaatccttaacccttaataaacataagataattcatagtagagagaaaccctacaaatgtaaagaatgtggcaaagcttttaagcaattctcaacccttactacacataaaataattcatgctggaaagaaactctacaaatgtgaagaatgtggcaaagcttttaatcattcctcaagtctttctacacataagataattcatactggagagaagtcttacaagtgtgaagaatgtggcaaagcatttctatggtcctcaaccctaagaagacataagaggatacacactggagagaaaccctacaaatgtgaagaatgtggcaaagcttttagccattcttcagcccttgctaaacataagagaattcatactggagagaaaccctacaaatgtaaagaatgtggcaaagcttttagcaattcctcaacccttgctaatcataagataactcatactgaagagaaaccctacaaatgtaaagaatgtgacaaaacttttaagcgactctcaacccttactaaacataaaataatacatgctggagagaaactctacaaatgtgaagaatgtggcaaagcttttaatcgatcttcaaatcttactatacataagtttattcatactggagagaaaccttacaagtgtgaagaatgtggcaaagcatttaactggtcctcaagccttactaaacataaaagaattcatactagagagaaacccttcaaatgtaaagaatgtggcaaagcatttatatggtcttcaaccctaactagacataagaggatacacactggagagaagccctacaaatgtgaagaatgtggcaaagcttttagccgttcctcaacccttactaagcataagacaattcatactggagagaaaccctacaaatgtaaagaatgtggcaaagcttttaagcactcctcagcccttgctaaacataaaataatacatgctggagagaaactctacaaatgtgaggaatgtggcaaagcttttaatcaatcttcaaatcttacgacacataagataattcatactaaagagaaaccttccaagagtgaagaatgtgacaaagcatttatctggtcctcaacccttactgaacataagagaattcataccagagagaaaacctacaaatgtgaagaatgtggcaaagcatttagccagccttcacaccttactacacataagaggatgcacactggagagaaaccctacaaatgtgaagaatgtggcaaagcttttagccaatcctcaacccttactacacataagataattcatactggagagaaaccctacaaatgtgaagaatgtggcaaagcttttaggaaatcttcaactcttactgaacataagataattcatactggagagaaaccctacaaatgtgaagaatgtggcaaagcatttagccaatcctcaaccctaactagacatacgaggatgcacactggagagaaaccatacaaatgtgaagaatgtggcaaagcttttaatcgatcctcaaagcttactacacataagataattcatactggagagaaaccttacaagtgtgaagaatgtggcaaagcatttatatcatcctcaaccctaaatggacataagagaattcatactagagagaaaccctacaaatgtgaagaatgtggcaaagcatttagccaatcttcaaccctaactagacataagaggttgcacaccggagagaaaccctacaaatgtggagaatgtggcaaagcctttaaagagtcctcagctcttactaaacataagataattcacactggagagaaaccctacaaatgtgaaaaatgtggcaaagcctttaaccagtcttcaatccttactaaccataagaaaattcatactatcacacctgtaatcccactactttgggaggccgaggcgggcggatcacgaggtcaggagatggagaccatcctggctaacacagtgaaaccccttctctactaaaaaatacaaaaaattagccgggcgtggtggcgggcgcctgtagtcccagctatgcgagaggctgaggcaggagaatggcgtgaacccgggaggcggagcttgcagtgagccgagatcacgccactgcactcaagcctgggcgacagagcgagactccgtctcaaaaaaaaaaaaaagaaaattcatactagagagaaaccctacaaatataaagaatgtggcaaatcttttaaccggtcttcaacctttactaaacataaggtaattcatactggagtaaaactctacaaatgtgaagaatgtggcaaatcctttttctggtcctcagccctaaccagacataagaaaattcatactggacagcaaccctacaaacaggaaaaatttggcaaagcctttaaccagttttcacaccttactacagataagataactcatattggagagaaatcttacaagtgtgaataatgtggtaaagtctataaaaagtcctgaattcttaacagacataatattattcatactggagagaaactctacaaacctgaaagatgtgccaacgcttttgacaagtcaaacttttctaaacatcaagaaaatcatgctgctgagaaatcctagaaatgtgaagaatgtgacaaagcctctaaatgattgtcacacttgatcgtaggtaagataattcatactggagaaaactaccagtgtgaacaatgtggccaagctttgaactaatgctcacaccttaatgcataggaaagcatttatgcttgagaaaaagtgaacaaatatagacaaaaagccattaatacctgctcacatcgtactcaaattcagagcgttcatactaaataagaagtgtaattactgtcaaacgactgatcagaaaatatgtctttaaagtacagaagagtattttgaaaaagcattacaaatatgaagaggcattatttatgaccttttctatggaaaggtaaggacattaaaaatgtaagatgcatgatgaaaatttaagtagagaggatctttatggttaacttataatatcgagtgatgcatgaggtagatgttcagattaatattctgcattattatgaaagaaaaacattcttaattttagttaaagtttagtatgatttattgtatttttatgaaatatatgtagcatatttttaaattataaattgcatgtgaacttttcaaccaaacagttttaacatgttaaatactatcatgaattcaatgaagtgttattatgccagtaactttaacctattccaccttactcaagggtgtaggtaaaagatggtaaaaatacactatttggtaagataatggactgacatctctagtgattttttttgccagtgagttttaattgccattaagttaaagaatattgttcccataggctaaatttttatttttattttctcatttaaatgtatttgacttaatttttgtggatacctaatatgtgtacatattatgccatatgtggcatattttgatacggacacacaatatataacaatcgcattagactaaatgcggtctccattacctctagcatttattctttgtattacaaataattcaattctacagttttagttatttttaaatgtacaattaaattgttgttgactacaggattatttttatggtcataataaaacttatatacaaacataagtaaaatccataaaaaaaa

SEQ ID NO: 714 - DNA, 4335 bp, Homo sapiens
ttcttaaccctttccagctttcccaccctctttggctttagccatggccttctgatctgtgtttctcaggggacctgcaggccccagatatagccccatgctgtcctcctaccccagagcacactgttcaggctacttccactggtactgaaatccagtatttcacttactctttttctttccaatatcctcatgacattcaatatttcacttactctaggtcctccctgcctaaggcccaagtcaactttctgtccagtgggatttgtaatccaatacctcctagccctagcagaatcccatgtggataatcagaaatgtgactggaaaaaggacagagctctatggctgtgggtcccagtccccactgctggcagtaagtccccagcagtgagctgtgtaagcaccttacattctgcgcttggttgaaaacagcaaggcaagcatccacttgagaaatgtcaacccctaggaaatcccagcctcaagtctttctcatcccttgggaagtgcaaattggatagagaagaaaccaattaaaaacaaaacaaacaaatcatacttagatattctggcttttctcaccagggctggattaaagcatgtacttcaaaataataacaacttaagtcaataaataaatgtaaggaagtccaaatgttcacctgaagacaactgtggtcattttttggcaatcccaggttctcttttctacctgtttgctcaatcgtggtctccctctccctctcttgttggggcccatgcccctgctttactgttgccagaggcttgtacttgtttgccttttaggtaggagcagttacttccactcccctcacctgccataaagcatctttataaacaaagcaagtagaagaaacacatcctggtatccaccacattcggcttttgttgattctgttcacttgggagcacctgctgctagggaataagaaggttgaggctgaagagtgaggactcttcagctcccctctggcaggacccgggagaggaaagagccctcagctggtccatcctccccactcctggtcagccttctgttctgagatcaaagtggtggggtcacattctcgagaactgtgctcagccccctcatctcacaccctttccctctccctgtgtgcctgcccccctcttacataaccatgctggtgattggcaccgtcataaatcaatactttgctcactttcacatcaagtaacactatccagggaggtggtttcaacaaaggaggaagtataaggagatctaggttcaaattaatgttgcccctagtggtaaaggacagagaccctcagactgatgaaatgcactcagaattacttagacaaagcggatatttgccactctcttccccttttcctgtgtttttgtagtgaagagacctgaaagaaaaaagtagggagaacataatgagaacaaatacggtaatctcttcatttgctagttcaagtgctggacttgggacttaggaggggcaatggagccgcttagtgcctacatctgacttggactgaaatataggtgagagacaagattgtctcatatccggggaaatcataacctatgactaggacgggaagaggaagcactgcctttacttcagtgggaatctcggcctcagcctgcaagccaagtgttcacagtgagaaaagcaagagaataagctaatactcctgtcctgaacaaggcagcggctccttggtaaagctactccttgatcgatcctttgcaccggattgttcaaagtggaccccaggggagaagtcggagcaaagaacttaccaccaagcagtccaagaggcccagaagcaaacctggaggtgagacccaaagaaagctggaaccatgctgactttgtacactgtgaggacacagagtctgttcctggaaagcccagtgtcaacgcagatgaggaagtcggaggtccccaaatctgccgtgtatgtggggacaaggccactggctatcacttcaatgtcatgacatgtgaaggatgcaagggctttttcaggagggccatgaaacgcaacgcccggctgaggtgccccttccggaagggcgcctgcgagatcacccggaagacccggcgacagtgccaggcctgccgcctgcgcaagtgcctggagagcggcatgaagaaggagatgatcatgtccgacgaggccgtggaggagaggcgggccttgatcaagcggaagaaaagtgaacggacagggactcagccactgggagtgcaggggctgacagaggagcagcggatgatgatcagggagctgatggacgctcagatgaaaacctttgacactaccttctcccatttcaagaatttccgggtctctctgcagctgcggggggaggatggcagtgtctggaactacaaacccccagccgacagtggcgggaaagagatcttctccctgctgccccacatggctgacatgtcaacctacatgttcaaaggcatcatcagctttgccaaagtcatctcctacttcagggacttgcccatcgaggaccagatctccctgctgaagggggccgctttcgagctgtgtcaactgagattcaacacagtgttcaacgcggagactggaacctgggagtgtggccggctgtcctactgcttggaagacactgcaggtggcttccagcaacttctactggagcccatgctgaaattccactacatgctgaagaagctgcagctgcatgaggaggagtatgtgctgatgcaggccatctccctcttctccccagaccgcccaggtgtgctgcagcaccgcgtggtggaccagctgcaggagcaattcgccattactctgaagtcctacattgaatgcaatcggccccagcctgctcataggttcttgttcctgaagatcatggctatgctcaccgagctccgcagcatcaatgctcagcacacccagcggctgctgcgcatccaggacatacacccctttgctacgcccctcatgcaggagttgttcggcatcacaggtagctgagcggctgcccttgggtgacacctccgagaggcagccagacccagagccctctgagccgccactcccgggccaagacagatggacactgccaagagccgacaatgccctgctggcctgtctccctagggaattcctgctatgacagctggctagcattcctcaggaaggacatgggtgccccccacccccagttcagtctgtagggagtgaagccacagactcttacgtggagagtgcactgacctgtaggtcaggaccatcagagaggcaaggttgccctttccttttaaaaggccctgtggtctggggagaaatccctcagatcccactaaagtgtcaaggtgtggaagggaccaagcgaccaaggatgggccatctggggtctatgcccacatacccacgtttgttcgcttcctgagtcttttcattgctacctctaatagtcctgtctcccacttcccactcgttcccctcctcttccgagctgctttgtgggctccaggcctgtactcatcggcaggcgcatgagtatctgtgggagtcctctagagagatgagaagccaggaggcctgcaccaaatgtcagaagcttggcatgacctcattccggccacatcattctgtgtctctgcatccatttgaacacattattaagcaccgataataggtagcctgctgtggggtatacagcattgactcagatatagatcctgagctcacagagtttatagttaaaaaaacaaacagaaacacaaacaatttggatcaaaaggagaaatgataagtgacaaaagcagcacaaggaatttccctgtgtggatgctgagctgtgatggcgggcactgggtacccaagtgaaggttcccgaggacatgagtctgtaggagcaagggcacaaactgcagctgtgagtgcgtgtgtgtgatttggtgtaggtaggtctgtttgccacttgatggggcctgggtttgttcctggggctggaatgctgggtatgctctgtgacaaggctacgctgacaatcagttaaacacaccggagaagaaccatttacatgcaccttatatttctgtgtacacatctattctcaaagctaaagggtatgaaagtgcctgccttgtttatagccacttgtgagtaaaaatttttttgcattttcacaaattatactttatataaggcattccacacctaagaactagttttgggaaatgtagccctgggtttaatgtcaaatcaaggcaaaaggaattaaataatgtacttttggctaaaaaaaaaaaaaaaaaaaaaaaaaaaaaa

SEQ ID NO: 715 - DNA, 1262 bp, Homo sapiens
tgtgtcacttccggcctccctttagctgccatcttgcgtccccgcgtgtgtgcgcctaatctcaggtggtccacccgagaccccttgagcaccaaccctagtcccccgcgcggccccttattcgctccgacaaggtacaaaaaggctctggacggcggcgtggtaggaggacgggagcgggggcgggaagttccctgaaggagcgagacagggagggacagggcagaggaggagaggaaggcgatgcgacggacaggcgcacccgctcaggctgactctcgggggcgaggtcgagccaggggcggctgccctgggggcgaggcgacgctgtctcaacctccacctcgcggcggaacccgaggacaggagcctcagatgaaagaaacaatcatgaaccaggaaaaactcgccaaactgcaggcacaagtgcgcattggtgggaaaggaactgctcgcagaaagaagaaggtggttcatagaacagccacagcagatgacaaaaaacttcagttctccttaaagaagttaggggtaaacaatatctctggtattgaagaggtgaatatgtttacaaaccaaggaacagtgatccactttaacaaccctaaagttcaggcatctctggcagcgaacactttcaccattacaggccatgctgagacaaagcagctgacagaaatgctacccagcatcttaaaccagcttggtgcggatagtctgactagtttaaggagactggccgaagctctgcccaaacaatctgtggatggaaaagcaccacttgctactggagaggatgatgatgatgaagttccagatcttgtggagaattttgatgaggcttccaagaatgaggcaaactgaattgagtcaacttctgaagataaaacctgaagaagttactgggagctgctattttatattatgactgctttttaagaaatttttgtttatggatctgataaaatctagatctctaatatttttaagcccaagccccttggacactgcagctcttttcagtttttgcttatacacaattcattctttgcagctaattaagccgaagaagcctgggaatcaagtttgaaacaaagattaataaagttctttgcctagtatacagttttatttttttatttcattgacaccgatctgtacacagtaaaaaaaattgcttatagaaagctaatcatggcatgtaatatggctgataacctttggaatttgattaaagatttaaaatcacaaaaaaaaaaaaa

SEQ ID NO: 716 - DNA, 779 bp, Homo sapiens
attctctccttcagcataaaagctgatccacaaacaagaggagcaccagacctcctcttggcttcgagatggcttcgccacaccaagagcccaaacctggagacctgattgagattttccgccttggctatgagcactgggccctgtatataggagatggctacgtgatccatctggctcctccaagtgagtaccccggggctggctcctccagtgtcttctcagtcctgagcaacagtgcagaggtgaaacgggagcgcctggaagatgtggtgggaggctgttgctatcgggtcaacaacagcttggaccatgagtaccaaccacggcccgtggaggtgatcatcagttctgcgaaggagatggttggtcagaagatgaagtacagtattgtgagcaggaactgtgagcactttgtcacccagctgagatatggcaagtcccgctgtaaacaggtggaaaaggccaaggttgaagttggtgtggccacggcgcttggaatcctggttgttgctggatgctcttttgcgattaggagataccaaaaaaaagcgacagcctgaagcagccacaaaatcctgtgttagaagcagctgtgggggtcccagtggagatgagcctcccccatgcctccagcagcctgaccctcgtgccctgtctcaggcgttctctagatcctttcctctgtttccctctctcgctggcaaaagtatgatctaattgaaacaagactgaaggatcaataaacagccatctgccccttcaaaaaaaaaaaaaaa

SEQ ID NO: 717 - DNA, 2102 bp, Homo sapiens
ctgtggccctgaggtgggggtggggtgggggaggcgggaagttggcaacaggaagtgaggagaagagcaaagaaaactgtgagagagagaatttttaaaaagcagctggggcctgaggtttctcccccagtaccctgggtcacctcagcccagagctggcggcaggcccccagcccctcatgtcagagccccctgtgtactgtaacctggtggaccttcgccgctgtcctcggtccccacccccaggccctgcatgccccctgctgcagaggctggatgcctgggagcagcacctggaccccaactctggacgctgcttctacataaattcactgactggctgcaagtcctggaagcccccgcgccgcagtcgcagcgagacgaaccctggctccatggaggggacacagaccctgaagaggaacaatgatgtcctgcaacctcaggcaaagggcttcagatctgacacagggaccccagaaccgcttgacccacagggttcactcagcctcagccaacgcacctcgcagcttgaccctccagccttgcaggcccctcgacctctgccgcagctcctggacgacccccatgaggtggaaaagtcgggtctgctcaacatgaccaagattgcccaaggggggcgcaagctcaggaagaactggggcccgtcttgggtggtgttaacgggtaacagcctggtgttctaccgagagccaccgccgacagcgccctcctcaggctggggaccagcgggtagccggcccgaaagtagcgtggacctgcgcggggcggccctggcgcacggccgccacctgtccagccgccgcaacgtcctgcacatccgcacgatccctggccacgagttcctgctgcagtcggaccacgagacagagctgcgagcctggcaccgcgcgctgcggactgtcatcgagcggctggatcgggagaaccccctggagctgcgtctgtcgggctctggacccgcggagctgagcgccggggaggacgaagaagaggagtcggagctggtgtccaagccgctgctgcgcctcagcagccgccggagctccattcgggggcccgaaggcaccgagcagaaccgcgtgcgcaacaaactaaagcggctcatcgcgaagagaccgcccttacaaagcctgcaggagcggggtctgctccgagaccaggtgttcggctgccagttggaatcactctgccagcgggaaggagacacggtgcccagctttttgcggctctgcattgctgctgtggataaaagaggtctagatgtggatggcatttatcgggtgagcgggaacttggcagtggtccagaagcttcgctttctggtggacagagagcgtgcggtcacctccgatgggaggtatgtgttcccagaacagccaggacaagaaggtcggttagatttggacagtactgagtgggatgacattcatgtggtcaccggagccctgaagctttttctccgggagctgccccagcctctggtgccaccactgctgctgccccatttccgtgctgcccttgcactctccgaatcagagcagtgcctctctcagatacaagaattaataggctcaatgccaaagcccaaccatgacactctacggtacctcctggagcatttatgcagggtgatagcacactcagataagaatcgcatgacaccccacaacctgggaattgtgtttggaccaaccctgtttcggccagagcaggagacatctgacccagcagcccatgctctctacccagggcagctggtccagctgatgctcaccaacttcaccagcctcttcccctgatgcagggaaggaagaagagaaaacatatttccggtcatctctggtggtgagaggctggtgttctgttttgaggatatccctttaaatctcccaaatgactgtctctatcttcatgagtgtgacttgaggtgttgggatgggtgagggagcttctctaaagaggaaagtgagtggattaacccctgcttctcttcttgttccctgttatcattcctccccaacataataatacataaagtggcatggtattttttctgatgcaaaaaaaaaaaaaaaaaa

SEQ ID NO: 718 - DNA, 2276 bp, Homo sapiens
ctcattgaactcgcctgcagctcttgggttttttgtggcttccttcgttattggagccaggcctacaccccagcaaccatgtccaagggacctgcagttggtattgatcttggcaccacctactcttgtgtgggtgttttccagcacggaaaagtcgagataattgccaatgatcagggaaaccgaaccactccaagctatgtcgcctttacggacactgaacggttgatcggtgatgccgcaaagaatcaagttgcaatgaaccccaccaacacagtttttgatgccaaacgtctgattggacgcagatttgatgatgctgttgtccagtctgatatgaaacattggccctttatggtggtgaatgatgctggcaggcccaaggtccaagtagaatacaagggagagaccaaaagcttctatccagaggaggtgtcttctatggttctgacaaagatgaaggaaattgcagaagcctaccttgggaagactgttaccaatgctgtggtcacagtgccagcttactttaatgactctcagcgtcaggctaccaaagatgctggaactattgctggtctcaatgtacttagaattattaatgagccaactgctgctgctattgcttacggcttagacaaaaaggttggagcagaaagaaacgtgctcatctttgacctgggaggtggcacttttgatgtgtcaatcctcactattgaggatggaatctttgaggtcaagtctacagctggagacacccacttgggtggagaagattttgacaaccgaatggtcaaccattttattgctgagtttaagcgcaagcataagaaggacatcagtgagaacaagagagctgtaagacgcctccgtactgcttgtgaacgtgctaagcgtaccctctcttccagcacccaggccagtattgagatcgattctctctatgaaggaatcgacttctatacctccattacccgtgcccgatttgaagaactgaatgctgacctgttccgtggcaccctggacccagtagagaaagcccttcgagatgccaaactagacaagtcacagattcatgatattgtcctggttggtggttctactcgtatccccaagattcagaagcttctccaagacttcttcaatggaaaagaactgaataagagcatcaaccctgatgaagctgttgcttatggtgcagctgtccaggcagccatcttgtctggagacaagtctgagaatgttcaagatttgctgctcttggatgtcactcctctttcccttggtattgaaactgctggtggagtcatgactgtcctcatcaagcgtaataccaccattcctaccaagcagacacagaccttcactacctattctgacaaccagcctggtgtgcttattcaggtttatgaaggcgagcgtgccatgacaaaggataacaacctgcttggcaagtttgaactcacaggcatacctcctgcaccccgaggtgttcctcagattgaagtcacttttgacattgatgccaatggtatactcaatgtctctgctgtggacaagagtacgggaaaagagaacaagattactatcactaatgacaagggccgtttgagcaaggaagacattgaacgtatggtccaggaagctgagaagtacaaagctgaagatgagaagcagagggacaaggtgtcatccaagaattcacttgagtcctatgccttcaacatgaaagcaactgttgaagatgagaaacttcaaggcaagattaacgatgaggacaaacagaagattctggacaagtgtaatgaaattatcaactggcttgataagaatcagactgctgagaaggaagaatttgaacatcaacagaaagagctggagaaagtttgcaaccccatcatcaccaagctgtaccagagtgcaggaggcatgccaggaggaatgcctgggggatttcctggtggtggagctcctccctctggtggtgcttcctcagggcccaccattgaagaggttgattaagccaaccaagtgtagatgtagcattgttccacacatttaaaacatttgaaggacctaaattcgtagcaaattctgtggcagttttaaaaagttaagctgctatagtaagttactgggcattctcaatacttgaatatggaacatatgcacaggggaaggaaataacattgcactttataaacactgtattgtaagtggaaaatgcaatgtcttaaataaaactatttaaaattggcaccataaaaaaaaaaaaaaaa

SEQ ID NO: 719 - DNA, 1069 bp, Homo sapiens
agagcagggcctgacatctccccagaacagacgtttgaacagagcaggcttctgaggtctccaaaatgcctgtcccagcctcctggccccatcctcctggtcctttcctgcttctgactctactgctgggacttacagaagtggcaggtgaggaggagctacagatgattcagcctgagaagctcctgttggtcacagttggaaagacagccactctgcactgcactgtgacctccctgcttcccgtgggacccgtcctgtggttcagaggagttggaccaggccgggaattaatctacaatcaaaaagaaggccacttccccagggtaacaacagtttcagacctcacaaagagaaacaacatggacttttccatccgcatcagtagcatcaccccagcagatgtcggcacatactactgtgtgaagtttcgaaaagggagccctgagaacgtggagtttaagtctggaccaggcactgagatggctttgggtggcccggcatcatcccttactgcgctgctcctcatagctgtcctcctgggccccatctacgtcccctggaagcagaagacctgactctccttccttcctcccctgccacgtgggaccctcatctctgctgcctccttcctttcctgagaggctcagcttgagagaatgagccagtgagaagcttctctagacttggctccaaacatctcccctcccaagacatctgcctgcccacaggctcctgttgctccttcacacagacctggatgccccagagcaaggtcttcattcatggtcctgagcaggtgccatgggattgggctctgggcactgacttaacggcacctccctagaaggcgagaaacatgccaaatctaaacacaccaggactcccatccatcgccttgagactgaccgtaaaccacagacgctctccaggttctcaagagttatcctgccttccagattcctgcctatcccaactccccagccttgttgaggttctctattgcctcttgaatacaaatgcactcccaaagtggttttaagaaaataaaaagattatccttccaaaa

SEQ ID NO: 720 - DNA, 2027 bp, Homo sapiens
agcgcagggcggtaactctgggcggggctgggctccagggctggacagcacagtccctctgaactgcacagagacctcgcaggccccgagaactgtcgcccttccacgatgtggctccgtgcctttatcctggccactctctctgcttccgcggcttgggcagggcatccgtcctcgccacctgtggtggacaccgtgcatggcaaagtgctggggaagttcgtcagcttagaaggatttgcacagcctgtggccattttcctgggaatcccttttgccaagccgcctcttggacccctgaggtttactccaccgcagcctgcagaaccatggagctttgtgaagaatgccacctcgtaccctcctatgtgcacccaagatcccaaggcggggcagttactctcagagctatttacaaaccgaaaggagaacattcctctcaagctttctgaagactgtctttacctcaatatttacactcctgctgacttgaccaagaaaaacaggctgccggtgatggtgtggatccacggaggggggctgatggtgggtgcggcatcaacctatgatgggctggcccttgctgcccatgaaaacgtggtggtggtgaccattcaatatcgcctgggcatctggggattcttcagcacaggggatgaacacagccgggggaactggggtcacctggaccaggtggctgccctgcgctgggtccaggacaacattgccagctttggagggaacccaggctctgtgaccatctttggagagtcagcgggaggagaaagtgtctctgttcttgttttgtctccattggccaagaacctcttccaccgggccatttctgagagtggcgtggccctcacttctgttctggtgaagaaaggtgatgtcaagcccttggctgagcaaattgctatcactgctgggtgcaaaaccaccacctctgctgtcatggttcactgcctgcgacagaagacggaagaggagctcttggagacgacattgaaaatgaaattcttatctctggacttacagggagaccccagagagagtcaaccccttctgggcactgtgattgatgggatgctgctgctgaaaacacctgaagagcttcaagctgaaaggaatttccacactgtcccctacatggtcggaattaacaagcaggagtttggctggttgattccaatgcagttgatgagctatccactctccgaagggcaactggaccagaagacagccatgtcactcctgtggaagtcctatccccttgtttgcattgctaaggaactgattccagaagccactgagaaatacttaggaggaacagacgacactgtcaaaaagaaagacctgttcctggacttgatagcagatgtgatgtttggtgtcccatctgtgattgtggcccggaaccacagagatgctggagcacccacctacatgtatgagtttcagtaccgtccaagcttctcatcagacatgaaacccaagacggtgataggagaccacggggatgagctcttctccgtctttggggccccatttttaaaagagggtgcctcagaagaggagatcagacttagcaagatggtgatgaaattctgggccaactttgctcgcaatggaaaccccaatggggaagggctgccccactggccagagtacaaccagaaggaagggtatctgcagattggtgccaacacccaggcggcccagaagctgaaggacaaagaagtagctttctggaccaacctctttgccaagaaggcagtggagaagccaccccagacagaacacatagagctgtgaatgaagatccagccggccttgggagcctggaggagcaaagactggggtcttttgcgaaagggattgcaggttcagaaggcatcttaccatggctggggaattgtctggtggtggggggcaggggacagaggccatgaaggagcaagttttgtatttgtgacctcagctttgggaataaaggatcttttgaaggccaaaaaaaaaaaaaaaaa

SEQ ID NO: 721 - DNA, 4148 bp, Homo sapiens
atatgtagccttttcattttcatgaaagtgaagtgatttttagaattcttagttgttttctttagaagaacatttctagggaataatacaagaagatttaggaatcattgaagttataaatctttggaatgagcaaactcagaatggtgctacttgaagactctggatctgctgacttcagaagacattttgtcaacttgagtcccttcaccattactgtggtcttacttctcagtgcctgttttgtcaccagttctcttggaggaacagacaaggagctgaggctagtggatggtgaaaacaagtgtagcgggagagtggaagtgaaagtccaggaggagtggggaacggtgtgtaataatggctggagcatggaagcggtctctgtgatttgtaaccagctgggatgtccaactgctatcaaagcccctggatgggctaattccagtgcaggttctggacgcatttggatggatcatgtttcttgtcgtgggaatgagtcagctctttgggattgcaaacatgatggatggggaaagcatagtaactgtactcaccaacaagatgctggagtgacctgctcagatggatccaatttggaaatgaggctgacgcgtggagggaatatgtgttctggaagaatagagatcaaattccaaggacggtggggaacagtgtgtgatgataacttcaacatagatcatgcatctgtcatttgtagacaacttgaatgtggaagtgctgtcagtttctctggttcatctaattttggagaaggctctggaccaatctggtttgatgatcttatatgcaacggaaatgagtcagctctctggaactgcaaacatcaaggatggggaaagcataactgtgatcatgctgaggatgctggagtgatttgctcaaagggagcagatctgagcctgagactggtagatggagtcactgaatgttcaggaagattagaagtgagattccaaggagaatgggggacaatatgtgatgacggctgggacagttacgatgctgctgtggcatgcaagcaactgggatgtccaactgccgtcacagccattggtcgagttaacgccagtaagggatttggacacatctggcttgacagcgtttcttgccagggacatgaacctgctgtctggcaatgtaaacaccatgaatggggaaagcattattgcaatcacaatgaagatgctggcgtgacatgttctgatggatcagatctggagctaagacttagaggtggaggcagccgctgtgctgggacagttgaggtggagattcagagactgttagggaaggtgtgtgacagaggctggggactgaaagaagctgatgtggtttgcaggcagctgggatgtggatctgcactcaaaacatcttatcaagtgtactccaaaatccaggcaacaaacacatggctgtttctaagtagctgtaacggaaatgaaacttctctttgggactgcaagaactggcaatggggtggacttacctgtgatcactatgaagaagccaaaattacctgctcagcccacagggaacccagactggttggaggggacattccctgttctggacgtgttgaagtgaagcatggtgacacgtggggctccatctgtgattcggacttctctctggaagctgccagcgttctatgcagggaattacagtgtggcacagttgtctctatcctggggggagctcactttggagagggaaatggacagatctgggctgaagaattccagtgtgagggacatgagtcccatctttcactctgcccagtagcaccccgcccagaaggaacttgtagccacagcagggatgttggagtagtctgctcaagatacacagaaattcgcttggtgaatggcaagaccccgtgtgagggcagagtggagctcaaaacgcttggtgcctggggatccctctgtaactctcactgggacatagaagatgcccatgttctttgccagcagcttaaatgtggagttgccctttctaccccaggaggagcacgttttggaaaaggaaatggtcagatctggaggcatatgtttcactgcactgggactgagcagcacatgggagattgtcctgtaactgctctaggtgcttcattatgtccttcagagcaagtggcctctgtaatctgctcaggaaaccagtcccaaacactgtcctcgtgcaattcatcgtctttgggcccaacaaggcctaccattccagaagaaagtgctgtggcctgcatagagagtggtcaacttcgcctggtaaatggaggaggtcgctgtgctgggagagtagagatctatcatgagggctcctggggcaccatctgtgatgacagctgggacctgagtgatgcccacgtggtttgcagacagctgggctgtggagaggccattaatgccactggttctgctcattttggggaaggaacagggcccatctggctggatgagatgaaatgcaatggaaaagaatcccgcatttggcagtgccattcacacggctgggggcagcaaaattgcaggcacaaggaggatgcgggagttatctgctcagaattcatgtctctgagactgaccagtgaagccagcagagaggcctgtgcagggcgtctggaagttttttacaatggagcttggggcactgttggcaagagtagcatgtctgaaaccactgtgggtgtggtgtgcaggcagctgggctgtgcagacaaagggaaaatcaaccctgcatctttagacaaggccatgtccattcccatgtgggtggacaatgttcagtgtccaaaaggacctgacacgctgtggcagtgcccatcatctccatgggagaagagactggccagcccctcggaggagacctggatcacatgtgacaacaagataagacttcaggaaggacccacttcctgttctggacgtgtggagatctggcatggaggttcctgggggacagtgtgtgatgactcttgggacttggacgatgctcaggtggtgtgtcaacaacttggctgtggtccagctttgaaagcattcaaagaagcagagtttggtcaggggactggaccgatatggctcaatgaagtgaagtgcaaagggaatgagtcttccttgtgggattgtcctgccagacgctggggccatagtgagtgtgggcacaaggaagacgctgcagtgaattgcacagatatttcagtgcagaaaaccccacaaaaagccacaacaggtcgctcatcccgtcagtcatcctttattgcagtcgggatccttggggttgttctgttggccattttcgtcgcattattcttcttgactaaaaagcgaagacagagacagcggcttgcagtttcctcaagaggagagaacttagtccaccaaattcaataccgggagatgaattcttgcctgaatgcagatgatctggacctaatgaattcctcaggaggccattctgagccacactgaaaaggaaaatgggaatttataacccagtgagttcagcctttaagataccttgatgaagacctggactattgaatggagcagaaattcacctctctcactgactattacagttgcatttttatggagttcttcttctcctaggattcctaagactgctgctgaatttataaaaattaagtttgtgaatgtgactacttagtggtgtatatgagactttcaagggaattaaataaataaataagaatgttattgatttgagtttgctttaattacttgtccttaattctattaatttctaaatgggcttcctaattttttgtagagtttcctagatgtattataatgtgttttatttgacagtgtttcaatttgcatatacagtactgtatattttttcttatttggtttgaataattttcctattaccaaataaaaataaatttatttttactttagtttttctaagacaggaaaagttaatgatattgaagggtctgtaaataatatatggctaactttataaggcatgactcacaacgattctttaactgctttttgttactgtaattctgttcactagaataaaatgcagagccacacctggtgagggcacaaaaaaaaaaaaaaaaaaaaaaaaaaaaaaaaaaaaaaaaa

SEQ ID NO: 722 - DNA, 3556 bp, Homo sapiens
tcgcggcttccggtgctaggtggagggaaggaaggagggagccggggagtgggccagggcagcagccgggctgaagtcggcttggggagccagagggagcggagcggaacctgcggggcagaggcggcggccgcagcggcgcagctgatagcaggaacaggatcaagtcttccataccagggaccaggccaaaaccagactgccactgcccctacttgggccccactgtccccagaaagcagctgctgtgatcatgggcaatatctttggaaaccttctcaagagcctgattgggaagaaggagatgcgcatcctgatggtgggcctggatgccgcaggaaagaccaccatcctatacaagctgaaactgggggagatcgtcaccaccatccctaccattgggttcaatgtggagacagtggagtataagaacatcagctttacagtgtgggatgtgggtggccaggacaagattcgacccctctggagacactacttccagaacacccaagggttgatatttgtggtcgacagcaatgatcgggagcgagtaaatgaggcccgggaagagctgatgagaatgctggcggaggacgagctccgggatgctgtactccttgtctttgcaaacaaacaggatctgcctaatgctatgaacgctgctgagatcacagacaagctgggcctgcattcccttcgtcaccgtaactggtacattcaggccacctgtgccaccagcggggacgggctgtacgaaggcctggactggctggccaatcagctcaaaaacaagaagtgaaagccagacagccctaacaaagcaccccacccacccctgacatacctactgtcaccctgccccagtcctaccccttcctctccatgcaagtgtggccagggccctgggtatcatgtccacatgcccagcaagagccttgcctcccctgcctcccctcctttttcctgtccacctatatgaccaatccctaattgctgtcctgatgatgagtcattccaatttactggatttaaaacaaaaagttgttacggtttcatggggtggcccctctctctctcaccctctgggtttcgggaggtcgagtggggtattctctttgtttggcagtggttgctgtcctcttggcatctgagtcctttccctgtccccacaagcccttctactccctgtttgcctttcctttgccaccctctccctgttttacatggaaattgcacgggcctctctgtgtttgcgtgcatgtgtgcgcctgtatatacatgtatagagagatatatttgtgggggccggggggagcggggagggggtggagtgaagctcagggcttgcagccaggacactgcccactggagcctgtcatctgccccttccgtgttggtgagattaagggaagaaggtgggagggcattagtcaagccggactgccccagtctttgactggttaccctcctctctgcaggtaggtttttctggatgataggacagatgatggattcttcaccaccattttccttgtactcttctctccacccttcttagggctggaggatggcatttatctctagatgactgttcccaaggagatgccactctgctctgccttactgttgggaaggagagaggaacccactcactcttatcagcttagagtgttcaactgatccttccccaccatcttcagatctgttcctctggagcttgactggggggtggggatggcaagtccatggtgtgtgttagggacccagggcattgggggaagggaggcgaaggcctgaggttttccatcttcattctcttttgttattaggagaaggtgaggcatgggccaatcccattcctgccttccagtgccccaccacccttctgatcttaggggttggatgggtcatctgtccttggtcagaattttctcaccctagtactcctactggcctgaccagggctgactgggtattctaatgaggagctgggaagtggggtgacatagctgaccttagtatcaacccccctcttctccaactcttgttttctagtccaggatatgctaaaggacgaagattttctattgtttccaggccctcagaccatccttgctgtcccttcaccctccatgcccctgccatcctcactcacttctcataaatggatctgggggttagagtggaggaaataaaatcctgaagtggttgtcagtgcttgtgggatgcagtggtcttcaggattctccccgcattattatgtagttgttcagaagctgttgctactgcgtctctctgtctgcagggggcacttgttcctgaggtcctcgcctgggtcctgacttctgtagtttctgtgaagacgtggctgtcctgtgggctcctgtgtgtgctggctgcgccctgagctccgagacagctgcccataacctgctaaggtcagggcccagggccccccacagcatggctgagggaccccttcccagtagggctgtcccaagccccactccatggggccaggtttcctggccacttttgttgatagcagatggatcaatattagtaaccccatccaagattgaactgtgaaagagaggttccaggggtatctccctcagtgccagttacttagtgatgtgttacccaggatgcagcaggtgtgtgcaggtatcttgctctctaggcctgtgtgtgtgtgtgagtgtgtgtgtatatgggtgtgggtgtgtttgtgtgtggtggttgtggggggggtgttggaggttctatttcatttaaaaatgtattcatttccctggccccacagatgcttccctccatactttttatttgctctgtttcctcagatttattttgtcttgccccattgcctctccttccttgaactctttccttttcaatctcaactcattcactgctgttgctcatttgcccttttccatgtattttttcctacttaggattttccactctatctttgtggttcatgaggactttgcctcttctcctgcctcattccctgactttctctagttagatgtcagtcctaaataggttttcctcacttcaggcctcacccctcaccttgtttttttgggggctccagggaccaatctggggctggaaatgttaggaggttgccttggtgctgccccagatctgtccagcagggggcagtaagtgatcttggtagtatccctggctgctaagcccttggcaggggtggtcctttctacattcccattcacttaacagctcttttgggattgggtgtttcattccatttctgcccactccctctcctctcctctctggtaggtttaattttatgctttccctgattccagctttctgcttcctgaggactcccgctccccccaccccaaagtttgtctgtggtgttatagtggtaactgcagttcctcctctggaatgtagactgtatatgtttaataactcaccttctctatccttgctcaaaatgtgggataacgcgatgactgtgaccctggttggaaattaaacttgttttatgcaaaaaaaaaaaaaaaaaaaa

SEQ ID NO: 723 - DNA, 2124 bp, Homo sapiens
ctcacgtgacaagcgtcccacccggaagcgaaatctccccttctacagagttcctccggcgcttcctccaccccgggatacacagaacctcatctcctacggtgctgaagcctgcagcagggcaggatgggcaggagagcagagccgcggagtctgcggcgcgggtgaagagcggcgcgtaattcccgcagcaagattgttccgcgcccgcagcccctggactagcaggatccgaaccccggcggctgcgtgcttataggcgcagacgtcagagagcccgcggcttaaagcgcgtcgcctggctagcgccaccccctagccttcttcaaggcctccagggctgggcccaagcgcccgtcgacggcaccctgggcccagaggactcgcgggcctcatctccaatgattcagaactcacgtccgtcgctgctgcaaccccaagatgtcggagacacggtggaaacgcttatgttacatccggtgatcaaggctttcctgtgtggctccatcagtgggacctgctctaccctccttttccaacctctggatctccttaaaacacgcctgcaaaccctccagccctcagatcatgggtctagacgtgttgggatgttggctgtactcttgaaggtggttcgcacggagagtcttttgggcctttggaaagggatgtccccttccattgtgagatgtgtccctggcgttggaatctactttggcactctctactctttgaagcagtatttcttgcgaggccatcccccaaccgccctggagtcagtcatgctgggggtgggctctcgctctgttgcaggggtctgtatgtcacctatcactgtaatcaagacgcgctatgagagtgggaaatatggctatgagagtatctacgctgccctgaggagcatctatcacagtgaggggcaccggggcctcttcagtggcctgacagcaactctccttcgagatgcgcccttctcaggaatctacctgatgttttacaaccagaccaaaaatatagtgcctcatgaccaggtggatgcaacccttattcctattacaaatttcagctgtgggatatttgctggtattctggcctcactggtaactcaacctgcggatgttatcaaaactcatatgcagctttatccactgaagtttcaatggattggccaagcagtgacacttattttcaaagactatggactacgtggcttcttccaaggtggcatcccccgagccctccgcagaactctaatggcagcaatggcgtggacggtgtatgaagagatgatggccaagatgggcctgaagtcctgaccaagagaggactgggaacgggtgaaatctgttgccctgcttggtttctgccaagggctgctgcttcttactattctgcagtaagatgaagtcctacctggaaaaccaggcagaaattgtgttgcctttgccttcagtaatccccttaaggagaaaatatatggacctgatttcagccttcagaatctccaaaagaggagtcatcaattcatagagcacactagggtgttaggagagagctttgcatactctgagaggctacttggaaaggcattttcccaggagagctctgtcaggtggctgcgcttcagccccacccctacaccacagggtctccttgggtatgttcttgggcaagcaatcacaaagccagagaagctgtaagctgcctgccgggcctgaggagctccaaccagggaagactggatgtgaggagaggagtcactgtcaccaggtcacagactgactgaggtgatggtaggatgaggaggaacagatgcccttctttaattggttctcagttaacttctcagaggctctggagaacgggacagtggctttctagcctctgaatgttccaaataaaattttttggtcttggcccctgtactgttttacctctaaattctggcatttttttttccctgcaattaaagtgctgtactttatttattgaactttatcattgaaagctgtttggaaaacctaaaagatgttgtcacacttctgttttctttacctgtgccttataaaaatggaccaaacccttttctaaaataaaatagttctagggtggctggttattgac

SEQ ID NO: 724 - DNA, 2005 bp, Homo sapiens
gtctctcgttttcggacggctgcagcatcgcggtggggatcgaaagcgggggcttctgggacgcagctctggagacgcggcctcggaccagccatttcggtgtagaagtggcagcacggcagattcatctgaaaactacattaagatgaagacctttgaaggtttctgtgctttgcatctcgctgcaagtcaaggacattggaaaatcgtacagattcttttagaagctggggcagatcctaatgcaactactttagaagaaacgacaccattgtttttagctgttgaaaatggacagatagatgtgttaaggctgttgcttcaacacggagcaaatgttaatggatcccattctatgtgtggatggaactccttgcaccaggcttcttttcaggaaaatgctgagatcataaaattgcttcttagaaaaggagcaaacaaggaatgccaggatgactttggaatcacacctttatttgtggctgctcagtatggcaagctagaaagcttgagcatacttatttcatcgggtgcaaatgtcaattgtcaagccttggacaaagctacacccttgttcattgctgctcaagagggacacacaaaatgtgtggagcttttgctctccagtggggcagatcctgatctttactgtaatgaggacagttggcagttacctattcatgcagctgcacaaatgggccatacaaaaatcttggacttgttaataccacttactaaccgggcctgtgacactgggctaaacaaagtaagccctgtttactcagcagtgtttgggggacatgaagattgcctagaaatattactccggaatggctacagcccagacgcccaggcgtgccttgtttttggattcagttctcctgtgtgcatggctttccaaaaggactgtgagttctttggaattgtgaacattcttttgaaatatggagcccagataaatgaacttcatttggcatactgcctgaagtacgagaagttttcgatatttcgctactttttgaggaaaggttgctcattgggaccatggaaccatatatatgaatttgtaaatcatgcaattaaagcacaagcaaaatataaggagtggttgccacatcttctggttgctggatttgacccactgattctactgtgcaattcttggattgactcagtcagcattgacacccttatcttcactttggagtttactaattggaagacacttgcaccagctgttgaaaggatgctctctgctcgtgcctcaaacgcttggattctacagcaacatattgccactgttccatccctgacccatctttgtcgtttggaaattcggtccagtctaaaatcagaacgtctacggtctgacagttatattagtcagctgccacttcccagaagcctacataattatttgctctatgaagacgttctgaggatgtatgaagttccagaactggcagctattcaagatggataaatcagtgaaactacttaacacagctaatttttttctctgaaaaatcatcgagacaaaagagccacagagtacaagtttttatgattttatagtcaaaagatgattattgattgtgagataggttaggttttggggggccagtagttcagtgagaatgtttatgtttacaactagccttcccagtaaaaaaaaaaaaaaaaaaaaaaaaaattgtaaacatcacttatattactttattgcagcttcatcaccagtacattatatgttgtaatatttatttacctgatcattttgatcattttctgctttattttgctaataaactgtgatgttacttctagtgctaaacatggcatatttccacctatgattcgtgtttacctggtattaggagctcagaatggaatgcataaagcttcactggaagtgtatacaactgtggtgtagaatctgttattattatcattattattttatttagacttgactatctcttatgtttattaaagaacatgttttcct

SEQ ID NO: 725 - DNA, 2990 bp, Homo sapiens
ggccgttccgacctccggtcaggagggggaggaacagagcacggccggcggctgcacgggcagggcctctctgggctgagaggaagaaaccagtgagacatcgagaggaagtcgctgtggcactcagtcctacggcctccgaggctgggtagtgagtgtgtcgctggccttagccagactccacaggccacgctggctgcgaatggagccgaggactcgcgcggaggcgagatgctaccagccggcgagatcggcgcctctcctgcagccccgtgctgctctgaaagtggtgacgaaaggaagaacctcgaggagaaaagtgacataaatgttacagttcttattggaagtaaacaagtcagtgaaggtacagataatggtgatctcccttcttatgtgtctgcattcatagaaaaggaagttggaaatgaccttaaatctttaaagaaacttgataaactcatagaacagaggacagtaagtaaaatgcagttagaagaacaggtacttacaatttcatcagaaattcctaaaagaattcgaagtgccttaaaaaatgcagaagaatcaaagcaatttcttaatcagtttctggagcaggaaactcatctcttcagcgccattaacagccatttgctgactgcgcaaccttggatggacgatcttggaaccatgattagccagattgaagagatcgaacgtcatcttgcttaccttaaatggatttcacaaattgaagaactaagtgataacattcagcaatatctgatgaccaataatgtaccggaggcagcctccactctagtgtctatggcagaacttgacattaaacttcaggaatcatcttgtactcatcttcttggtttcatgagagccacagttaaattctggcataaaattctcaaggacaagcttacaagtgattttgaggaaattttagcacagcttcattggccattcatcgcaccccctcaatcacaaactgttggcttaagtcgacctgccagtgccccggagatatacagttacctggagacactgttttgtcagcttttgaaactacaaacctcagatgaattacttactgagccaaagcaactcccagaaaaatactctcttcctgcctccccttctgtcatcctgcccatccaggttatgctgactcctcttcagaagaggttcaggtatcacttcagagggaaccggcagactaatgtgttaagcaagccagaatggtacttggctcaagtacttatgtggattggaaaccatactgaatttctggatgagaagattcagccaatattagacaaagtaggctctttggtaaacgcaaggcttgaattttctcggggccttatgatgctggttcttgagaagttagccactgatattccttgtctgctatatgatgacaatctcttctgtcatttggtggatgaagtactcttgtttgaaagggagctacacagtgttcatggctatcctggcacttttgctagttgtatgcatattctatcagaggaaacctgttttcagagatggttgacggtggagagaaaatttgctcttcaaaaaatggactcaatgctttcctcagaagctgcctgggtatcgcaatataaggatatcactgacgtggatgaaatgaaagttccagattgtgcagaaacttttatgactctactcttggttataactgacaggtataaaaatcttcccacagcttcccgaaagcttcagttcctggagttacagaaggacttagtagatgattttaggatacgattaacacaagtgatgaaagaagagactagagcttcccttggctttcgatactgtgcaattcttaatgctgtgaactacatctcaacagtactagcagattgggctgacaatgttttctttctacaacttcaacaggctgcactggaggtgtttgcagagaataatactctgagtaaattgcagctaggacagctagcctctatggagagctctgtctttgatgacatgattaacctcttagaacgtttaaagcatgatatgttgacccgtcaagtagaccacgtttttagagaagttaaagatgctgcaaaattgtataaaaaagaaagatggttgtccttgccatctcagtcagagcaggcagtgatgtccctgtccagttcggcttgcccgttgctgctgacgttacgagaccatttacttcagttggagcagcagctttgtttctccttatttaaaattttctggcaaatgcttgtagagaagctggatgtatacatctaccaagaaataattcttgctaatcacttcaatgaaggaggagcagcccagctgcagtttgatatgactcggaatcttttccctttgttttctcactattgcaagagaccagaaaattattttaaacatataaaagaagcctgtattgttttgaatttgaacgtcggttctgcactactgctgaaagatgtactgcagtcagcttcagggcagcttcctgccacagcagcattaaatgaagttggaatttacaaactggctcaacaagatgttgagattctacttaatttgaggacaaattggcctaatactggaaaataatgtctttcagaaaaaggtttctttggtttttgtttctaagaaagaggaagccaattggatttcaagttatatgatgaaattctgaattaatgaaactggaaaactttatagaattacttattatcttggatttatggtgttattaaaatgctgaccatatttccttcatcctcttgttcctaaggaaacaaaaacagaaaacgaaacaatgaaaactcaattctatttacaagtataaatgctgagtatgtctgttgaagacgagcagagatattaaattataaccaactttcaatttcctgtgctaattaagggaaattctgttgtggataatcaaacatagccaataaatttttttaaaactccaaaaaaaaaaaaaa

SEQ ID NO: 726 - DNA, 2087 bp, Homo sapiens
aggatgggtcctcggccggctcgactagaagactaagggggcgtctccccggcttcctgcggcgtcggtggcgagctgaggtggaggcaggctgcggcagacggcgacagtggcggcggcgccatggcagggcttgcaggatccctgctgccttggtgatcccgggctgacagccagagagcacagcggctcagctcctggagagtgagggttgaagaaagcggagggcagccgcctgcgcccgctggctcccattaggtcggttcctgcagcggtgcccggcagccttggtgaaggccctgcccggcagagatcatgtattgcctccagtggctgctgcccgtcctcctcatccccaagcccctcaaccccgccctgtggttcagccactccatgttcatgggcttctacctgctcagcttcctcctggaacggaagccttgcacaatttgtgccttggttttcctggcagccctgttccttatctgctatagctgctggggaaactgtttcctgtaccactgctccgattccccgcttccagaatcggcgcatgatcccggcgttgtgggcacctaacggcctgccctgttagctttccaaggaagcagaagacgggaggggaggcattgacataggtcataaagcattggagtttcaaatcccgcagcctcgcgggtgtcacattcctgacggcgcctttttggcctgtgatgttttatccttacaatgtgaataatggcactgaccggtgcttttattgtaaagtcctatagtcgtgggtggtcttgtggttgtgtgtgttctgtccccatctaggtcctggctggccgcatgaccacccctctcgcctcattactgtgaggagtctgggtccatcctggtcagctgccccaatgtgacctggggcagataaaatgccagtctcattgtcacctctgtgacccctccttgtcagggtctccttccttcccagaatgttactgactcctcagtccctcttctggtttccctttatttctcttctacccttttccttttttggggagtacctgtccaagacagggctcatttttgcacttatctcgaatttgaagagattgctgacgcccgagagcctcgctttttcatccttctttccttgttcagcaggctagacagaaacatgtcttgactgttagttgtccacaaatcttcagtattttctccacttcatttttaagaaaggaagcaacagatagatgttgctctttcacctgggtgtctgggctcaagctttcccgcccagcctcacttcctttgcccttcctcctgcctttctcaactgtcccaaggagggggcctcattgtgtctcccgtgcatgctctgcagcattgaagtatggtgtgttcacgtagttctagcagtccccagctgagtgagtgggagagtacctgtgtgtttcgtaacggccttgatccccttgatagatgtttggatattttttggtgtgccctgtgtgtgtgtgtgtacaaatacatgtgtatattccttttaaagaagctttatcgaacgtggtctgattttgaggtttagcaatagctagctatatatggtaggtgccgctacagtttttatttagcatggggattgcagagtgaccagcacactggactccgaggtggttcagacaagacagaggggagcagtggccatcatcctcccgccaggagcttcttcgttcctgcgcatatagactgtacattatgaagaatacccaggaagactttgtgactgtcacttgctgctttttctgcgcttcagtaacaagtgttggcaaacgagactttctcctggcccctgcctgctggagatcagcatgcctgtcctttcagtctgatccatccatctctctcttgcctgaggggaaagagagatgggccaggcagagaacagaactggaggcagtccatctagggaatgggactgtgaggccatacttgtgaaacgtctggactgctattctagagcttttatttggtgtgttcgttgcacagctgtttgaaatgtttaataaagctttataaactttaaaaaaaaaaaaaaa

SEQ ID NO: 727 - DNA, 1952 bp, Homo sapiens
gtgatggggcgccgggtccagcctgttgctgatgctgccgtgcggtacttgtcatggagctggcactgcggcgctctcccgtcccgcggtggttgctgctgctgccgctgctgctgggcctgaacgcaggagctgtcattgactggcccacagaggagggcaaggaagtatgggattatgtgacggtccgcaaggatgcctacatgttctggtggctctattatgccaccaactcctgcaagaacttctcagaactgcccctggtcatgtggcttcagggcggtccaggcggttctagcactggatttggaaactttgaggaaattgggccccttgacagtgatctcaaaccacggaaaaccacctggctccaggctgccagtctcctatttgtggataatcccgtgggcactgggttcagttatgtgaatggtagtggtgcctatgccaaggacctggctatggtggcttcagacatgatggttctcctgaagaccttcttcagttgccacaaagaattccagacagttccattctacattttctcagagtcctatggaggaaaaatggcagctggcattggtctagagctttataaggccattcagcgagggaccatcaagtgcaactttgcgggggttgccttgggtgattcctggatctcccctgttgattcggtgctctcctggggaccttacctgtacagcatgtctcttctcgaagacaaaggtctggcagaggtgtctaaggttgcagagcaagtactgaatgccgtaaataaggggctctacagagaggccacagagctgtgggggaaagcagaaatgatcattgaacagaacacagatggggtgaacttctataacatcttaactaaaagcactcccacgtctacaatggagtcgagtctagaattcacacagagccacctagtttgtctttgtcagcgccacgtgagacacctacaacgagatgccttaagccagctcatgaatggccccatcagaaagaagctcaaaattattcctgaggatcaatcctggggaggccaggctaccaacgtctttgtgaacatggaggaggacttcatgaagccagtcattagcattgtggacgagttgctggaggcagggatcaacgtgacggtgtataatggacagctggatctcatcgtagataccatgggtcaggaggcctgggtgcggaaactgaagtggccagaactgcctaaattcagtcagctgaagtggaaggccctgtacagtgaccctaaatctttggaaacatctgcttttgtcaagtcctacaagaaccttgctttctactggattctgaaagctggtcatatggttccttctgaccaaggggacatggctctgaagatgatgagactggtgactcagcaagaataggatggatggggctggagatgagctggtttggccttggggcacagagctgagctgaggccgctgaagctgtaggaagcgccattcttccctgtatctaactggggctgtgatcaagaaggttctgaccagcttctgcagaggataaaatcattgtctctggaggcaatttggaaattatttctgcttcttaaaaaaacctaagattttttaaaaaattgatttgttttgatcaaaataaaggatgataatagatattattttttcttatgacagaagcaaatgatgtgatttatagaaaaactgggaaatacaggtacccaaagagtaaatcaacatctgtatacccccttcccaggggtaagcactgttaccaatttagcatatgtccttgcagaatttttttttctatatatacatatatattttttaccaaaatgaatcattactctatgttgttttactatttgtttgacatatcagtatatctgaaacaccttttcatgtcaataaatgttcttctctaacatttttaaaaaaaaa

SEQ ID NO: 728 - DNA, 1458 bp, Homo sapiens
ataatccggaagtgacctcgaaaccttttccggtcttactcacgttgcggccttcctcgcgtcacagccgggatgaagccgatcctactgcagggccatgagcggtccattacgcagattaagtataaccgcgaaggagacctcctctttactgtggccaaggaccctatcgtcaatgtatggtactctgtgaatggtgagaggctgggcacctacatgggccataccggagctgtgtggtgtgtggacgctgactgggacaccaagcatgtcctcactggctcagctgacaacagctgtcgtctctgggactgtgaaacaggaaagcagctggcccttctcaagaccaattcggctgtccggacctgcggttttgactttgggggcaacatcatcatgttctccacggacaagcagatgggctaccagtgctttgtgagcttttttgacctgcgggatccgagccagattgacaacaatgagccctacatgaagatcccttgcaatgactctaaaatcaccagtgctgtttggggacccctgggggagtgcatcatcgctggccatgagagtggagagctcaaccagtatagtgccaagtctggagaggtgttggtgaatgttaaggagcactcccggcagatcaacgacatccagttatccagggacatgaccatgtttgtgaccgcgtccaaggacaacacagccaagctttttgactccacaactcttgaacatcagaagactttccggacagaacgtcctgtcaactcagctgccctctcccccaactatgaccatgtggtcctgggcggtggtcaggaagccatggatgtaaccacaacctccaccaggattggcaagtttgaggccaggttcttccatttggcctttgaagaagagtttggaagagtcaagggtcactttggacctatcaacagtgttgccttccatcctgatggcaagagctacagcagcggcggcgaagatggttacgtccgtatccattacttcgacccacagtacttcgaatttgagtttgaggcttaagaagctggatctcctgccgggcgtggtggctcatgcctgtaatcccaccactttttttttaaggcaggcggatcacctgaggtcaggagtttaagaccagcctgaccaacatggagaaacctcgtctctactaaaaatacaaaaattagccaggcatggtggcacacgcctatagtcccagctactcaggaggctgaggcaggagaatcacttgaacccaggaggcagaggttgcagtgagctgagatcacgtcattgcactccatcctgagccacaagagcaaaactccgtctcaaaaaaaaaaaagaagaaggtggatctccaaccaggccagagaagattctcacagaaggttttgaactctaagaaataaattggtttggtaataaatggcttctggtcagata

SEQ ID NO: 729 - DNA, 2604 bp, Homo sapiens
ggcgtcgccccgcccactccggctcggcggctctgggcctgcggcgggcgctgcgggttggagctcgggacgtgatcgtgggcgcgcagccagcggctccctgcccttcccctccgggccctgagtaccggccccccaccaaggaggagcccgaggtctccgtcccggcggcgatgctgccccgtcggcctctggcgtggcccgcgtggctgttgcggggtgctccgggagccgcgggttcttggggtcggccggttggccccctggcccgcagaggctgctgctccgccccggggacccccgaggtgccgctgacccgggagcgctaccccgtgcggcgcttgccgttctccacggtgtctaagcaggacctggccgcctttgagcgcatcgtgcccggcggggtcgtcacggacccggaagcgctgcaggctcccaacgtggactggttgcggacgctgcgaggctgtagcaaggtgctgctgaggccacggacgtcggaggaggtgtcccacatcctcaggcactgccacgagaggaacctggccgtgaacccacaggggggcaacacaggcatggtgggtggcagcgtccccgtctttgacgagatcatcctctccactgcccgcatgaaccgggtcctcagcttccacagcgtgtctggaattctggtttgccaggcgggctgcgtcctggaggagctgagccggtatgtggaggaacgggacttcatcatgccgctggacttaggagccaagggcagctgccacatcgggggaaacgtggcaaccaacgctggaggcctgcggtttcttcgatatggctcactgcatgggactgtcctgggcctggaagtggtgctggccgacggcactgtcctggactgcctgacctccctgaggaaggacaacacgggctatgacctgaagcagctgttcatcgggtcggagggcactttggggatcatcaccacggtgtccatcttgtgtccacccaagcccagggctgtgaacgtggctttcctcggctgcccaggctttgctgaggttctgcagaccttcagcacctgcaaggggatgctgggtgagatcctgtctgcattcgagttcatggatgctgtgtgcatgcagctggtcgggcgccatctccacctggccagcccggtgcaagagagtccgttttacgtcctcatcgagacttcaggctccaacgcaggccatgacgctgagaagctgggccacttcctggagcacgcgctgggctccggcctggtgaccgatgggaccatggccaccgaccagaggaaagtcaagatgctgtgggccctgagggaaaggatcacagaggcgctgagccgggatggctacgtgtacaagtacgacctctccctccctgtggagcggctctacgacatcgtgactgacctgcgcgcccgcctcggcccgcacgccaagcacgtggtgggctatggccaccttggagatggtaacctgcacctcaatgtgacggcggaggccttcagcccctcgctcctggctgccctggagccccacgtgtacgagtggacggccgggcagcagggcagcgtcagcgcggagcacggagtgggcttcaggaagagggacgtcctgggctacagcaagccaccgggggccctgcagctcatgcagcagctcaaggccctgctggaccccaagggcatcctcaacccctacaagacgctgcccagccaggcctgacggccactcctgctgctgccaaggcccactgggggtcggcgggtggctctcgggcgggggtgttgcggtggctctgagggatgagccggcagtgggcaggggaccaggcacctggttgaagggactgggagcccgcactggggaactgccggacgcaggccctcgggcaggagcatctggcagagtggggggcgtggcaggcaccctcctttgcagggcgaggtggggcctctgcagccatcctggacaggccggggtggcggcagctttgcccacgtggaagcggggtgggtctcacttgcgtggtggcccctggccccatcttgcctgctgcggcctggggagcaggcgctgggtggtggttctgcctgcttgctgctcgttccccgggcatgcgtgggcagcggggggcatgcgtgggcagcagggggcgtgggcagcgggggcacgggcaggaccacgtgggccgtgatcgtgggttgccgagaggacctgagcgctgcggctctgctgaatggagccgggtccctcaggccgtggacgccctcgggaggggggtgactgtggcttgtgtctggacaggaatgtgtcatttcccacatcttctagagggctgccagctgggaagacagttatcagggcaagctgtgctctgagtttcgggttctgctcctacaaagaacgtgcggtgctgcgggcgagggccccggcacggacaagggccactgcagagtgtgtttctgctcgtcagctgccctgggcagcggatgggctgggcgatgcagctggatgcacatctcattctgtcatgaatgtccagtaaaaatctgaattggttgcaaccttcaaaaaaaaaaaaaaaaaa

SEQ ID NO: 730 - DNA, 14905 bp, Homo sapiens
cagcggtgcgagctccaggcccatgcactgaggaggcggaaacaaggggagcccccagagctccatcaagccccctccaaaggctcccctacccggtccacgccccccaccccccctccccgcctcctcccaattgtgcatttttgcagccggaggcggctccgagatggggctgtgagcttcgcccggggagggggaaagagcagcgaggagtgaagcgggggggtggggtgaagggtttggatttcggggcagggggcgcacccccgtcagcaggccctccccaaggggctcggaactctacctcttcacccacgcccctggtgcgctttgccgaaggaaagaataagaacagagaaggaggagggggaaaggaggaaaagggggaccccccaactggggggggtgaaggagagaagtagcaggaccagaggggaaggggctgctgcttgcatcagcccacaccatgctgaccccgccgttgctcctgctgctgcccctgctctcagctctggtcgcggcggctatcgacgcccctaagacttgcagccccaagcagtttgcctgcagagatcaaataacctgtatctcaaagggctggcggtgcgacggtgagagggactgcccagacggatctgacgaggcccctgagatttgtccacagagtaaggcccagcgatgccagccaaacgagcataactgcctgggtactgagctgtgtgttcccatgtcccgcctctgcaatggggtccaggactgcatggacggctcagatgaggggccccactgccgagagctccaaggcaactgctctcgcctgggctgccagcaccattgtgtccccacactcgatgggcccacctgctactgcaacagcagctttcagcttcaggcagatggcaagacctgcaaagattttgatgagtgctcagtgtacggcacctgcagccagctatgcaccaacacagacggctccttcatatgtggctgtgttgaaggatacctcctgcagccggataaccgctcctgcaaggccaagaacgagccagtagaccggccccctgtgctgttgatagccaactcccagaacatcttggccacgtacctgagtggggcccaggtgtctaccatcacacctacgagcacgcggcagaccacagccatggacttcagctatgccaacgagaccgtatgctgggtgcatgttggggacagtgctgctcagacgcagctcaagtgtgcccgcatgcctggcctaaagggcttcgtggatgagcacaccatcaacatctccctcagtctgcaccacgtggaacagatggccatcgactggctgacaggcaacttctactttgtggatgacatcgatgataggatctttgtctgcaacagaaatggggacacatgtgtcacattgctagacctggaactctacaaccccaagggcattgccctggaccctgccatggggaaggtgtttttcactgactatgggcagatcccaaaggtggaacgctgtgacatggatgggcagaaccgcaccaagctcgtcgacagcaagattgtgtttcctcatggcatcacgctggacctggtcagccgccttgtctactgggcagatgcctatctggactatattgaagtggtggactatgagggcaagggccgccagaccatcatccagggcatcctgattgagcacctgtacggcctgactgtgtttgagaattatctctatgccaccaactcggacaatgccaatgcccagcagaagacgagtgtgatccgtgtgaaccgctttaacagcaccgagtaccaggttgtcacccgggtggacaagggtggtgccctccacatctaccaccagaggcgtcagccccgagtgaggagccatgcctgtgaaaacgaccagtatgggaagccgggtggctgctctgacatctgcctgctggccaacagccacaaggcgcggacctgccgctgccgttccggcttcagcctgggcagtgacgggaagtcatgcaagaagccggagcatgagctgttcctcgtgtatggcaagggccggccaggcatcatccggggcatggatatgggggccaaggtcccggatgagcacatgatccccattgaaaacctcatgaacccccgagccctggacttccacgctgagaccggcttcatctactttgccgacaccaccagctacctcattggccgccagaagattgatggcactgagcgggagaccatcctgaaggacggcatccacaatgtggagggtgtggccgtggactggatgggagacaatctgtactggacggacgatgggcccaaaaagacaatcagcgtggccaggctggagaaagctgctcagacccgcaagactttaatcgagggcaaaatgacacaccccagggctattgtggtggatccactcaatgggtggatgtactggacagactgggaggaggaccccaaggacagtcggcgtgggcggctggagagggcgtggatggatggctcacaccgagacatctttgtcacctccaagacagtgctttggcccaatgggctaagcctggacatcccggctgggcgcctctactgggtggatgccttctacgaccgcatcgagacgatactgctcaatggcacagaccggaagattgtgtatgaaggtcctgagctgaaccacgcctttggcctgtgtcaccatggcaactacctcttctggactgagtatcggagtggcagtgtctaccgcttggaacggggtgtaggaggcgcaccccccactgtgacccttctgcgcagtgagcggccccccatctttgagatccgaatgtatgatgcccagcagcagcaagttggcaccaacaaatgccgggtgaacaatggcggctgcagcagcctgtgcttggccacccctgggagccgccagtgcgcctgtgctgaggaccaggtgttggacgcagacggcgtcacttgcttggcgaacccatcctacgtgcctccaccccagtgccagccaggcgagtttgcctgtgccaacagccgctgcatccaggagcgctggaagtgtgacggagacaacgattgcctggacaacagtgatgaggccccagccctctgccatcagcacacctgcccctcggaccgattcaagtgcgagaacaaccggtgcatccccaaccgctggctctgcgacggggacaatgactgtgggaacagtgaagatgagtccaatgccacttgttcagcccgcacctgcccccccaaccagttctcctgtgccagtggccgctgcatccccatctcctggacgtgtgatctggatgacgactgtggggaccgctctgatgagtctgcttcgtgtgcctatcccacctgcttccccctgactcagtttacctgcaacaatggcagatgtatcaacatcaactggagatgcgacaatgacaatgactgtggggacaacagtgacgaagccggctgcagccactcctgttctagcacccagttcaagtgcaacagcgggcgttgcatccccgagcactggacctgcgatggggacaatgactgcggagactacagtgatgagacacacgccaactgcaccaaccaggccacgaggccccctggtggctgccacactgatgagttccagtgccggctggatggactatgcatccccctgcggtggcgctgcgatggggacactgactgcatggactccagcgatgagaagagctgtgagggagtgacccacgtctgcgatcccagtgtcaagtttggctgcaaggactcagctcggtgcatcagcaaagcgtgggtgtgtgatggcgacaatgactgtgaggataactcggacgaggagaactgcgagtccctggcctgcaggccaccctcgcacccttgtgccaacaacacctcagtctgcctgccccctgacaagctgtgtgatggcaacgacgactgtggcgacggctcagatgagggcgagctctgcgaccagtgctctctgaataacggtggctgcagccacaactgctcagtggcacctggcgaaggcattgtgtgttcctgccctctgggcatggagctggggcccgacaaccacacctgccagatccagagctactgtgccaagcatctcaaatgcagccaaaagtgcgaccagaacaagttcagcgtgaagtgctcctgctacgagggctgggtcctggaacctgacggcgagagctgccgcagcctggaccccttcaagccgttcatcattttctccaaccgccatgaaatccggcgcatcgatcttcacaaaggagactacagcgtcctggtgcccggcctgcgcaacaccatcgccctggacttccacctcagccagagcgccctctactggaccgacgtggtggaggacaagatctaccgcgggaagctgctggacaacggagccctgactagtttcgaggtggtgattcagtatggcctggccacacccgagggcctggctgtagactggattgcaggcaacatctactgggtggagagtaacctggatcagatcgaggtggccaagctggatgggaccctccggaccaccctgctggccggtgacattgagcacccaagggcaatcgcactggatccccgggatgggatcctgttttggacagactgggatgccagcctgccccgcattgaggcagcctccatgagtggggctgggcgccgcaccgtgcaccgggagaccggctctgggggctggcccaacgggctcaccgtggactacctggagaagcgcatcctttggattgacgccaggtcagatgccatttactcagcccgttacgacggctctggccacatggaggtgcttcggggacacgagttcctgtcgcacccgtttgcagtgacgctgtacgggggggaggtctactggactgactggcgaacaaacacactggctaaggccaacaagtggaccggccacaatgtcaccgtggtacagaggaccaacacccagccctttgacctgcaggtgtaccacccctcccgccagcccatggctcccaatccctgtgaggccaatgggggccagggcccctgctcccacctgtgtctcatcaactacaaccggaccgtgtcctgcgcctgcccccacctcatgaagctccacaaggacaacaccacctgctatgagtttaagaagttcctgctgtacgcacgtcagatggagatccgaggtgtggacctggatgctccctactacaactacatcatctccttcacggtgcccgacatcgacaacgtcacagtgctagactacgatgcccgcgagcagcgtgtgtactggtctgacgtgcggacacaggccatcaagcgggccttcatcaacggcacaggcgtggagacagtcgtctctgcagacttgccaaatgcccacgggctggctgtggactgggtctcccgaaacctgttctggacaagctatgacaccaataagaagcagatcaatgtggcccggctggatggctccttcaagaacgcagtggtgcagggcctggagcagccccatggccttgtcgtccaccctctgcgtgggaagctctactggaccgatggtgacaacatcagcatggccaacatggatggcagcaatcgcaccctgctcttcagtggccagaagggccccgtgggcctggctattgacttccctgaaagcaaactctactggatcagctccgggaaccataccatcaaccgctgcaacctggatgggagtgggctggaggtcatcgatgccatgcggagccagctgggcaaggccaccgccctggccatcatgggggacaagctgtggtgggctgatcaggtgtcggaaaagatgggcacatgcagcaaggctgacggctcgggctccgtggtccttcggaacagcaccaccctggtgatgcacatgaaggtctatgacgagagcatccagctggaccataagggcaccaacccctgcagtgtcaacaacggtgactgctcccagctctgcctgcccacgtcagagacgacccgctcctgcatgtgcacagccggctatagcctccggagtggccagcaggcctgcgagggcgtaggttcctttctcctgtactctgtgcatgagggaatcaggggaattcccctggatcccaatgacaagtcagatgccctggtcccagtgtccgggacctcgctggctgtcggcatcgacttccacgctgaaaatgacaccatctactgggtggacatgggcctgagcacgatcagccgggccaagcgggaccagacgtggcgtgaagacgtggtgaccaatggcattggccgtgtggagggcattgcagtggactggatcgcaggcaacatctactggacagaccagggctttgatgtcatcgaggtcgcccggctcaatggctccttccgctacgtggtgatctcccagggtctagacaagccccgggccatcaccgtccacccggagaaagggtacttgttctggactgagtggggtcagtatccgcgtattgagcggtctcggctagatggcacggagcgtgtggtgctggtcaacgtcagcatcagctggcccaacggcatctcagtggactaccaggatgggaagctgtactggtgcgatgcacggacagacaagattgaacggatcgacctggagacaggtgagaaccgcgaggtggttctgtccagcaacaacatggacatgttttcagtgtctgtgtttgaggatttcatctactggagtgacaggactcatgccaacggctctatcaagcgcgggagcaaagacaatgccacagactccgtgcccctgcgaaccggcatcggcgtccagcttaaagacatcaaagtcttcaaccgggaccggcagaaaggcaccaacgtgtgcgcggtggccaatggcgggtgccagcagctgtgcctgtaccggggccgtgggcagcgggcctgcgcctgtgcccacgggatgctggctgaagacggagcatcgtgccgcgagtatgccggctacctgctctactcagagcgcaccattctcaagagtatccacctgtcggatgagcgcaacctcaatgcgcccgtgcagcccttcgaggaccctgagcacatgaagaacgtcatcgccctggcctttgactaccgggcaggcacctctccgggcacccccaatcgcatcttcttcagcgacatccactttgggaacatccaacagatcaacgacgatggctccaggaggatcaccattgtggaaaacgtgggctccgtggaaggcctggcctatcaccgtggctgggacactctctattggacaagctacacgacatccaccatcacgcgccacacagtggaccagacccgcccaggggccttcgagcgtgagaccgtcatcactatgtctggagatgaccacccacgggccttcgttttggacgagtgccagaacctcatgttctggaccaactggaatgagcagcatcccagcatcatgcgggcggcgctctcgggagccaatgtcctgacccttatcgagaaggacatccgtacccccaatggcctggccatcgaccaccgtgccgagaagctctacttctctgacgccaccctggacaagatcgagcggtgcgagtatgacggctcccaccgctatgtgatcctaaagtcagagcctgtccaccccttcgggctggccgtgtatggggagcacattttctggactgactgggtgcggcgggcagtgcagcgggccaacaagcacgtgggcagcaacatgaagctgctgcgcgtggacatcccccagcagcccatgggcatcatcgccgtggccaacgacaccaacagctgtgaactctctccatgccgaatcaacaacggtggctgccaggacctgtgtctgctcactcaccagggccatgtcaactgctcatgccgagggggccgaatcctccaggatgacctcacctgccgagcggtgaattcctcttgccgagcacaagatgagtttgagtgtgccaatggcgagtgcatcaacttcagcctgacctgcgacggcgtcccccactgcaaggacaagtccgatgagaagccatcctactgcaactcccgccgctgcaagaagactttccggcagtgcagcaatgggcgctgtgtgtccaacatgctgtggtgcaacggggccgacgactgtggggatggctctgacgagatcccttgcaacaagacagcctgtggtgtgggcgagttccgctgccgggacgggacctgcatcgggaactccagccgctgcaaccagtttgtggattgtgaggacgcctcagatgagatgaactgcagtgccaccgactgcagcagctacttccgcctgggcgtgaagggcgtgctcttccagccctgcgagcggacctcactctgctacgcacccagctgggtgtgtgatggcgccaatgactgtggggactacagtgatgagcgcgactgcccaggtgtgaaacgccccagatgccctctgaattacttcgcctgccctagtgggcgctgcatccccatgagctggacgtgtgacaaagaggatgactgtgaacatggcgaggacgagacccactgcaacaagttctgctcagaggcccagtttgagtgccagaaccatcgctgcatctccaagcagtggctgtgtgacggcagcgatgactgtggggatggctcagacgaggctgctcactgtgaaggcaagacgtgcggcccctcctccttctcctgccctggcacccacgtgtgcgtccccgagcgctggctctgtgacggtgacaaagactgtgctgatggtgcagacgagagcatcgcagctggttgcttgtacaacagcacttgtgacgaccgtgagttcatgtgccagaaccgccagtgcatccccaagcacttcgtgtgtgaccacgaccgtgactgtgcagatggctctgatgagtcccccgagtgtgagtacccgacctgcggccccagtgagttccgctgtgccaatgggcgctgtctgagctcccgccagtgggagtgtgatggcgagaatgactgccacgaccagagtgacgaggctcccaagaacccacactgcaccagccaagagcacaagtgcaatgcctcgtcacagttcctgtgcagcagtgggcgctgtgtggctgaggcactgctctgcaacggccaggatgactgtggcgacagctcggacgagcgtggctgccacatcaatgagtgtctcagccgcaagctcagtggctgcagccaggactgtgaggacctcaagatcggcttcaagtgccgctgtcgccctggcttccggctgaaggacgacggccggacgtgtgctgatgtggacgagtgcagcaccaccttcccctgcagccagcgctgcatcaacactcatggcagctataagtgtctgtgtgtggagggctatgcaccccgcggcggcgacccccacagctgcaaggctgtgactgacgaggaaccgtttctgatcttcgccaaccggtactacctgcgcaagctcaacctggacgggtccaactacacgttacttaagcagggcctgaacaacgccgttgccttggattttgactaccgagagcagatgatctactggacagatgtgaccacccagggcagcatgatccgaaggatgcaccttaacgggagcaatgtgcaggtcctacaccgtacaggcctcagcaaccccgatgggctggctgtggactgggtgggtggcaacctgtactggtgcgacaaaggccgggacaccatcgaggtgtccaagctcaatggggcctatcggacggtgctggtcagctctggcctccgtgagcccagggctctggtggtggatgtgcagaatgggtacctgtactggacagactggggtgaccattcactgatcggccgcatcggcatggatgggtccagccgcagcgtcatcgtggacaccaagatcacatggcccaatggcctgacgctggactatgtcactgagcgcatctactgggccgacgcccgcgaggactacattgaatttgccagcctggatggctccaatcgccacgttgtgctgagccaggacatcccgcacatctttgcactgaccctgtttgaggactacgtctactggaccgactgggaaacaaagtccattaaccgagcccacaagaccacgggcaccaacaaaacgctcctcatcagcacgctgcaccggcccatggacctgcatgtcttccatgccctgcgccagccagacgtgcccaatcacccctgcaaggtcaacaatggtggctgcagcaacctgtgcctgctgtcccccgggggagggcacaaatgtgcctgccccaccaacttctacctgggcagcgatgggcgcacctgtgtgtccaactgcacggctagccagtttgtatgcaagaacgacaagtgcatccccttctggtggaagtgtgacaccgaggacgactgcggggaccactcagacgagcccccggactgccctgagttcaagtgccggcccggacagttccagtgctccacaggtatctgcacaaaccctgccttcatctgcgatggcgacaatgactgccaggacaacagtgacgaggccaactgtgacatccacgtctgcttgcccagtcagttcaaatgcaccaacaccaaccgctgtattcccggcatcttccgctgcaatgggcaggacaactgcggagatggggaggatgagagggactgccccgaggtgacctgcgcccccaaccagttccagtgctccattaccaaacggtgcatcccccgggtctgggtctgcgaccgggacaatgactgtgtggatggcagtgatgagcccgccaactgcacccagatgacctgtggtgtggacgagttccgctgcaaggattcgggccgctgcatcccagcgcgttggaagtgtgacggagaggatgactgtggggatggctcggatgagcccaaggaagagtgtgatgaacgcacctgtgagccataccagttccgctgcaagaacaaccgctgcgtgcccggccgctggcagtgcgactacgacaacgattgcggtgacaactccgatgaagagagctgcacccctcggccctgctccgagagtgagttctcctgtgccaacggccgctgcatcgcggggcgctggaaatgcgatggagaccacgactgcgcggacggctcggacgagaaagactgcaccccccgctgtgacatggaccagttccagtgcaagagcggccactgcatccccctgcgctggcgctgtgacgcagacgccgactgcatggacggcagcgacgaggaggcctgcggcactggcgtgcggacctgccccctggacgagttccagtgcaacaacaccttgtgcaagccgctggcctggaagtgcgatggcgaggatgactgtggggacaactcagatgagaaccccgaggagtgtgcccggttcgtgtgccctcccaaccggcccttccgttgcaagaatgaccgcgtctgtctgtggatcgggcgccaatgcgatggcacggacaactgtggggatgggactgatgaagaggactgtgagccccccacagcccacaccacccactgcaaagacaagaaggagtttctgtgccggaaccagcgctgcctctcctcctccctgcgctgcaacatgttcgatgactgcggggacggctctgacgaggaggactgcagcatcgaccccaagctgaccagctgcgccaccaatgccagcatctgtggggacgaggcacgctgcgtgcgcaccgagaaagcggcctactgtgcctgccgctcgggcttccacaccgtgcccggccagcccggatgccaagacatcaacgagtgcctgcgcttcggcacctgctcccagctctgcaacaacaccaagggcggccacctctgcagctgcgctcggaacttcatgaagacgcacaacacctgcaaggccgaaggctctgagtaccaggtcctgtacatcgctgatgacaatgagatccgcagcctgttccccggccacccccattcggcttacgagcaggcattccagggtgacgagagtgtccgcattgatgctatggatgtccatgtcaaggctggccgtgtctattggaccaactggcacacgggcaccatctcctaccgcagcctgccacctgctgcgcctcctaccacttccaaccgccaccggcgacagattgaccggggtgtcacccacctcaacatttcagggctgaagatgcccagaggcatcgccatcgactgggtggccggaaacgtgtactggaccgactcgggccgagatgtgattgaggtggcgcagatgaagggcgagaaccgcaagacgctcatctcgggcatgattgacgagccccacgccattgtggtggacccactgagggggaccatgtactggtcagactggggcaaccaccccaagattgagacggcagcgatggatgggacgcttcgggagacactggtgcaggacaacattcagtggcccacaggcctggccgtggattatcacaatgagcggctgtactgggcagacgccaagctttcagtcatcggcagcatccggctcaatggcacggaccccattgtggctgctgacagcaaacgaggcctaagtcaccccttcagcatcgacgtctttgaggattacatctatggtgtcacctacatcaataatcgtgtcttcaagatccataagtttggccacagccccttggtcaacctgacagggggcctgagccacgcctctgacgtggtcctttaccatcagcacaagcagcccgaagtgaccaacccatgtgaccgcaagaaatgcgagtggctctgcctgctgagccccagtgggcctgtctgcacctgtcccaatgggaagcggctggacaacggcacatgcgtgcctgtgccctctccaacgccccccccagatgctccccggcctggaacctgtaacctgcagtgcttcaacggtggcagctgtttcctcaatgcacggaggcagcccaagtgccgctgccaaccccgctacacgggtgacaagtgtgaactggaccagtgctgggagcactgtcgcaatgggggcacctgtgctgcctccccctctggcatgcccacgtgccggtgccccacgggcttcacgggccccaaatgcacccagcaggtgtgtgcgggctactgtgccaacaacagcacctgcactgtcaaccagggcaaccagccccagtgccgatgcctacccggcttcctgggcgaccgctgccagtaccggcagtgctctggctactgtgagaactttggcacatgccagatggctgctgatggctcccgacaatgccgctgcactgcctactttgagggatcgaggtgtgaggtgaacaagtgcagccgctgtctcgaaggggcctgtgtggtcaacaagcagagtggggatgtcacctgcaactgcacggatggccgggtggcccccagctgtctgacctgcgtcggccactgcagcaatggcggctcctgtaccatgaacagcaaaatgatgcctgagtgccagtgcccaccccacatgacagggccccggtgtgaggagcacgtcttcagccagcagcagccaggacatatagcctccatcctaatccctctgctgttgctgctgctgctggttctggtggccggagtggtattctggtataagcggcgagtccaaggggctaagggcttccagcaccaacggatgaccaacggggccatgaacgtggagattggaaaccccacctacaagatgtacgaaggcggagagcctgatgatgtgggaggcctactggacgctgactttgccctggaccctgacaagcccaccaacttcaccaaccccgtgtatgccacactctacatggggggccatggcagtcgccactccctggccagcacggacgagaagcgagaactcctgggccggggccctgaggacgagataggggaccccttggcatagggccctgccccgtcggactgcccccagaaagcctcctgccccctgccggtgaagtccttcagtgagcccctccccagccagcccttccctggccccgccggatgtataaatgtaaaaatgaaggaattacattttatatgtgagcgagcaagccggcaagcgagcacagtattatttctccatcccctccctgcctgctccttggcacccccatgctgccttcagggagacaggcagggagggcttggggctgcacctcctaccctcccaccagaacgcaccccactgggagagctggtggtgcagccttcccctccctgtataagacactttgccaaggctctcccctctcgccccatccctgcttgcccgctcccacagcttcctgagggctaattctgggaagggagagttctttgctgcccctgtctggaagacgtggctctgggtgaggtaggcgggaaaggatggagtgttttagttcttgggggaggccaccccaaaccccagccccaactccaggggcacctatgagatggccatgctcaacccccctcccagacaggccctccctgtctccagggcccccaccgaggttcccagggctggagacttcctctggtaaacattcctccagcctcccctcccctggggacgccaaggaggtgggccacacccaggaagggaaagcgggcagccccgttttggggacgtgaacgttttaataatttttgctgaattcctttacaactaaataacacagatattgttataaataaaattgtaaaaaaaaaaaaaaaaaaa

SEQ ID NO: 731 - DNA, 5257 bp, Homo sapiens
gtgcagtcagggcttctgctgggcagggccggctgttaatctcgcctggcggagcggacaccggggcgtggtgggggagatgggccttataggtggcgtccgctggtgagaaacaccttgcgcaggtaaaagggtggcggcgagagggagttcccacccgtggctttcttagagaaatgaagtcttaagtcttaaatagacaacaaggaggggccgatcggtgtcttttggacgcgtctggagcccctccctccgccaaaggaaaagccccttggatgagaggcaggcgcttcagagaagctaagaaaagcacctctccgcgcgccccacctcctccgcctcgcgctcctcctgagcagcgggcccagactgcgctccggccgcggccctcgccccgcggagccctcctaccccggcccgacgctcggcccgcgacctgccccgagccctctccatggaggcagcccgcccctccggctcctggaacggagccctctgccggctgctcctgctgaccctcgcgatcttaatatttgccagtgatgcctgcaaaaatgtgacattacatgttccctccaaactagatgccgagaaacttgttggtagagttaacctgaaagagtgctttacagctgcaaatctaattcattcaagtgatcctgacttccaaattttggaggatggttcagtctatacaacaaatactattctattgtcctcggagaagagaagttttaccatattactttccaacactgagaaccaagaaaagaagaaaatatttgtctttttggagcatcaaacaaaggtcctaaagaaaagacatactaaagaaaaagttctaaggcgcgccaagagaagatgggctccaattccttgttcgatgctagaaaactccttgggtccttttccacttttccttcaacaggttcaatctgacacggcccaaaactataccatatactattccataagaggtcctggagttgaccaagaacctcggaatttattttatgtggagagagacactggaaacttgtattgtactcgtcctgtagatcgtgagcagtatgaatcttttgagataattgcctttgcaacaactccagatgggtatactccagaacttccactgcccctaataatcaaaatagaggatgaaaatgataactacccaatttttacagaagaaacttatacttttacaatttttgaaaattgcagagtgggcactactgtgggacaagtgtgtgctactgacaaagatgagcctgacacgatgcacacacgcctgaagtactccatcattgggcaggtgccaccatcacccaccctattttctatgcatccaactacaggcgtgatcaccacaacatcatctcagctagacagagagttaattgacaagtaccagttgaaaataaaagtacaagacatggatggtcagtattttggtctacagacaacttcaacttgtatcattaacattgatgatgtaaatgaccacttgccaacatttactcgtacttcttatgtgacatcagtggaagaaaatacagttgatgtggaaatcttacgagttactgttgaggataaggacttagtgaatactgctaactggagagctaattataccattttaaagggcaatgaaaatggcaattttaaaattgtaacagatgccaaaaccaatgaaggagttctttgtgtagttaagcctttgaattatgaagaaaagcaacagatgatcttgcaaattggtgtagttaatgaagctccattttccagagaggctagtccaagatcagccatgagcacagcaacagttactgttaatgtagaagatcaggatgagggccctgagtgtaaccctccaatacagactgttcgcatgaaagaaaatgcagaagtgggaacaacaagcaatggatataaagcatatgacccagaaacaagaagtagcagtggcataaggtataagaaattaactgatccaacagggtgggtcaccattgatgaaaatacaggatcaatcaaagttttcagaagcctggatagagaggcagagaccatcaaaaatggcatatataatattacagtccttgcatcagaccaaggagggagaacatgtacggggacactgggcattatacttcaagacgtgaatgataacagcccattcatacctaaaaagacagtgatcatctgcaaacccaccatgtcatctgcggagattgttgcggttgatcctgatgagcctatccatggcccaccctttgactttagtctggagagttctacttcagaagtacagagaatgtggagactgaaagcaattaatgatacagcagcacgtctttcctatcagaatgatcctccatttggctcatatgtagtacctataacagtgagagatagacttggcatgtctagtgtcacttcattggatgttacactgtgtgactgcattaccgaaaatgactgcacacatcgtgtagatccaaggattggcggtggaggagtacaacttggaaagtgggccatccttgcaatattgttgggcatagcattgctcttttgcatcctgtttacgctggtctgtggggcttctgggacgtctaaacaaccaaaagtaattcctgatgatttagcccagcagaacctaattgtatcaaacacagaagctcctggagatgacaaagtgtattctgcgaatggcttcacaacccaaactgtgggcgcttctgctcagggagtttgtggcaccgtgggatcaggaatcaaaaacggaggtcaggagaccatcgaaatggtgaaaggaggacaccagacctcggaatcctgccggggggctggccaccatcacaccctggactcctgcaggggaggacacacggaggtggacaactgcagatacacttactcggagtggcacagttttactcagccccgtcttggtgaagaatccattagaggacacactctgattaaaaattaaacaatgaaagaaagtgtatctgtgtaatcaagatgaaaatcacaagcatgcccaagactatgtcctgacatataactatgaaggaagaggatcggtggctgggtctgtaggttgttgcagtgaacgacaagaagaagatgggcttgaatttttggataatttggagcccaaatttaggacactagcagaagcatgcatgaagagatgagtgtgttctaataagtctctgaaagccagtggctttatgacttttaaaaaaaattacaaaccaagaattttttaaagcagaagatgctatttgtgggggtttttctctcattatttggatggaatctctttggtcaaatgcacatttacagagagacactataaacaagtacacaaatttttcaatttttacatatttttaaattacttatcttctatccaaggaggtctacagagaaattaaagtctgccttatttgttacatttgggtataatgacaacagccaatttatagtgcaataaaatgtaattaattcaagtccttattatagactatttgaagcacaacctaatggaaaattgtagagaccttgctttaacattatctccagttaattaagtgttcatgtggtgcttggaaactgttgttttcctgaacatctaaagtgtgtagactgcattcttgctattattttattcttgtaatgtgaccttttcactgtgcaaagggagatttctagccaggcattgactattacaatttcattttggtggagtttagttttaggttttattgtatataaaatcctgcactgaatctgtgtctcctctgttacctacttttgccagtgaaatttaagttttaaaatactttcagaatgtatttttactactgcaagtttttggtctttaaaatgtcaagtagcatctctctctttctctctgtctctttctgtttctctctccagttttttttttttttttaatttccatatgggctaaagaatccaaatattttaaaaatctgtctctcttttcttctctcataaagtgaattattccttttttttgttttatgtaagtgtatatattcttagtttttcttgaaatcattgtaatgttaactttgttgtttcaaatatcttggtgattgcttcattatctcttcaacaaaaaaaacctttaattttgccattgaaactgtagaactatgccatgcttttattagaagcagtgctctgtgttaacaacaagaatggtgtaattagaattgggatgtggatatttactgtatgacaacacatttacagttctgtaatgcaaggatgcagtttaaaaatgtgaagtagtgatggtttttgaaataagctttaaaatatagggatcttgaaggctccctggggtaactattttataacttagataaaatggctagtcatatctgtgtgtttgtaaagttatttttttaatattttaagattacaattttaacaaatgtagaaatgagccaaactatttaaattttaaaacagtaaaacaaaatgaaacttaatagctcacaaaattccagtccatgtttcatgacttattttagtcaatgaattttctatttatactaaacatatggacattttaaatgtgtttctaatatttttgattatctataatgtgcctgtcttcaattcacaagattgggttataacaattatttgccagattaacactagggaattatttgataaccagcttatcttatcagtagttttattgctgatcaggcaaaaatagttttccaaagttatttttaataaagtatatacaaaattcttatatattactagtcatgataaagtaaattaagcagtttttaaaacttagtgtgagtttgttcatcacaggtctgatatgagtttaagggatttcgcactccctgaatcagagaagtaagaccccttccttagattcctgttatacattttttaaaatgtagagtttgttttggagacattttcagtgcattgttattgccatatttatataatatgactattctaaaggctgtgaggccatggggtattggttaagttgcttgcttttgctttgtccattttcatcattttaaaatgggggataataacagaacttgtttcctagggccattgtaagtcacttgaataaaaaatagttttgaagcatgagagtcatacagagcggtccacctaaaaggcactcctgataataataaatgattttaaacaaaaaaaaaaaaaa

SEQ ID NO: 732 - DNA, 4190 bp, Homo sapiens
aagtgtctgtagcgtccctccctctcaaccacaataacaggcggagggtcggcgtaggtactttgaactcaagtaaacaaaagggaagattttctcgttgatactggagactgcacaacaatggggccacgaaagaaaagtgtgaaaacatgtatcatgaataatgaaattccagaagaaatgacagcagatgaaacaaaggactatatgaatcaactttcacatgaagtactttgccatatttttaggtacctccctctgcaggatatcatgtgtatggaatgtctttcccggaagctaaaggaagcagtgaccctatatctgcgagttgtgagagttgtagatctctgtgcagggcggtggtgggaatacatgccaagtggctttacagatgccagttttctaacactattaaagaagatgccagatgttgaacagctatatggccttcaccctcgataccttgagaggcgaagagtaaggggccatgaggcttttagcattccaggagtcctagaagctttgcaggcatgcccaaacttagtgggtgtggaaacttctcatttggagttggtagaatccatttggacatatatgccccatgttcatattttggggaaatttcgtaatcgtaatggagcttttccaattcctcctgaaaataaactgaaaattcctataggagccaaaattcaaactttacatttagttggggtgaatgttcctgaaattccttgtatcccaatgctaaggcacctttatatgaagtgggtaagactcactaaaccacagccatttaaagacttcctttgtatcagcttaagaactttcgtcatgaggaactgtgcaggacccacaaattccttgaaatatgtccctttagtaacaggcttagcctctgcccgaaacttggaacacttagaaatggttcgagttcctttccttggaggtcttatccaacatgttgttgaagacagttggagatcaggtggttttagaaatttgcacactattgttctgggagcttgcaaaaatgctcttgaagtagatcttggttacctcatcattactgctgcccgtaggttacatgaagttcggatccagccttccctaaccaaagatggtgtcttttctgccctaaagatggcagagttggagtttccccagtttgaaacccttcatctaggatatgtagatgagtttttgctacagagcagaatggctaatgcggatctggtgaagtatggtttggctgatgtggtagaaaatcctggtatcatcactgatatagggatgaaagcagtcaatgaagttttttcctgtatcaaatatctggcaatttacaattgccctcatctacacaacccatacaattggatctcagaccactcaagatggactcgattggttgatatcaacctagtacggtgccatgctttgaagctggactcttttggccagtttattgaattattacccagcctagagtttatttcactggatcagatgtttcgtgaaccacccaagggttgtgctcgagttggtctgagtgcaggcacaggaattggtgtttcatcagctcttgttagcaaccagaactccaacaatgacgataataatgcccagaataacaatgccaacatccacgacaacaatcaccatcatccagatgactcagacgaggagaatgactttcggcaagatctgcagccaggagagcagcagtttgcagctgacgcattaaatgagatggaagacatcgtccaagaagatggagaggtggtggccgagagtggaaataatactccagctcacagccaggcaattattcctgtggatgttgatgaggaacaagcaggacccagtggtcttcagcgtgtagtaaaaccaacctcaattactgttcatgattcagagagtgatgatgaagaagatagtctagaactccaagaagtctggattcctaagaacggtactcggcgttactctgaacgtgaagaaaaaactggagagtcagtgcagtccagagaattgtcagtaagtggaaaaggcaagactccacttcgaaagaggtacaactcccatcagatgggccagtcgaagcagtttcccctcgaggaaagcagctgtgagaaaggctgtcaggtcaccagtgagcagatcaaagccgatatgaaagcagctagggatattcctgaaaagaaaaaaaacaaggatgtttatcccagctgcagcagcaccaccgccagcacagtgggaaactccagctcacacaacactgcttctcaaagccccgactttgtaaggacggtgaacagcggcggctcttccgagcctagccctacagaagtggatgtgtccaggcagtgtgcctgctcccccggtgggtcagaggactctgaggccatggaggagggagatgcagagagttctgtctgccccagatgctgctgtcacaggccccaggaatcccaaaggagaactagcaggtgttctgatgaggaacgtccttcaaccagccgagcctgtgttgtgaatggcccggatgaagtagccaaaacaaagccacgtcacgccatgaaacggaagcggacagcagataaatccactagtacaagtgatcctgtgatcgaggatgaccatgtgcaggttcttgtattaaaatccaagaatcttgttggagtcactatgaccaattgtggaatcacagatctagtgctaaaagactgtccaaagatgatgttcatccatgctaccaggtgcagggtactaaaacatttaaaggtagaaaatgcaccaattgtaaaccgatttgactatgcacagtgcaagaaactgaacatggatcaggtactagaccagatactaagaatgccacccgagagaaaccgcatcatatacctacgcccaatgcagcaggtggacactctaactttggagcagaagctatttagtggtccctacccctatcacatctgtattatccatgaattcagtaaccctcccaatgtccggaataaggtgcgcattcgcagctggatggacactatagcaaacatcaatcaagagctcattaaatatgaattcttccctgaagccactcgaagtgaagaagacttaaagaaataccccaagtacccctgggggagagaaatctatactttagaaggtgttgtggatggagctccatattccatgatttctgacttcccttggctgaggtcattacgagctgcagagcccaacagcttcgctcgatacgactttgaagacgatgaagaaagcactatctatgctcctagaaggaaaggacagctgtctgcagacatctgtatggaaacaataggagaggaaatttcagagatgcgtcagatgaagaagggtgtatttcagcgagtagtggcaatttttatccactattgtgatgtcaatggagagccagttgaagatgactacatttaattggtccctcctcctttccagctattttgtcagaaagcaagtagggccatccagctgccagagtgctccacagggacttgaggcatgcagttgggaggtcctggctcggtttgctatatagggaatatataaggaacatcgaaattgtatacaaagatttgtacataaaaaatatacaaagacgcttcctaaagtaccaactttatatcatatgtttatacaatttaatttaaaaattcattttaaggaagacagataatttgaaagacttttgtttttcttgacttaattcatgaagtatcattttttgactgagtctccatttacttcattcttaatgattattgtcatccctttaaatctgtgcctttttcttcttgagcgaagctgtttgagtaaacctgttgaagagtgtttgtgtcttttgtgcttttttgttgttattaaaacaccaactaaaccttatagtcaagacaaggctctatgtttctgtacaaagctgtagttctttcttagtattatagttgccatgtttcttaaaatcaagtaaaaagacttatgagcttaaaaaaaagtgagtttgagagggaaatggaaaagtttccagagtatttctagtaatttatttccacattgaattgtgtatatgctttatcttgaatataaaataaaagtttattaaaaactttaaaaaaaaaaaaaaaaaaaaaaaaaaaaaaaaaaaaaaa

SEQ ID NO: 733 - DNA, 1139 bp, Homo sapiens
gggcggggcctcggcgtggtaggcgcgctgcgtaaagaggcctgcagtcccgcggcgcggggcaggttccgggctgcttaggttggcaccggtccgtggtccccgggggcgcagtcgcagcgctcccgccctccaggcgtcagcgagtgcgcggtccagtgcggccggaacctggcgcaactcctagagcggtccttggggagacgcgggtcccagtcctgcggctcctactggggagtgcgctggtcggaagattgctggactcgctgaagagagactacgcaggaaagccccagccacccatcaaatcagagagaaggaatccaccttcttacgctatggcaggtaagaaagtactcattgtctatgcacaccaggaacccaagtctttcaacggatccttgaagaatgtggctgtagatgaactgagcaggcagggctgcaccgtcacagtgtctgatttgtatgccatgaaccttgagccgagggccacagacaaagatatcactggtactctttctaatcctgaggttttcaattatggagtggaaacccacgaagcctacaagcaaaggtctctggctagcgacatcactgatgagcagaaaaaggttcgggaggctgacctagtgatatttcagttcccgctgtactggttcagcgtgccagccatcctgaagggctggatggatagggtgctgtgccagggctttgcctttgacatcccaggattctacgattccggtttgctccagggtaaactagcgctcctttccgtaaccacgggaggcacggccgagatgtacacgaagacaggagtcaatggagattctcgatacttcctgtggccactccagcatggcacattacacttctgtggatttaaagtccttgcccctcagatcagctttgctcctgaaattgcatccgaagaagaaagaaaggggatggtggctgcgtggtcccagaggctgcagaccatctggaaggaagagcccatcccctgcacagcccactggcacttcgggcaataactctgtggcacgtgggcatcacgtaagcagcacactaggaggcccaggcgcaggcaaagagaagatggtgctgtcatgaaataaaattacaacatagctacctgg

SEQ ID NO: 734 - DNA, 4481 bp, Homo sapiens
ttcctgtctacgtttcatttcctgggggcttgccaagtgataaacagacccaggcgtgtgtggtagagttcgggttttttagcacgaagtgggtggctggagtttgcttgaaaacatcaattgactttgtgatcattacagaaatgctggtgtaaggtgttcagaagacaatggagaaaaaatggaaatactgtgctgtctattacatcatccagatacattttgtcaagggagtttgggaaaaaacagtcaacacagaagaaaatgtttatgctacacttggctctgatgtcaacctgacctgccaaacacagacagtaggcttcttcgtgcagatgcaatggtccaaggtcaccaataagatagacctgattgctgtctatcatccccaatacggcttctactgtgcctatgggagaccctgtgagtcacttgtgactttcacagaaactcctgagaatgggtcaaaatggactctgcacttaaggaatatgtcttgttcagtcagtggaaggtacgagtgtatgcttgttctgtatccagagggcattcagactaaaatctacaaccttctcattcagacacacgttacagcagatgaatggaacagcaaccatacgatagaaatagagataaatcagactctggaaataccatgctttcaaaatagctcctcaaaaatttcatctgagttcacctatgcatggtcggtggaaaacagcagcacggattcttgggtccttctttctaagggtataaaggaggataatggaactcaggaaacacttatctcccaaaatcacctcatcagcaattccacattacttaaagatagagtcaagcttggtacagactacagactccacctctctccagtccaaatcttcgatgatgggcggaagttctcttgccacattagagtcggtcctaacaaaatcttgaggagctccaccacagtcaaggtttttgctaaaccagaaatccctgtgattgtggaaaataactccacggatgtcttggtagagagaagatttacctgcttactaaagaatgtatttcccaaagcaaatatcacatggtttatagatggaagttttcttcatgatgaaaaagaaggaatatatattactaatgaagagagaaaaggcaaagatggatttttggaactgaagtctgttttaacaagggtacatagtaataaaccagcccaatcagacaacttgaccatttggtgtatggctctgtctccagtcccaggaaataaagtgtggaacatctcatcagaaaagatcacttttctcttaggttctgaaatttcctcaacagaccctccactgagtgttacagaatctacccttgacacccaaccttctccagccagcagtgtatctcctgcaagatatccagctacatcttcagtgacccttgtagatgtgagtgccttgaggccaaacaccactcctcaacccagcaattccagtatgactacccgaggcttcaactatccctggacctccagtgggacagataccaaaaaatcagtttcacggatacctagtgaaacatacagttcatccccgtcaggtgcaggctcaacacttcatgacaatgtctttaccagcacagccagagcattttcagaagtccccacaactgccaatggatctacgaaaactaatcacgtccatatcactggtattgtggtcaataagcccaaagatggaatgtcctggccagtgattgtagcagctttactcttttgctgcatgatattgtttggtcttggagtgagaaaatggtgtcagtaccaaaaagaaataatggaaagacctccacctttcaagccaccaccacctcccatcaagtacacttgcattcaagagcccaacgaaagtgatctgccttatcatgagatggagaccctctagtctcgtgagactttgccccatggcagaactctgctggaatcctattgagaaggtagacattgtgctttattaatatagtcgctcttcagccatgcctttgctgcagctgaaatggaagtcagaagtgagtgacctgttttcccagcaactcaccctcttccatctccaaacgcctgaagcttaaccaagagtgagaggatatgtcatgttcacactcaatgcaattcgtagtggttttcttgcttatgtaagaagtacatattagtctgccatctttaaaaaaaaatacagtattttcatttaaattctctgatggagggacaacaatggtttcaactgtatgcccatgcctgatcctcttatttgaacatctatcaacattgtaaactctttgccaaaatcctggggctttgctgcattccctaagataattacaggaaaaagaaaatgtaaaagtgctaacaaggctgccaagtaatggagaagtatggttagtcttcatattgaaattctgttgcttattttcatggaaggaaacagaatactttgcacaggaaccacattttcaatcctccttcactgtcttcctaccatgttcagcccagactcctgccacatggaccaggatgaagagggatcaaagagataattagccaaaaacccagtagcctagaagatacaaaactccactggcctctaaaattatattagccaagagtggtttcatttgagtgccttcgtgtgtatgtccatcaaactggaaccaaactgttttgtaagtaaacaggcagcctaagcccaaccctactttctaattccagttattctctttttcatctggggatttacctgttcatttaatctgcctgttttgatctgttttgaaaaagataaagagcctcaaatcagaccagcactgattaattaaccctgctcctaccaatcttttttaaagcagttgaagcagaatgtataggtgtcagagaagaaacctagtcagccagacgtgctctgtattcagcaatagtttgtgaatgaataaattactaatcctccttgtcgcttgaaaccttcccacactccctgctccaggagggaaaaacagatgttgttgacagatagagtgataggcaaattctgtgtggactttagtcccaaaaggaaactttagttcacttgcagtatgcttatccttgactgcacatgagaatgccttgtgcagagttatttggagattatgtctttttcttaaacaccatggctgtcacacttcagttcaattaaatcagaatgtctgaggagtgagacacaggcatcaacactctcaaatgattcacatgttcagccaaagttgagaaccatcgagcctgtggaagttctttctcatggctcagaatcttaggtaggtgcttaactcttgtggtggccagcctccaagatgagccccagtgttcttgcctcctactattcacatctttatgtggtcccctccaatgctgaatacagatgatttgtgtaacctgaggccaggattaaggggaggcaatcaatgcacctagggaaaaaatttaaggaggtattcacactcagggtcatgcacttgcacaatgttgagaatgagtaccactctcaccattggtatagccaaaaaagcttggaagtgaccaaggctaggtcacaaaatacactgtggcttcttctttgatctctctttgaccatactgacactgggaaaagcccattcccatgccatgaagacaccaaggcagccctattgagaaatctacctgtcgtggccgggcgcagtggctcacgcctgtaatcccagcactttgggaggccgaggtgggtggatcacgaggtcaggagatcgagaccatcctggctaacacagtgaaaccccgtctctactaaaaatacaaaaaattagccgggtgtggtgtcgggcacctgtagtcccagctactcaggaggctgaggcaggagaagggtgggaacccgggaggcagagcttgcagtgagccgagattgtgccactgcacactccaatctgggtgaaagaccgagactccgcctcaaaaaaaaaaaaaaaagaaagaaagaaagaaagaaagaaatctacctgtcaaggaactaaggtattttgctaacaagcaccaacttgccagccatgtaagggagccatcttggaagcagatcctccagcctccagtcaagtcttcagataattgcaacttcagttgatcttttgaccaagacctcaagagagccagaactacccagctaagccttttactaaatttctgaacttctaacactattagataataagtgcttattgtttaacaccattaattttgagtataatttgttacatagcgacagataactatacagctcaacaactagaaaaataaactgtttacctgccttaattatttatctttagttccttattagttctcaagaaacaaatgctagcttcatatgtatggctgttgctttgcttcatgtgtatggctatttgtatttaacaagacttaatcatcagta

SEQ ID NO: 735 - DNA, 3727 bp, Homo sapiens
aagtgagagcagcggcagccggcggtgcagcagccggccgacccagagtgtaagtgcgtgtgctggggcgagcgggagcgggcgaggatgggcacaggatagaggcagagccacccacgccgccgcggccccacgctgggcgacagagcctccagttccccttcaatggtggcgggtcgccggagctctgatcgccgggaacccttgccgctgctgtcctgcgaccccaagcaggtatagacacgtgtggccgtttacgctgtaggatcctcattcccactggctttgaacattttggggacttacaatgccgccacccgcggacatcgtcaaggtggccatagaatggccgggcgcctaccccaaactcatggaaattgatcagaaaaaaccactgtctgcaataataaaggaagtctgtgatgggtggtctcttgccaaccatgaatattttgcactccagcatgccgatagttcaaacttctatatcacagaaaagaaccgcaatgagataaaaaatggcactatccttcgattaaccacatctccagctcagaacgcccagcagctccatgaacgaatccagtcctcgagtatggatgccaagctggaagccctgaaggacttggccagcctctcccgggatgtcacgtttgcccaggagtttataaacctggacggtatctctctcctcacgcagatggtggagagcggcactgagcgataccagaaattgcagaagatcatgaagccttgctttggagacatgctgtccttcaccctgacggccttcgttgagctgatggaccatggcatagtgtcctgggatacattttcggtggcgttcattaagaagatagcaagttttgtgaacaagtcagccatagacatctcgatcctgcagcggtccttggccattttggagtcgatggtgctcaatagccatgacctctaccagaaagtggcgcaggagatcaccatcggccagctcattccacacctgcaagggtcagatcaagaaatccaaacctatactattgcagtgattaatgcgcttttcctgaaggctcctgatgagaggaggcaggagatggcgaatattttggctcagaagcaactgcgttccatcattttaacacatgtcatccgagcccagcgggccatcaacaatgagatggcgcaccagctgtatgttctacaagtgctcacctttaacctcctggaagacaggatgatgaccaaaatggacccccaggaccaggctcagagggacatcatatttgaacttcgaagaattgcttttgatgctgagtctgaacctaacaacagcagtggcagcatggagaaacgcaagtccatgtacacgcgagattataagaagcttgggttcattaatcatgtcaaccctgccatggacttcacgcagactccacctgggatgttggctctggacaacatgctgtactttgccaagcaccaccaagatgcctacatccggattgtgcttgagaacagtagtcgagaagacaagcatgaatgtccctttggccgcagtagtatagagctgaccaagatgctatgtgagatcttgaaagtgggcgagttgcctagtgagacctgcaacgacttccacccgatgttcttcacccacgacagatcctttgaggagtttttctgcatctgtatccagctcctgaacaagacatggaaggaaatgagggcaacttctgaagacttcaacaaggtaatgcaggtggtgaaggagcaggttatgagagcacttacaaccaagcctagctccctggaccagttcaagagcaaactgcagaacctgagctacactgagatcctgaaaatccgccagtccgagaggatgaaccaggaagatttccagtcccgcccgattttggaactaaaggagaagattcagccagaaatcttagagctgatcaaacagcaacgcctgaaccgccttgtggaagggacctgctttaggaaactcaatgcccggcggaggcaagacaagttttggtattgtcggctttcgccaaatcacaaagtcctgcattacggagacttagaagagagtcctcagggagaagtgccccacgattccttgcaggacaaactgccggtggcagatatcaaagccgtggtgacgggaaaggactgccctcatatgaaagagaaaggtgcccttaaacaaaacaaggaggtgcttgaactcgctttctccatcttgtatgactcaaactgccaactgaacttcatcgctcctgacaagcatgagtactgtatctggacggatggactgaatgcgctactcgggaaggacatgatgagcgacctgacgcggaatgacctggacaccctgctcagcatggaaatcaagctccgcctcctggacctggaaaacatccagatccctgacgcacctccgccgattcccaaggagcccagcaactatgacttcgtctatgactgtaactgaagtggccgggcccagacatgccccttccaaaactggaacacctagctaacaggagagaggaatgaaaacacacccacgccttggaaccgtcctttggtaaagggaagctgtgggtccacattcccttcagcatcacctctagccctggcaactttcagcccctagctggcatcttgctcaccgccctgattctgttcctcggctccactgcttcaggtcacttcccatggctgcagtccactggtgggacaagagcaaagcccactgccagtaagaaggccaaagggcccttccatcctagccctctgcaggcatgcccttccttcccttgggcaggaaagccagcagccccagactgcccaaaaacttgcccaccagaccaagggcagtgccccaaggcccctgtctggaggaaatggcctagctatttgatgagaagaccaaaccccacatcctcctttcccctctctctagaatcatctcgcaccaccagttacacttgaattaagatctgcgctcaaatctcctcccacctctctccctgcttttgccttgctctgttcctctttggtcccaagagcagcagccgcagcctcctcgtgatcctccctagcataaatttcccaaacagtccacaggtcccatgcccactttgcgtctgcactgtgatcgtgacaaatcttccctcctcaccagctagtctggggtttcctctccctgccccaggccagaactgccttcttcatttccacccacgctcccagcctcttagctgaaagcacaaatggtgaaatcagtagtctcgctccatctctaatagactaaacctaaatgcctctaggacggactgttgctatccaagcgtttggtgttaccttctcctgggaggtcctgctgcaactcaagttccacaggatggtcaagctgtcagacatccaagtttacatcattgtaattattactggtatttacaatttgcaagagttttgggttagtttttttttttttttttgctttgtttttgtacaaaagagtctaacattttttgccaaacagatatatatttaatgaaaagaagagatacataaatgtgtgaatttccagtttttttttaattattttaatcccaaacatcttcctgaaaataacattcccttaaacatgctgtggaataaaatggattgtgatgatttggaaaaaaaaaaaaaaaaaaaaaaaaaaaaaaaaaaaaaaaaa

SEQ ID NO: 736 - DNA, 2277 bp, Homo sapiens
ggcggggcgcgcgcggcggccgttgagggaccgttggggcgggaggcggcggcggcggcggcgcgcgctgcgggcagtgagtgtggaggcgcggacgcgcggcggagctggaactgctgcagctgctgccgccgccggaggaaccttgatccccgtgctccggacaccccgggcctcgccatggctgaccagctgactgaggagcagattgcagagttcaaggaggccttctccctctttgacaaggatggagatggcactatcaccaccaaggagttggggacagtgatgagatccctgggacagaaccccactgaagcagagctgcaggatatgatcaatgaggtggatgcagatgggaacgggaccattgacttcccggagttcctgaccatgatggccagaaagatgaaggacacagacagtgaggaggagatccgagaggcgttccgtgtctttgacaaggatgggaatggctacatcagcgccgcagagctgcgtcacgtaatgacgaacctgggggagaagctgaccgatgaggaggtggatgagatgatcagggaggctgacatcgatggagatggccaggtcaattatgaagagtttgtacagatgatgactgcaaagtgaaggccccccgggcagctggcgatgcccgttctcttgatctctctcttctcgcgcgcgcactctctcttcaacactcccctgcgtaccccggttctagcaaacaccaattgattgactgagaatctgataaagcaacaaaagatttgtcccaagctgcatgattgctctttctccttcttccctgagtctctctccatgcccctcatctcttccttttgccctcgcctcttccatccatgtcttccaaggcctgatgcattcataagttgaagccctccccagatccccttggggagcctctgccctcctccagcccggatggctctcctccattttggtttgtttcctcttgtttgtcatcttattttgggtgctggggtggctgccagccctgtcccgggacctgctgggagggacaagaggccctcccccaggcagaagagcatgccctttgccgttgcatgcaaccagccctgtgattccacgtgcagatcccagcagcctgttggggcaggggtgccaagagaggcattccagaaggactgagggggcgttgaggaattgtggcgttgactggatgtggcccaggagggggtcgagggggccaactcacagaaggggactgacagtgggcaacactcacatcccactggctgctgttctgaaaccatctgattggctttctgaggtttggctgggtggggactgctcatttggccactctgcaaattggacttgcccgcgttcctgaagcgctctcgagctgttctgtaaatacctggtgctaacatcccatgccgctccctcctcacgatgcacccaccgccctgagggcccgtcctaggaatggatgtggggatggtcgctttgtaatgtgctggttctctttttttttctttcccctctatggcccttaagactttcattttgttcagaaccatgctgggctagctaaagggtggggagagggaagatgggccccaccacgctctcaagagaacgcacctgcaataaaacagtcttgtcggccagctgcccaggggacggcagctacagcagcctctgcgtcctggtccgccagcacctcccgcttctccgtggtgacttggcgccgcttcctcacatctgtgctccgtgccctcttccctgcctcttccctcgcccacctgcctgcccccatactcccccagcggagagcatgatccgtgcccttgcttctgactttcgcctctgggacaagtaagtcaatgtgggcagttcagtcgtctgggttttttccccttttctgttcatttcatctggctccccccaccacctccccaccccaccccccaccccctgcttcccctcactgcccaggtcgatcaagtggcttttcctgggacctgcccagctttgagaatctcttctcatccaccctctggcacccagcctctgagggaaggagggatggggcatagtgggagacccagccaagagctgagggtaagggcaggtaggcgtgaggctgtggacattttcggaatgttttggttttgttttttttaaaccgggcaatattgtgttcagttcaagctgtgaagaaaaatatatatcaatgttttccaataaaatacagtgactacctgaaaaaaaaaaaaaaaaaaa

SEQ ID NO: 737 - DNA, 2919 bp, Homo sapiens
agcagtccccggtgtcggggcaggaggcacgcgcgcggctgaggcgaggtcgctcggcgcagctgttgcggggccatggcggggaccgcgctcaagaggctgatggccgagtacaaacaattaacactgaatcctccggaaggaattgtagcaggccccatgaatgaagagaacttttttgaatgggaggcattgatcatgggcccagaagacacctgctttgagtttggtgtttttcctgccatcctgagtttcccacttgattacccgttaagtcccccaaagatgagatttacctgtgagatgtttcatcccaacatctaccctgatgggagagtctgcatttccatcctccacgcgccaggcgatgaccccatgggctacgagagcagcgcggagcggtggagtcctgtgcagagtgtggagaagatcctgctgtcggtggtgagcatgctggcagagcccaatgacgaaagtggagctaacgtggatgcgtccaaaatgtggcgcgatgaccgggagcagttctataagattgccaagcagatcgtccagaagtctctgggactgtgagacctggcctcgcacaggcgcgcacacaccgccaagcagctcagcattctcccccggcacacttagtgacagtgatgctctgtgctggtaccaaacaaggcagacttgcaagaaccatggcatcttttttttttttcaaacctttcctacttcaaacaggcttctcttctgaaatgatgacttaatgtcgaatattgacagcttactgcagttttacagtattcctcacaaagggcttcaggtagattatcagagctgtcagcactacctctccccgctgaaaccagcagttcatggcttcctgtggattccctccctccctggagtgttgagggggttgtacctgccagacttccaggggacgatggaatacccagaacgctccttctgaagaaatggggccctgtagctgcagcacaggggaagggcccggcaccctttctgggtccttcctggttccctgtgggccccatgaggagtccattacttcctttcttccttcatattttacaggcagatgcttttcttataatctaattacatcttttcatttgttatatattacaaaccatcacacttagaaatacttccaggaaatgcttttttgaagtgtgaattaataagaaatggggtaaatagaaaagaaatttattgctgattggccaggtgcggtggttcgtgcctgtaatcccagctctttgggaggccaaggcaggtagatcacaaggtcaggaaattgagaccatcctggctaatacagtgaaaccccatgtctgctaaaattacaaaaaattagctgggcgtggtggtgcacgcctgtagtctcagctactcaggaggctgaggcaggagaatcgcttgaacccgggaggcagaggtagcagtgagctgaagtcccgccactgcactccagcctgggcaacagagcgagactcagtctcaaaaagaaaaaagaaatttattgctgatcacaaggacagacagttttttcccgaccatactcatcaaagatttacgtttgtatattagtaactagtgcattactagagcaggtgcaggtgaggtctttaaagtttcaatgaaagtttcttctggatctacagaaaaaatttttttttttcaatctaaaaactggaaattctagggtttttgtacattttggatgcactgggaatttattagcacaaaatcattctttgcaactcaaaattcagaagggactctaccatatcttagctcagagcacagaggagtgccttatccccacacttgactgggctgtggaggtgggcatgtgggcccctgggcccaggctggggacagagcccttgttttgtgacttaggattttgatgtggttcccatgttctctaacagggccagctgagcagcacaggccaggaggccacagtgtaagcaataacagatctgccacatgcagaagcaaatatcaggcctgtcgcacacgggcggcatttaaataggaatttctatttttgaaataagggatggtctatgaggcatacagtagatttgatgtgatccttttctccctcccttccataatggatcgtggtctgtgtgactgaacccacacagagtgtcatgggtgacagtttctggttgaagtagctccacgcctggcttctgtggacagcagattcttttccttctcacaaggggctcatttaaaatttggaggctgggtgctgtggctcacgcctgcaatcccagcactttgggagactgaggcgggcggatcatgaggtcaggagatcgcgaccatcctggctaacagtgaaaccctgtctccactaaaaatacaaaaaattagccgggcgtggtggcgggcgcctgtagtcccagctactctgaagactgaggcaggagaatggcgtgaacccaggaggcggagcttgcagtgagctgagatcacgccactgcactccagcctgggcaacagagtgagactctgtctcaaaaaaaaaaaaaaaaaaaatggaacgcagggcaagaactcgtatttggaaggagatgggggaaaggagcggtattatacctatgttgtatttgcaggcaaatgagatggagccctctctgtaaagaagagtcatttgtgcaagtagacggggtctgtgggtgcaggccctggaggggcacacaattgcctggaggcttctgtgagatcgggagagggaggagaggcagtctcttgacaaaataaagtatttttattcatttgtatttattaaatgaaaaaacaatcccatggtgtccctgttgtgtggtggaacctaatgactgttgaaataaagttctgtgttttccctgccctgcaaaaaaaaaa

SEQ ID NO: 738 - DNA, 2371 bp, Homo sapiens
agctggctgagaggggactgggcgccggcggggaaggaggagcgctaggtcggtgtacgaccgagattagggtgcgtgccagctccgggaggccgcggtgaggggccgggcccaagctgccgacccgagccgatcgtcagggtcgccagcgcctcagctctgtggaggagcagcagtagtcggagggtgcaggatattagaaatggctactccccagtcaattttcatctttgcaatctgcattttaatgataacagaattaattctggcctcaaaaagctactatgatatcttaggtgtgccaaaatcggcatcagagcgccaaatcaagaaggcctttcacaagttggccatgaagtaccaccctgacaaaaataagagcccggatgctgaagcaaaattcagagagattgcagaagcatatgaaacactctcagatgctaatagacgaaaagagtatgatacacttggacacagtgcttttactagtggtaaaggacaaagaggtagtggaagttcttttgagcagtcatttaacttcaattttgatgacttatttaaagactttggcttttttggtcaaaaccaaaacactggatccaagaagcgttttgaaaatcatttccagacacgccaggatggtggttccagtagacaaaggcatcatttccaagaattttcttttggaggtggattatttgatgacatgtttgaagatatggagaaaatgttttcttttagtggttttgactctaccaatcagcatacagtacagactgaaaatagatttcatggatctagcaagcactgcaggactgtcactcaacgaagaggaaatatggttactacatacactgactgttcaggacagtagttcttattctattctcactaaatccaactggttgactcttcctcattatctttgatgctaaacaattttctgtgaactattttgacaagtgcatgatttcactttaaacaatttgatatagctattaaatatatttaagggttttttttttttgacaaattcaacattcaacgagtagacaaaatgctaattatttccctgattaggaaagtttctttaaaaaacacgtaattttgcctagtgctttttctctacctgcccttgggctcactaatatcaccagtattattaccaagaaaatattgagtttacctgattaaactttaaaagttaattgtagatttaaattgtgtgaacctaatgatttttgcagtgaaacctttactaattcaaagttgcatgttctatgacatctgtgacttgcgttgcagagtgtacatgaaactgtataattgagtcattcagtaaaggagaacagtatcttggttaattgctactgaaaggttgagaaaggaatggtttgatatttaccacagcgctgtgcctttctacagtagaactggggtaaaggaaatggttttattgcccatagtcatttaggctggaaaaaagttgaaaacttaacgaaatattgccaagagattgttatgtgtttggttccagcctaaaaatgattttgtagtgttgaaatcatagctacttacatagctttttcatatttctttcttagttgttggcactcttaggtcttagtatggatttatgtgtttgtgtgtgtgtagtttatcctctctctcatctttatctagagattgactgatacctcattctgtttgtaaaaccagccagtaatttctgtgcaaccttactatgtgcaatatttttaaatcctgagaaatgtgtgcttttgttttcggatagacttatttctttagttctgcacttttccacattatactccatatgagtattaatcctatggatacatattaaaacaagtgtctcatacaacattgtatgtgagagaaatataaatatttacaacctgatattcgttgttgttttattgttaaaagtttattatgcaactctggaggtatagagggcatataagctatgggacatatgctgatcacaggctatattcatgaagttacttttgaccaacctgaaaactgataggattttgtttgtcatttggtaatttctactgcattcttaccatccttctctcacaaattttgatagcttgaagatctttttaattataattttgttgtatttgtttcctaggagcaagtgttcctgctgccagttctttcctctttaggcgtggttgagaaaaagcagaaactttacataaagctgtatttcttaatcatctttaatttgaaacttaagaaaatgaatttattctgttatatttatgtaacttatttcctggaagttatatctactagttttgtttgataataataaaattagctataccttgaa

SEQ ID NO: 739 - DNA, 1843 bp, Homo sapiens
tgggccctcctcccgacctgccccgggctcgtgccccgcccacccaaaagtgggtgaaaggtcggcggcgccggcactgcagctggggctgagaagccaggacggcccgagaactgacagacggagtgacagacggactgaccatggccgaccagccaaaacccatcagcccgctcaagaacctgctggccggcggctttggcggcgtgtgcctggtgttcgtcggtcaccctctggacacggtcaaggtccgactgcagacacagccaccgagtttgcctggacaacctcccatgtactctgggacctttgactgtttccggaagactctttttagagagggcatcacggggctatatcggggaatggctgcccctatcatcggggtcactcccatgtttgccgtgtgcttctttgggtttggtttggggaagaaactacaacagaaacacccagaagatgtgctcagctatccccagctttttgcagctgggatgttatctggcgtattcaccacaggaatcatgactcctggagaacggatcaagtgcttattacaggtaaggttgtctactcaggaggctaaggtgggaggatcacttgaatgccataaacatttgtacacagaggcttttgtcagaaaagtttatgtactttaattcacctctttcttgccactaacagatgtcccagctagtggaatgtatttcatgacatatgaatggctgaaaaatatcttcactccggagggaaagagggtcagtgagctcagtgcccctcggatcttggtggctgggggcattgcagggatcttcaactgggctgtggcaatccccccagatgtgctcaagtctcgattccagactgcacctcctgggaaatatcctaatggtttcagagatgtgctgagggagctgatccgggatgaaggagtcacatccttgtacaaagggttcaatgcagtgatgatccgagccttcccagccaatgcggcctgtttccttggctttgaagttgccatgaagttccttaattgggccacccccaacttgtgaggctgaaggctgctcaagttcacttctggatgctggaagctgtcgttgaggagaaggagtagtaagcagaactaagcagtcttggagggcaaggggaggggaatggtgagatccgagccctgtgcatggacttggtgagactgttgccttaatgacatcctgcaccgtgtataacttagtgtgtcattttgaaacttgaattcattcttatcaatttaagggatcttaaaaggatttggaaatggaacaagtagcttccagaccagatactacctgtggcaagaatgctgcctaccagttaactgctggtcctaccacagtcaaagtattcctcattaaagagagaatctcaggttctcactggaggcactgtgcatattttcaaccagatcaccaggagctgagatcttcttcagtccctagccaggaatacccatttgatttccagggtgccatctaatcctgggctgtacatgtggatatggacttgaggcccacctctgtgtccaagtggattgagcatatatgcctaggaggagatagactgttaatcgttggattttgattttttttttttatgcctgcaaataatcaaaagtaaaactggagtagcctaattttctgggagcaggtggagaactttccctcctacacagtgaggacagtcccagtctgctgggataagtgagaaagcccagggtgtaggaaggccctttttacatactcttttctcatgagagctcactattttaacaataaacaataaacgttgtttctaatttttgcat

SEQ ID NO: 740 - DNA, 4144 bp, Homo sapiens
gctgccattcggcaccggagtcgctccgcgctcccagaatgcaccggcagtccgcgggaaaccaaaatggcgaggggctgtattgaagtgggctgtgtttgaggccggtgtaagaacgctcattctacccccaacccttgtctccaaggacctcggtttgtgcgtgcatatgtgccgggtacccggtggggcgggtgcccagtaagtgctcggactcgcaggggaagcgcccacggggacggattggttgttttttcctgtatgaagcggttggcaccactgaagtgaccgaatgagagactctacaggggcaggtaattcactggtccacaagcggtctcctttacgtcgaaaccaaaagaccccaacatccttgaccaagctgtctttacaggatggacataaagccaaaaagccagcatgtaaatttgaagagggtcaggatgtcctagctagatggtcagatggcttgttttatcttggcactatcaaaaagataaacatattgaaacagagctgcttcatcatatttgaagacagttctaaatcctgggttctctggaaggacattcaaacaggagccactggaagtggggaaatggtctgtacaatatgtcaagaagagtattcagaagctcccaatgaaatggttatatgtgacaagtgtggccaaggatatcatcagttgtgtcacacacctcatattgattccagtgtgattgattcagatgaaaaatggctctgtcggcagtgtgtttttgcaacaacaacaaagaggggtggtgcacttaagaaaggaccaaatgccaaagcattgcaagtcatgaagcagacattaccctatagtgtggcagaccttgaatgggatgcaggtcataaaaccaatgtccagcagtgttactgctattgtggaggccctggagactggtatttgaagatgctacagtgctgcaaatgtaagcagtggtttcatgaggcttgtgtgcaatgccttcaaaagccaatgctatttggagacagattttatacgtttatatgctctgtctgcagttctggaccagaatacctcaaacgtctaccattacagtgggtagatatagcacacctatgcctttacaacctaagtgttattcataagaagaaatactttgattctgaacttgagcttatgacatacattaatgaaaactgggatagattgcaccctggagagctggcagacacaccaaaatctgaaagatatgagcatgttctggaggcattaaatgattacaagaccatgtttatgtctgggaaagaaataaagaagaagaagcatttgtttgggttgcgaattcgtgttcctcctgtgccaccaaatgtggctttcaaagcagagaaagaacctgaaggaacatctcatgaatttaaaattaaaggcagaaaggcatccaaacctatatctgattcaagggaagtaagcaatggcatagaaaaaaaaggaaagaaaaaatctgtaggtcgtccacctggcccatatacaagaaaaatgattcaaaaaactgctgagccacttttggataaggaatcaatttcagagaatcctactttggatttaccttgttctatagggagaactgagggaactgcacattcatccaatacctcagatgtggatttcacgggtgcttccagtgcaaaagaaactacctcgtctagcatttccaggcattatggattatctgactccagaaaaagaacgcgtacaggaagatcttggcctgctgcaataccacatttgcggagaagaagaggtcgtcttccaagaagagcactccagactcagaactcagaaattgtaaaagatgatgaaggcaaagaagattatcagtttgatgaactcaacacagagattctgaataacttagcagatcaggagttacaactcaatcatctaaagaactccattaccagttattttggtgctgcaggtagaatagcatgtggcgaaaaataccgagttttggcacgtcgggtgacacttgatggaaaggtgcagtatcttgtggaatgggaaggagcaactgcatcctgactgtaggactgaacattatgttcactgcactctgattttctgtaggtacagttcaaagccctaaaggagtctggcttttactatctttcttaaaaaaaaaaaaaagtcaaaaaaattcaaaaaaggggatgatactagccttaacatgtacctgtcaatgttatggatattgtcataaaaaggtatcttttaaaaatcagaacagagacttaattttttaaatcttaagatttgtagaatgtttctaggataggatattaaaaatgattgaaacccatgcatggtgttagacaatttttctaattattccattgagtcagttttttgtgattagtgattatcagagcaaacatcatgtagatagcacaagtatttggagaaacgttgtttgttttgttaccaaaatgttggaaaaatttatttcaataccttttagatttcataaagtgcagtgtatataatgcctactgaaagactgtaaaatattgaaattttctttcaagcaaagtgtaaaaaaatatattgagcctgtaaattgctctgtgactagacttcattgtcgtcttaatatattcttgcatgtgcatatatatacacacgtgtatatatatgtgtgtgattatgtgacctatgcaatacaaattatgggaatgggcagctttggagtatatatcccataattcttttttcaggaatagttgcagtatttacacagcagcatttcttctcaggcttttattgggtgctgttgcttgctatgtatgaagagaaatgtgtcagacaagtttagtgtgttctgaagaagggtgtgaacaacagtgttcatgggcttttagaatgcttttcacttttagtccttgtaactcagctgttcagtacctaaaacaaattcaaataatatgaacattatctcctactagaagtaacgttttcaagttttcatggcacattatgattgtaaatgtctctcatttttaacagtaagtctataggagtcccgtgaagattcctgaaatgtctgtagtaactgttagtcatgtttgaataagtgtagtatgaacaaagtattttattgcacagggttaacaaacagtatgttgccagctgaggctactgctgttttattacaacattacctcttgtttttataaagtgtaccaagatttaaattgataactttattttacttgtaaaaaaaaagtttcttttatcaccagtgttacagttgtcttctgtttctttttgttttgttttatttgttttcctttttagccaaagagtgaacagaagattttcttattttggtggctattcattttacttttaaaagtgattggtggattttagactaattatgggggaatttgccaccaaaataaaaaatatgtaaagtgtagtgattacagagtggttaaaatgtgggttagtacttatttattccattaattgattatttgactgtttataaagaaagttgctttatttctttaaacatcttcaaaagatgatcctttcttgtcacattatagccaaaagaagcagagaacttcattgtctgcatttggttcctggttggccaggtataaatgagctttacaaaagtgcaaattaaaaactgttacttctgtttacctccaccaaaacttgattttcccctagctattaatttaaggttgcctttcctgcagctgcaatattttgaataacacacagagtttgtgttgatttttgaatgtttgtttatatctaggggtaatgaaaaatgtaaatcccgtgtatccttattcactccacctgtatcatattatttcattttccccaaagtcctttaattctaactgaacaccagcagtatttttagaaatttttctttaacatacttggaagatgatttatccagctgaactgtctttagacgtaattattgtgaatgtctgttttattttctcatggtggttcacatggctctgatgttcagtttgtatttttggaattgctttacttagaaattaaaacagaccaacattaaatgtgtgtattttttaaagagctaaaaaaaaaaaaaaaaaa

SEQ ID NO: 741 - DNA, 2859 bp, Homo sapiens
aaactttcgtgcgcgttgaaagctgctggcgcggcggggcggactccacccctgcccggcagcccagcgcctccggccgcacttccagctctctgcgcagcccgccgcgcagcccgccgccccagccatggcgaagcccctgacggaccaggagaagcggcggcagatcagcatccgcggcatcgtgggcgtggagaacgtggcagagctgaagaagagtttcaaccggcacctgcacttcacgctggtcaaggaccgcaacgtggccaccacccgcgactactacttcgcgctggcgcacacggtgcgcgaccacctggtggggcgctggatccgcacgcagcagcactactacgacaagtgccccaagagggtatattacctctctctggaattttacatgggccgaacattacagaacaccatgatcaacctcggtctgcaaaatgcctgtgatgaggccatttaccagcttggattggatatagaagagttagaagaaattgaagaagatgctggacttggcaatggtggtcttgggagacttgctgcctgcttcttggattccatggcaaccctgggacttgcagcctatggatacggcattcggtatgaatatgggattttcaatcagaagatccgagatggatggcaggtagaagaagcagatgattggctcagatatggaaacccttgggagaagtcccgcccagaattcatgctgcctgtgcacttctatggaaaagtagaacacaccaacaccgggaccaagtggattgacactcaagtggtcctggctctgccatatgacacccccgtgcccggctacatgaataacactgtcaacaccatgcgcctctggtctgctcgggcaccaaatgactttaacctcagagactttaatgttggagactacattcaggctgtgctggaccgaaacctggccgagaacatctcccgggtcctctatcccaatgacaatttttttgaagggaaggagctaagattgaagcaggaatactttgtggtggctgcaaccttgcaagatatcatccgccgtttcaaagcctccaagtttggctccacccgtggtgcaggaactgtgtttgatgccttcccggatcaggtggccatccagctgaatgacactcaccctgcactcgcgatccctgagctgatgaggatttttgtggatattgaaaaactgccctggtccaaggcatgggagctcacccagaagaccttcgcctacaccaaccacacagtgctcccggaagccctggagcgctggcccgtggacctggtggagaagctgctccctcgacatttggaaatcatttatgagataaatcagaagcatttagatagaattgtggccttgtttcctaaagatgtggaccgtctgagaaggatgtctctgatagaagaggaaggaagcaaaaggatcaacatggcccatctctgcattgtcggttcccatgctgtgaatggcgtggctaaaatccactcagacatcgtgaagactaaagtattcaaggacttcagtgagctagaacctgacaagtttcagaataaaaccaatgggatcactccaaggcgctggctcctactctgcaacccaggacttgcagagctcatagcagagaaaattggagaagactatgtgaaagacctgagccagctgacgaagctccacagcttcctgggtgatgatgtcttcctccgggaactcgccaaggtgaagcaggagaataagctgaagttttctcagttcctggagacggagtacaaagtgaagatcaacccatcctccatgtttgatgtccaggtgaagaggatacatgagtacaagcgacagctcttgaactgtctgcatgtgatcacgatgtacaaccgcattaagaaagaccctaagaagttattcgtgccaaggacagttatcattggtggtaaagctgccccaggatatcacatggccaaaatgatcataaagctgatcacttcagtggcagatgtggtgaacaatgaccctatggttggaagcaagttgaaagtcatcttcttggagaactacagagtatctcttgctgaaaaagtcattccagccacagatctgtcagagcagatttccactgcaggcaccgaagcctcggggacaggcaatatgaagttcatgctaaatggggccctaactatcgggaccatggatggggccaatgtggaaatggcagaagaagctggggaagagaacctgttcatctttggcatgaggatagatgatgtggctgctttggacaagaaagggtacgaggcaaaagaatactatgaggcacttccagagctgaagctggtcattgatcaaattgacaatggctttttttctcccaagcagcctgacctcttcaaagatatcatcaacatgctattttatcatgacaggtttaaagtctttgcagactacgaagcctatgtcaagtgtcaagataaagtgagtcagctgtacatgaatccaaaggcctggaacacaatggtactcaaaaacatagctgcctcggggaaattctccagtgaccgaacaattaaagaatatgcccaaaacatctggaacgtggaaccttcagatctaaagatttctctatccaatgaatctaacaaagtcaatggaaattgaactctagaattgtctctagaaaacatagcttcttactgaacttgaacatttttacaacattcactggtttttgttttgttagctaataatctataatagttgagtatctctgggaatggggagggaaattatatgtaatagagcttaaaaataaagtgtcaatttccaagggctaaaaaaaaaaaaaa

SEQ ID NO: 742 - DNA, 1001 bp, Homo sapiens
gaaaaagatggcgccccgcgcccggggggccccttcctgagcgccccggcccctccctccgccgcctccccctcctccccgcggcgcccccgccccgccccgcccccgccgagaccccgaccccggccccacgggcggacactcggccgggcagccgcgggccgagcgcagccgcctccgccaccgatgcgcctggtggccagactccaagtgggaccggcggacacgcagcctcgcgtgtcaggggaagctgatggagaatcgagctctggatccagggactcgggactcctatggtgccaccagccacctccccaacaagggggccctggcgaaggtcaagaacaacttcaaagacttgatgtccaaactgacggagggccagtatgtgctgtgccggtggacagatggcctgtactacctcgggaagatcaagagggtcagcagctctaagcaaagctgcctcgtgactttcgaagataattccaaatactgggtcctatggaaggacatacagcatgccggtgttccaggagaggagcccaagtgcaacatctgcctagggaagacatcagggccgctgaatgagatcctcatctgcgggaagtgtggcctgggttaccaccagcagtgccacatccccatagcgggcagtgctgaccagcccctgctcacaccttggttctgccgacgctgcatcttcgcactggctgtgcgggtgagccttccatcctccccagtccctgcctctcctgcctcctccagtggggcagaccagagactcccatcacagagtctgagctccaagcagaagggccacacctgggctttggagacagatagcgcctctgccactgtccttggccaggatttgtagactccctgagcctcagtttcctcaactgtaaagtggagatgggtttggtgtcgggaataacgggaccaataaatgatgctttactattaaaaaagaaaatccatgtaaataaaaaaaaaaaaaa

SEQ ID NO: 743 - DNA, 2956 bp, Homo sapiens
ggggctgagtgctcagtggagagcggggagttgtgtccaccttgccgacgtcgctagccgtggggctgtcctgggaaggcggacggcgagcgcccggtgtccgcactcggccgcctgccgtgcccgtctgcgcccgtgtcatcctcactcgggacgcagggaccgtttttaaatcacaggggcgtgtgtcagcctgccctaggacttcatgtctatatatttccccattcactgccccgactatctgagatcggccaagatgactgaggtgatgatgaacacccagcccatggaggagatcggcctcagcccccgcaaggatggcctttcctaccagatcttcccagacccgtcagattttgaccgctgctgcaaactgaaggaccgtctgccctccatagtggtggaacccacagaaggggaggtggagagcggggagctccggtggccccctgaggagttcctggtccaggaggatgagcaagataactgcgaagagacagcgaaagaaaataaagagcagtagagtccctgtggactcccatgggtcataccagccagcatctgttcctgaactgtgtttttcccatcatgacggaagaagagagtgagccgcaattgttctgaaaatgtcaaacgaggcttctgttttgcacctgcagatcaccgagttggttttcttttcttttcttgcctttttttttttttgaaatttgccgagcagtggagccctctgacaatttgcaaggccctctgagaaaggaagctgcttagagccagggggttagtgggtgaggggagcgagtgctgtttttgagatcattatctgaactcaggcagcctagtagaggcagtggtgggattccaatgggtcttggtgggtgggaggtggggcatgtgcaaagcaagcaaggaacatttggggtaagaaaacaaacatgaggcaaaagaaaaaatacatgtttttaagaaaacattgagcagagaactgcagccaggatgcgctcagcagacattcactctggctgctgggacatcagaaaacaaagtcttcatctctctctccagtttcacccaccccaccctttgctttcatttcaggtgtgttggtctatatgacagggaggagagtaaaggagagcaggagcaattggctgcctgcaaagccagctggaggtgaagtgcaggaaaggaaaggtcaccccattctactccatggcctctctgctcccagctgtggtaggctcacatagccagtgtgatcggtttttaagaggcagtgcttttcagcttttctccctgatatatccattttgcttcccagcactttttaggagtagtgagagcacttcctgcccttgttggaagccccagggtggacactcagcacgaaggtctctcccttaactgctgcccttccaagacttgctcccgagatggagtgggcgtggtcttccaggctggcccttccttctcctcaccgccaccttccctgccccagccccagcagccatgggtacatgggtccccagctcacctatggattcccgccagtctgcccagctgcagtactcacgccccatgggggatcttggtctgtttttcttgtgggagcctagtggagagcagacgtggctttttatgtgtcttgttggggaggtgacttgcatggtggggacaaggctgtcgtggcaaccttgggatcgagtttgagactaaaggatgtcatgagatccctggcttctccccatgttgttcccggacaagggcagaagggaggcatggcaagggacctctgctgtccttactcaacagtggtcctcatccctccccacctcccactgcttcctgcaagggcaccagttgtatgagaaagttggcctttggacttaggatttcttattgtagctaagagccatctgaagcagcaggttgcaggacaaatgcttcagtccgccgagagcagtaccgtgtggccaagaggtggactcagagccttccttgagctaaactcggccaaccaaggcacgcagcatgtcccctcaggtctccagtcagtccaggttgaccctcagttctggacgtgtgtatatagctgtatttaatacctcaaggtcattgtggctctggggatgccggggcaggaggacgagggtgcgctgtggacacagcagtccgcggaattccgttctgggaagccaatggtcgccggcaccccttgcttcctccctctgttgtctgcctgtgtgacacacatcaatggcaataacttcttccaactcctcgcagaagtgggagaggccggcagcctgcaccgagaggggctttcctctctcttgctccccgcttcgttctgttttggctgcagagagtggttcatccatactctcattccctcgcctccccttgtggacgggggtcttgccttttcaattcctgtgttttggtgtcttcccttatctgctaccctgaatcacctgtcctggtcttgctgtgtgatgggaacatgcttgtaaactgcgtaacaaatctactttgtgtatgtgtctgtttatgggggtggtttattatttttgctggtccctagaccactttgtatgaccgtttgcagtctgagcaggccaggggctgacagctaatgtcaggaccctcagcggtggagcctgctggggggacccagctgctcttggacaagtggctgagctcctatctggcctcctctttttttttttttcaagtaatttgtgtgtatttctaactgattgtattgaaaaaattcctagtatttcagtaaaaatgcctgttgtgagatgaacctcctgtaacttctatctgttcttttttgaggctcagggagaaactagcatttttttttttccaaactactttttgtcactgtgacagttgtaaataaagtttgaaaatgctttccactctgaaaaaaaaaaaaaaaaaa

SEQ ID NO: 744 - DNA, 1791 bp, Homo sapiens
ctacgtgagtgccggaccgctgagtggttgttagccaagatggcggtagcgatcgctgcagcgagggtctggcggctaaaccgtggtttgagccaggctgccctcctgctgctgcggcagcctggggctcggggactggctagatctcacccccccaggcagcagcagcagttttcatctctggatgacaagccccagttcccaggggcctcggcggagtttatagataagttggaattcatccagcccaacgtcatctctggaatccccatctaccgcgtcatggaccggcaaggccagatcatcaaccccagcgaggacccccacctgccgaaggagaaggtgctgaagctctacaagagcatgacactgcttaacaccatggaccgcatcctctatgagtctcagcggcagggccggatctccttctacatgaccaactatggtgaggagggcacgcacgtggggagtgccgccgccctggacaacacggacctggtgtttggccagtaccgggaggcaggtgtgctgatgtatcgggactaccccctggaactattcatggcccagtgctatggcaacatcagtgacttgggcaaggggcgccagatgcctgtccactacggctgcaaggaacgccacttcgtcactatctcctctccactggccacgcagatccctcaggcggtgggggcggcgtacgcagccaagcgggccaatgccaacagggtcgtcatctgttacttcggcgagggggcagccagtgagggggacgcccatgccggcttcaacttcgctgccacacttgagtgccccatcatcttcttctgccggaacaatggctacgccatctccacgcccacctctgagcagtatcgcggcgatggcattgcagcacgaggccccgggtatggcatcatgtcaatccgcgtggatggtaatgatgtgtttgccgtatacaacgccacaaaggaggcccgacggcgggctgtggcagagaaccagcccttcctcatcgaggccatgacctacaggatcgggcaccacagcaccagtgacgacagttcagcgtaccgctcggtggatgaggtcaattactgggataaacaggaccaccccatctcccggctgcggcactatctgctgagccaaggctggtgggatgaggagcaggagaaggcctggaggaagcagtcccgcaggaaggtgatggaggcctttgagcaggccgagcggaagcccaaacccaaccccaacctactcttctcagacgtgtatcaggagatgcccgcccagctccgcaagcagcaggagtctctggcccgccacctgcagacctacggggagcactacccactggatcacttcgataagtgagacctgctcagcccacccccacccatcctcagctaccccgagaggtagccccactctaaggggagcagggggacctgacagcacaccactgtcttccccagtcagctccctctaaaatactcagcggccagggcggctgccactcttcacccctgctcctcccggctgttacattgtcaggggacagcatctgcagcagttgctgaggctccgtcagccccctcttcacctgttgttacagtgccttctcccaggggctgggtgagggcacattcaggactagaagcccctctgggcatggggtggacatggcaggtcagcctgtggaacttgcgcaggtgcgagtggccagcagaggtcacgaataaactgcatctctgcgcctggctctctaccaaaaaaaaaaaaaaaaaa

SEQ ID NO: 745 - DNA, 683 bp, Homo sapiens
ctgcgcagatgaggggagactcgtcaccaggcgtgcagtgggcactgctgggctcccccatcccgtcctaacccggaacagccccgggcaggaggcgtggaaagtcgagggggtaaaccgcgaatgtgcgttgtgtaagccacggcgcagggtggggcgcgggcgggacttgggcgggcggggtgggcttggccgagctggcctccggggcaccgaccgctataaggccagtcggactgcgacacagcccatcccctcgaccgctcgcgtcgcatttggccgcctccctaccgctccaagcccagccctcagccatggcatgccccctggatcaggccattggcctcctcgtggccatcttccacaagtactccggcagggagggtgacaagcacaccctgagcaagaaggagctgaaggagctgatccagaaggagctcaccattggctcgaagctgcaggatgctgaaattgcaaggctgatggaagacttggaccggaacaaggaccaggaggtgaacttccaggagtatgtcaccttcctgggggccttggctttgatctacaatgaagccctcaagggctgaaaataaatagggaagatggagacaccctctgggggtcctctctgagtcaaatccagtggtgggtaattgtacaataaattttttttggtcaaattt

SEQ ID NO: 746 - DNA, 6640 bp, Homo sapiens
gagcgggccgacggccattttgtgaagcggcgaaggaggtggtggctgcgttgggctccgggaagccgttcgggctggggctgtcggccgcggggcggaggcactcgcgcggggggtaattcggggtctgggttctggtgccgcgcagctttccccgtctaaaagttggttttaattggttgcccacaggattgacttggcctctacttcttgttaaggaaattcatctcttgttttatcaggtgtgtgtggtttcagcgcagcatggctgtggtcatccgtttgcaaggtctcccaattgtggcggggaccatggacattcgccacttcttctctggattgaccattcctgatgggggcgtgcatattgtagggggtgaactgggtgaggctttcatcgtttttgccactgatgaagatgcaaggcttggtatgatgcgcacaggtggtacaattaaagggtcaaaagtaacactattgttgagtagtaagacggaaatgcagaatatgattgaactgagtcgtaggcgttttgaaactgccaacttagatataccaccagcaaatgccagtagatcaggaccaccacctagctcaggaatgagtagcagggtaaacttgcccacaacagtatccaactttaataatccatcacccagtgtagttactgccaccacttctgttcatgaaagcaacaaaaacatacagacattttccacagccagcgtaggaacagctcctccaaatatgggggcttcctttgggagcccaacgtttagctcaactgttccaagcacagcctctccaatgaacacagtcccgccgccaccaattcctccaattccagcgatgccatctctgccaccaatgccatccattcccccaattccagttcctcctccagtacctacattgcctcctgtgcctcctgtgcccccgattcccccagttccttctgtgccacccatgaccccactgccacccatgtcgggcatgccgcccttgaatccgccacctgtggcacctctacctgctggaatgaatggctctggagcacctatgaatttgaacaataatctgaatcctatgtttcttggtccgttgaatcctgttaaccctatccagatgaactctcagagcagtgtgaagccactccccatcaaccctgatgatctgtatgtcagtgtgcatggaatgcccttttctgcaatggaaaatgatgtcagagatttttttcatgggctccgtgttgatgcagtgcatttgttgaaagatcatgtaggtcgaaataatgggaatggattggttaagtttctctcccctcaagatacatttgaagctttgaaacgaaacagaatgctgatgattcaacgctatgtggaagttagccctgccacagaaagacagtgggtagctgctggaggccatatcacttttaagcaaaatatgggaccttctggacaaactcatccccctcctcagacacttcccaggtcaaaatcgcccagtgggcagaaaagatcaaggtcaagatcaccacatgaggctggtttttgtgtttacttgaaagggctaccatttgaagcagaaaacaaacatgtcattgatttttttaaaaagctggatattgtggaagatagtatttatatagcttatggacccaatgggaaagcaactggcgaaggctttgtagagttcagaaatgaggctgactataaggctgctctgtgtcgtcataaacagtacatgggcaatcgctttattcaagttcatccaattactaagaaaggtatgctagaaaagatagatatgattcgaaaaagactgcagaacttcagctatgaccagagggaaatgatactaaatccagagggggatgtcaactctgccaaagtctgtgcccacataacaaatattccattcagcattacaaagatggatgttcttcagttcctagaaggaatcccagtggatgaaaatgctgtacatgttcttgttgataacaatgggcaaggtctaggacaggcattggttcagtttaaaaatgaagatgatgcacgtaagtctgaacgcttacaccgtaaaaaacttaatgggagagaagcttttgttcatgtagttaccctagaagatatgagagagattgagaaaaatccccctgcccaaggaaaaaagggattaaagatgcctgtgccaggtaatcctgcagttccaggaatgcccaatgcgggactgcccggtgtgggactgcccagtgcaggacttcccggtgcaggcctgcccagcacaggactgcctggttcagcaataaccagtgcaggactgcctggtgcgggaatgcccagtgcaggaatacctagtgcaggaggtgaagagcatgccttcctgactgtaggatcaaaggaagccaataatgggcctccatttaactttcctggtaattttggtggatcaaatgcctttgggccaccaatccctcctccaggattaggaggcggggcctttggtgatgctaggcctggtatgccttcagttggaaacagtggtttgcctggtctaggactggatgttccgggttttggaggtggaccaaacaatttaagtgggccatcgggatttggagggggccctcagaattttggaaatggccctggtagcttaggcggtcccccggggtttggaagtggccctcctggtcttggaagtgcccctgggcatttgggtgggccaccagcttttgggcctggccccggccccggccccggccctggcccaatccatattggtggtccccctggctttgcatctagttctggaaaaccaggaccgacagtaattaaagtgcaaaacatgccctttactgtgtctattgatgagattttagatttcttttatggctatcaagtaatcccaggctcagtgtgtttaaaatacaatgaaaaaggtatgcccacaggtgaagccatggtggcctttgagtctcgggatgaagccacagctgctgtcattgacttaaatgacaggcctataggttcaagaaaagtaaaacttgtattagggtagccattcacatcattttttatagggtagatcttcatattgctgtgattaatgcatccagattgttttcctagtatttccaggttagaacctgtggattgtttcaattgcatatagcttggtttccataacatagagcattggttgactgtttacagaagactcactcaccaggataaacattgctgtatgttacagtaaagctatctggagagaacacataaatgattttggcataccattagagaaaccatttgtaaaactcaaatgaccacataaagcttatcaaggagtctagattggttttgttttataccatatgggatgaagaaaatagaaatgtcagtagaactcattgagggtgctcttgccagctgctgaaaatagaagttggctactctcagaatttggtttaaagctggacagatttgctttgttatagggtaaagctttgtctaaagtcctcattttcttttaaaattgaataaaatttctgtatacagattcattgtatgtacctttattgcttcttaagggtccttgctgtatagacagtcctgcttcagaagttgctgctttgtttgtctaattgactcatttgtaaatgagcagaactgttttgttggtttttttccctaaatataaaagtccacacttcgtttgtgctataacctcaaactttgatttctaatgtcacacttaaaactgtgtggaataagacttttgccataaaaataaactatggagtcctttatctaccagagcctttttggtttgaccgccacgatttaggttagtcagtttaaaaattgttcatgttgtttggatggtatcgaaaaccagaaaccacttttaataatgtgtttaagatacttgatttgaagtccttttcatatggactaattgtagtatcaatttcctcctgtcccgattatgtgaaattttggcctttaaacaaagaggggcccattcataagaaagtgttatatctaggtttttaaaactgaagttgaaattatctttgttagcagtagtagtatagaataaaagatccgtatgctggttcgtagattgatacgtgttagtcctgttatttggaggctttttggcatagttgttcgatcaggagcctgtttactaaaagtcttcatacagagtacaagtgcagccgccagaggagaaaattgagattcttgaccctttcatactcttttctttggtattcaggacactaaggcaggaggaccacatgagttctggttggtaagtgtccttgtcatgaaaacacttgccttacaaggctctaattatgatttccctagtcagtgctctgaagatgtgtcacattatattataaacaatacggaaggggagataggtgagatgatatgaaaaacaaattttctcactgtcataaaaggctctaattatggttactttccttgtgatgaaaaacttggccttacagggctctagttatggttactttccctagtcaatgctctgaaaatgtgtcacattataaacaatacagaaggagagatagatgagagatcatgaaaaccaaattttatcttttacatggcccctttgtcttcgtttgaaacatccccaacatttcctacaaatcagcgtagttacaaaggggtcagtcttttaaaataagtatttcctattaaactatatatatatacagtgcctttttggtgttgtgagtcagtggaacactgaaatacagcggttgtgtaatttaagagtggcaacagtttcatttgataagatttgaaaaggctttttatcactacaatcttagaggattgacagtacaggatttttgtttaagagaaggattgtttagactcaagaggtgactatgttgtgggtcttttgataattcatgaatacagatttgctttgaccgatcactagatactgcctcctcaatttcaaaagcaatataacgtttgtatatgctgtttaatttaagttaatgttaagtaatcatttctcattccaaagacaatgcaaaaaacttcagcactgcttgagagttgtatttcagccacagatattttctccattggaaagctattttcattttagaaaaatgggttgtttgaagatgaaagtcttttatcttttttcacaatttattttggttatatgttcgtacattcttattaaatatttcatacactttattgcaactactttgttatttctacatcttagataaatgctgaaaaggaaaacgatttcattgttcatctaattaaataaattaaaagagcggtttgtgtagaaattggagagaactatgttttatatgaatcacaacagtgctcgttgtggactgtaattaaatgctttgccctctggaacttgatttttgtgtatctgagatttattaacagtgctaactgctaaggatactgtttatcttgttctgggcattggagtttcagtttttaaaaaattcttgaaaatgtattctgtgaaactactcatacctctcttcctgcgaattttctcctaagaactaggtttggggtagaaatgaattgacattattttctcatttgctttgtatggtatgaaggatttgtaaagctttgctcaaagttgtgtgcatttgtaaacactatcatgatattttcaattttatgtgtaaattttattgtctgtttttggtgactctgacattaatggaagagaatattttccattagatttaattttttttcctctcccttctgattttttttttattggtgttcatttttcttttgatttaaaggattagagaaatctacaaatgtatgtcataaataagcaaatttgtaaacttttctgaactttagtgaaacatttagttcacaagcataatttggaggtgtgttctgtgtttacacagtagtttggatgtacaattattattagtggctttttaaaaaatgaaacagtgttaagtgaaatgtagttcctagctttgtactccaagttgtcaaagcatcaacaatgaaaattcgattaggaaactttatttaaaatttcaggtagtaatattcagtgtagttaaggccagtcttaacccactggatgaaaatctaggactgtatggaagtaagcaaacattacatttttaggtggaaatagtcagccttgcataaaaacaaggatgcgtgaaagccttaaattccagctcccttttactggagtctgtggttgtgtacaggtatgggccaagtgtaaaatctcatcaattttaagaacactcgggaaatgagtaaagaaaatgtaaaattgctgctagtcaaatcttttggaaagaatttctggaagtggtcactttaaaaattattttccacccttgcaaaattgccacatttaaattgttttactggcagttctatagtagtccagactttagaaaccaaacacaacaaaatggcttgttgccaatatggccacaacattgccagcaaatactgccttggcatcactcagcagaggtttttgtttataaagatgaagtcttgaatactgttcaataaacttgtcaaaaaataaaaaaaaaaaa

SEQ ID NO: 747 - DNA, 1808 bp, Homo sapiens
tccggagctcggcgggcggcgtcagcggaacgggcggcttccggccgcggcgtaaacaaggccgtggactgcaggaggcggggcagacgggctgcaagagggagccggcccgacgcggaccgcttccctgcagtgccccgagtcccgggcccgcgccgccgccgcccggctccgctcgcggcccctctgtctgcaggcgtgccccggcggcggcggagagccgtcctcggccgaggaggctgggaaacgcgagcgcaggcggcagagaggcctcaacgccgtccctttcgccaccgccttttccttgcctcgcgccgctgtgcatttctctccttttcctttgtttttttggcccctcgcgggtgtgggcattgttggttagcaaaagtgcagcctcaagatggctgatggcaacgaggatctgcgggctgacgacttgcctgggccagccttcgagagctatgagtccatggagcttgcctgccccgctgagcgcagcggccacgtagccgtcagcgacgggcgccacatgttcgtctggggcggctacaagagtaatcaagtcagaggattatatgacttttatctgcctagagaagaactatggatctacaacatggagactggaagatggaaaaaaatcaacactgaaggtgatgttcctccttctatgtcaggaagctgtgctgtgtgtgtagacagggtgctgtacttgtttggaggacaccattcaagaggcaataccaataagttctacatgctggattcaaggtctacagacagagtgttacagtgggaaagaattgattgccaaggaattcctccatcatcaaaggacaaacttggtgtctgggtatataaaaacaagttaatattttttggagggtatggatatttgcctgaagataaagtattgggaacttttgaattcgatgaaacatctttttggaattcaagtcatccaagaggatggaatgatcatgtacatattttagatactgaaacatttacctggagccagcctataactactggtaaagcaccttcacctcgtgctgcccatgcctgtgcaactgtcggaaatagaggcttcgtgtttggaggcagatatcgagatgctagaatgaatgatcttcactatcttaatctggatacatgggagtggaatgaattaattccacaaggcatatgcccagttggtcgatcttggcactcactaacaccagtttcttcagatcatctttttctctttggaggatttaccactgataaacagccactaagtgatgcctggacttactgcatcagtaaaaatgaatggatacaatttaatcatccatataccgaaaaaccaaggttatggcacacagcttgtgccagcgatgaaggagaagtaattgtttttggtggatgtgccaacaacttgcttgtccatcacagagctgcacacagtaatgaaatactaatattttcagttcaaccaaaatctcttgtacggctaagcttagaagcagtcatttgctttaaagaaatgttagccaactcatggaactgccttccaaaacacttacttcacagtgttaatcagaggtttggtagtaacaacacttctggatcttaaggcttcataaataatgcctatgatcaccttgcatggacagcaatcctgtaaacatcacagagtggcatcatttgtataattatatgcattgttgtagtttgcacctgttggttttaatgtgcatgtgaatggcctagagaacctatttttgtgtctaaagtttacaataaatgtatttaacaccaaa

SEQ ID NO: 748 - DNA, 3620 bp, Homo sapiens
agcgccggcgaggcgcgggaggaggagaagcagtggggaggcgcagccgctcacctgcggggcagggcgcggaggagggacccgggctgcgcgctctcgggccgaggaaccaggacgcgcccggagcctcgcacgcggccaagctcggggcgtcccctcccctcggccgggcgaactcaaggggcgcagctctttgctttgacagagctggccggcggaggcgtgcagagcggcgagccggcgagccaggctgagaaactcgagccgggaacaaagaggggtcggactgagtgtgtgtgtcggctcgagctccgggcagaggcatttgggcccgaggcccccgctgtgactccccgagactccgcagtgccctccactgcggagtccccgcgcttgccggcaaaaactttattcttggcaaacttctctttctcttcccctcctcctcggcccccatcttctgctcctcctccttctctagcagattaaatgagcctcgagaagaaaaaccgaagcgaaagggaagaaaataagaagatctaaaacggacatctccagcgtgggtggctcctttttctttttctttttttcccacccttcaggaagtggacgtttcgttatcttctgatccttgcaccttcttttggggcaaacggggcccttctgcccagatcccctctcttttctcggaaaacaaactactaagtcggcatccggggtaactacagtggagagggtttccgcggagacgcgccgccggaccctcctctgcactttggggaggcgtgctccctccagaaccggcgttctccgcgcgcaaatcccggcgacgcggggtcgcggggtggccgccggggcagcctcgtctagcgcgcgccgcgcagacgcccccggagtcgccagctaccgcagccctcgccgcccagtgcccttcggcctcgggggcgggcgcctgcgtcggtctccgcgaagcgggaaagcgcggcggccgccgggattcgggcgccgcggcagctgctccggctgccggccggcggccccgcgctcgcccgccccgcttccgcccgctgtcctgctgcacgaacccttccaactctcctttcctcccccacccttgagttacccctctgtctttcctgctgttgcgcgggtgctcccacagcggagcggagattacagagccgccgggatgccccaactctccggaggaggtggcggcggcgggggggacccggaactctgcgccacggacgagatgatccccttcaaggacgagggcgatcctcagaaggaaaagatcttcgccgagatcagtcatcccgaagaggaaggcgatttagctgacatcaagtcttccttggtgaacgagtctgaaatcatcccggccagcaacggacacgaggtggccagacaagcacaaacctctcaggagccctaccacgacaaggccagagaacaccccgatgacggaaagcatccagatggaggcctctacaacaagggaccctcctactcgagttattccgggtacataatgatgccaaatatgaataacgacccatacatgtcaaatggatctctttctccacccatcccgagaacatcaaataaagtgcccgtggtgcagccatcccatgcggtccatcctctcacccccctcatcacttacagtgacgagcacttttctccaggatcacacccgtcacacatcccatcagatgtcaactccaaacaaggcatgtccagacatcctccagctcctgatatccctactttttatcccttgtctccgggtggtgttggacagatcaccccacctcttggctggcaaggtcagcctgtatatcccatcacgggtggattcaggcaaccctacccatcctcactgtcagtcgacacttccatgtccaggttttcccatcatatgattcccggtcctcctggtccccacacaactggcatccctcatccagctattgtaacacctcaggtcaaacaggaacatccccacactgacagtgacctaatgcacgtgaagcctcagcatgaacagagaaaggagcaggagccaaaaagacctcacattaagaagcctctgaatgcttttatgttatacatgaaagaaatgagagcgaatgtcgttgctgagtgtactctaaaagaaagtgcagctatcaaccagattcttggcagaaggtggcatgccctctcccgtgaagagcaggctaaatattatgaattagcacggaaagaaagacagctacatatgcagctttatccaggctggtctgcaagagacaattatggtaagaaaaagaagaggaagagagagaaactacaggaatctgcatcaggtacaggtccaagaatgacagctgcctacatctgaaacatggtggaaaacgaagctcattcccaacgtgcaaagccaaggcagcgaccccaggacctcttctggagatggaagcttgttgaaaacccagactgtctccacggcctgcccagtcgaccccaaaggaacactgacatcaattttaccctgaggtcactgctagagacgctgatccataaagacaatcactgccaacccctctttcgtctactgcaagagccaagttccaaaataaagcataaaaaggttttttaaaaggaaatgtaaaagcacatgagaatgctagcaggctgtggggcagctgagcagcttttctcccctcatatctgcgtgcacttcccagagcatcttgcatccaaacctgtaacctttcggcaaggacggtaacttggctgcatttgcctgtcatgcgcaactggagccagcaaccagcacatccatcagcaccccagtggaggagttcatggaagagttccctctttgtttctgcttcatttttctttcttttcttttctcctaaagcttttatttaacagtgcaaaaggatcgtttttttttgcttttttaaacttgaatttttttaatttacactttttagttttaattttcttgtatattttgctagctatgagcttttaaataaaattgaaagttctggaaaagtttgaaataatgacataaaaagaagccttctttttctgagacagcttgtctggtaagtggcttctctgtgaattgcctgtaacacatagtggcttctccgcccttgtaaggtgttcagtagagctaaataaatgtaatagccaaacccactctgttggtagcaattggcagccctatttcagtttattttttcttctgttttcttcttttctttttttaaacagtaaaccttaacagatgcgttcagcagactggtttgcagtgaattttcatttctttccttatcacccccttgttgtaaaaagcccagcacttgaattgttattactttaaatgttctgtatttgtatctgtttttattagccaattagtgggattttatgccagttgttaaaatgagcattgatgtacccattttttaaaaaagcaaggcacagcctttgcccaaaactgtcatcctaacgtttgtcattccagtttgagttaatgtgctgagcatttttttaaaagaagctttgtaataaaacatttttaaaaattgtcatttaaaaaaaaaaaaaaaaaa

SEQ ID NO: 749 - DNA, 4261 bp, Homo sapiens
tatttcatctccccaacgcatttgtgacattcttaagggcgtgaaccatgtactcaatagggccctgatgatagaaaagaaaatcagcttggtccctgttctcaagttcatagtttagtgtgggagactaatacaataactcgccgattcaacagatatttttccaacgtccgtatgtattgggtggaaaaggtgaggcaagagttgtatttcccagactcctgaacaggttgcgagatgattgactcctgagggagaccttctcaccttttcattggttgtcgctggccctctcgtctatcacccaaccaaccccgaatgcctcttgtaagccccacctccggcagccagccaatcagaagtgccgggggccagggtgctgctggggcactgacgcggtttcgattctagcgaaaaatgatttggctcggactgtcccgtgacaggcggtgcgaggaggccaggcccgcgcccgccgagccctagggccgctgctgccgacagccatggaggacgagcagcctgacagcctggagggctgggtgccggtccgggagggcctcttcgccgagcccgagaggcaccggctgcgcttcctggtggcctggaacggcgcggagggcaagttcgctgtgacttgtcacgaccgtaccgcgcagcagcggcggctgcgcgagggggcccggttggggcccgagcccgagcccaagcctgaggccgccgtctccccgtccagctgggccggcctgctctcggccgcggggctccgcggcgcgcaccggcagttggcggcgctgtggccgcctctggagcgctgcttcccgcggctgccgccggagctggacgtgggcggcggcggggcctggggtctggggctcgggctgtgggcgctgctgtggccgacgcgcgcgggtcccggcgaggcggcgctgcaggagctgtgcgggcagctggaacgctatctgggcgcggcggccgacggctgcggcggcgccacagtgcgcgacgcactcttcccggctgagggcggcgcggccgactgcgaaagcccgcgcgagttccgggagcgggccttgcgcgcgcggtgggtcgaggcggacgcgcggctgcgccaggttattcaaggacacggaaaagccaacaccatggtagcattaatgaacgtttaccaagaggaagatgaagcataccaggaattggttaccgtggcaaccatgttcttccagtacttattgcagccatttagggctatgcgagaagttgcaactttatgtaagcttgatattttgaagtctttggatgaggatgacctaggtcctagaagggtagttgccctggagaaagaagctgaagaatggaccagacgggctgaagaagctgtcgtctctattcaggatatcacagtgaattattttaaggagacagtaaaagcattagcaggaatgcagaaagaaatggaacaggatgcgaagagatttggtcaggctgcctgggccacagcaattcccaggttggaaaaacttcagctaatgctagctcgagagactctgcaactcatgagagcgaaagagttgtgtttaaatcacaaaagagctgaaattcagggaaagatggaagatcttccagaacaagaaaaaaatacaaatgttgtagatgaattagaaatacaattttatgaaattcaattagaactatatgaagttaaatttgagatattaaaaaacgaagaaatactgcttactacacagttggactctcttaaaagacttataaaagaaaaacaagatgaagttgtctattacgatccatgtgaaaatccagaggaacttaaagtcattgactgtgtggtggggctgcaggatgataagaatttggaagtgaaagaactcagaaggcagtgccagcagctggagtctaaacggggcaggatctgtgccaaaagagcctctctccggagtagaaaggatcagtgcaaagaaaatcatcggttcagattgcaacaggctgaagaaagcataagatactctcgtcagcatcacagtattcagatgaaaagagacaagataaaagaagaggagcaaaagaaaaaagaatggatcaaccaagaacgtcaaaaaacactccaacgattgagatcatttaaagataaacgcctagctcaatctgtccgaaacacctctggctcagaacctgtggctccaaacctgccaagtgatctttcccagcagatgtgcttgccagcttcccacgcggtgtcagtaattcacccgtcctctaggaaaactagaggtgttcccctatcggaagctggtaatgtgaaaagccccaagtgtcaaaactgtcatggaaatatccctgtccaggtttttgttccagttggtgatcaaacacattccaaatccagtgaggaattgtcactgccaccacctcctcctcctccaccaccaccaccgccgccaccgccgcccccaccccctcctctccgtgctctgtcctcatcctctcaagctgcaactcatcagaacttaggcttccgggctccagtgaaagatgaccagccacgtcctctagtgtgcgaatcacctgctgagcgaccacgtgactccttggaaagtttttcatgtccaggatctatggatgaagtgttggcctccttaaggcatggcagagctcctctccggaaggtggaagtgccggcggtgcgccctccccacgcctcaatcaatgagcacattctggctgccataaggcaaggggtcaaactgaagaaagttcaccctgatcttggcccaaaccccagcagcaaaccaaccagcaacagacgcaccagtgaccttgagaggagcatcaaggctgcgctccagagaatcaagagggtgtctgctgactctgaggaggacagtgatgagcaggaccctggccagtgggatggttaggctcaagtttgacaaaggcacctgccacagtaggcttgaataaagtgggtgagtcttagacctatcgaaaagcatactaacagggtgctgatagatgggccacataacaccccggaagatcagcagggccttgtgtaggctgctgcagcattttttttttttttcttttttgagatggagtctcactctgtcgcccaggctggggtgcagtggcgccatctcggctcaccgcaagctccgcttcccaggctggggtgcagtggtgcgatcttggctcactgcaagctccgcctcctgggttcacgccattctcctgcctcagcctcccgagtagctgggactacaggcgccaccaccttgcccaactaattttttgtattttttagtagagacgaggtttcaccgtgttagccaggatggtctcgatcttctgacctcgtgatccgcctgcctcagactcccaaagtgctgggattacaggtgtgagccaccacgcccagccttttttttttctttcttttgagacagaatctctctgtcatccaggctagagtgcagtggcacgatcttggcttactgcaacctccacctcccaggttcaagcaattctctgtctcagcctcccgagtagctgggattacaggcatgcaccaccacgcctggctaatttttgtatatttaagtagagacaaggtttcgctatgttggccaggctggtcttgaactcctgacctcgtgatccacctgccttggccacccaaagtgttgggattataggcatgagccaccgtgcctggctgatgctggagcttttatgtgacatggtgactcttaaaactggggagggacgtagagatgagagtttcacacaccagcccataggtgggatgtcaagacccatcggaagtgtcgctggcctaagagaagagcacttatttctcaccatggctgatctagaattgttccctgattctgaaagaagtttacactacactggtaagcagtactattagactactgactgtggccttctgtgcatatggaataatgatttctcagatttgtaggcttgaatgtgaatgttattttatcagtaatcagaataaattgcttatattcaggagttattttaaatatttaaatgaaatttattttaggcaccaagcactacataaactcataataactatttgcaatgcattagcatcactcacggggtaatgaaaacataccttagctgctgtaaaagcaaagtcttccgtgtccgggtgggctgaaagtttttaataaaattttagctaaacatttgtttaagtgaatactaa

SEQ ID NO: 750 - DNA, 3715 bp, Homo sapiens
gcggcagctcttttccttcttcctccacttcccctaccctccaccgtccgggagccgccgccaccgccgccgaggagtcaggaagttcaagatggccgccgcggagacccagtcgctacgggagcagccagagatggaagatgctaattctgaaaagagtataaatgaagaaaatggagaagtatcagaagaccagtctcaaaataagcacagtcgtcacaaaaaaaagaagcataaacacagaagtaaacataagaaacataaacattcctcagaagaagacaaggataaaaaacataaacataagcataaacataagaaacacaaaagaaaagagattattgatgcttctgataaagagggtatgtctccagcaaaaagaactaaacttgatgatttagctttgctagaagacttggaaaaacagagagccttgattaaggccgaacttgataatgagttaatggaaggaaaggtccagtctggtatggggctcattttgcaaggttatgagtctggctctgaagaagagggggaaattcatgaaaaggcaagaaatggaaataggtctagtactagatcttcaagtacaaaggggaaacttgaacttgtggacaataaaattactacaaagaaacgaagtaaaagcagatccaaagaacggactagacataggtctgataaaaagaaaagtaaggggggtattgaaatcgttaaagagaaaacaactaggagcaagtcaaaggagaggaaaaaatctaaaagcccatccaaaagaagtaagtctcaagatcaagcaaggaaatcaaaatcccctacccttagaaggcgatctcaagagaaaattggtaaggccagatctcctactgatgataaggttaaaattgaagataaaagtaaatcaaaagataggaaaaaatccccaattataaatgaaagtagaagtcgcgatcgaggtaaaaaatccagatccccagttgatttaagaggtaaatccaaagacagaaggtcacggtccaaagagagaaaatcaaaacggtctgaaactgataaagaaaagaagccaattaaatctccctctaaagatgcttcatctgggaaagaaaataggtcacccagcagaagacctggtcgtagtcctaaaagaagaagtttgtctccaaaaccacgtgataaatcaagaagaagcaggtctccacttttgaatgatagaagatctaagcagagcaaatccccctcgcggacactgtctcctgggagaagagccaagagccgatccttagaaagaaaacgacgagaaccagagaggagacgactttcttctccaagaacacgacctcgagatgatatcctcagtagacgtgaaagatcaaaagatgccagccccatcaatagatggtctccaacccgaagaagaagtagatctcccattagaaggaggtctcgttccccactcagacgtagcaggtctccaagaagaagaagcagatctcctcggagaagggacagaggtcggaggagcagatcacgcttgcgaaggcggtctcgatcacgcggtggtcgtagacgaaggagcagaagcaaagtaaaggaagataaatttaaaggaagtctttctgaaggaatgaaagttgagcaggaatcttcgtctgatgataaccttgaagactttgatgtagaggaagaagatgaagaagccctaatagaacagagaagaatccaaaggcaggcaattgttcagaaatataaataccttgctgaagatagcaacatgtctgtgccatctgaaccaagcagcccccagagcagtacgagaacacgatcaccatctccagatgacattctggagcgagtagctgctgatgttaaagagtatgaacgggaaaatgttgatacatttgaggcctcagtgaaagccaagcataatctaatgacagttgaacagaataatggttcatctcagaagaagttgttggcacctgatatgtttacagaatctgatgatatgtttgctgcgtattttgatagtgctcgtcttcgggccgctggcattggaaaagatttcaaagagaatcccaacctcagagataactggaccgatgcagaaggctattatcgtgtgaacataggtgaagtcctagataaacgttacaatgtgtatggctacactgggcaaggtgtattcagtaatgttgtacgagccagagataatgcaagagccaaccaagaagtggctgtaaagatcatcagaaacaatgagctcatgcaaaagactggtttaaaagaattagagttcttgaaaaaacttaatgatgctgatcctgatgacaaatttcattgtctgagactcttcaggcacttctatcacaagcagcatctttgtctggtattcgagcctctcagcatgaacttacgagaggtgttaaaaaaatatggtaaagatgttggtcttcatattaaagctgtaagatcctatagtcagcagttgttcctggcattgaaactccttaaaagatgcaatatcctacatgcagatatcaagccagacaatatcctggttaatgaatccaaaactattttaaagctttgcgattttgggtcggcttcacatgttgcggataatgacataacaccttatcttgtcagtagattttatcgtgctcctgaaatcattataggtaaaagctatgactatggtatagatatgtggtctgtaggttgcaccttatacgaactctatactggaaaaattttattccctggcaaaaccaataaccatatgctgaagcttgcaatggatctcaaaggaaagatgccaaataagatgattcgaaaaggtgtgttcaaagatcagcattttgatcaaaatctcaacttcatgtacatagaagttgataaagtaacagagagggagaaagttactgttatgagcaccattaatccaactaaggacctgttggctgacttgattgggtgccagagacttcctgaagaccaacgtaagaaagtacaccagctaaaggacttgttggaccagattctgatgttggacccagctaaacgaattagcatcaaccaggccctacagcacgccttcatccaggaaaaaatttaaacaagatgaagaaactccaagggtttgagtgtgtgtgtgcaggccacagcagcatgcccttggtgtagtcagtgccgaaaggggtctgttccttcttgagcctgcctgcagggatggtctccttttaaagcaggttgtgtgcagcattcagtacactgaaggcataaaccttccactcttgaacaaagcagctgctttttaaaagcgagaaaaaggaaaacggggcacaggccattcgacgccttctccaaggggtctgatttgctgagacaccagcttcaccttcttaacaaggcacctaattacaacaagcatgcacattttggtgcattcaagaatggaaaatcagaatagcagcattgattcttctggtgcagctcagtggaagatgatgacaaccagaagacatgagctaagggtaagggactgttctgaagaacctttccatttagtgatcaagatatggaagctgatttctgaaaatgctcagtgtgtactctaattatttatggtaccatttgaattgtaacttgcattttagcagtgcatgtttctaattgacttactgggaaactgaataaaatatgcctcttattatca

SEQ ID NO: 751 - DNA, 3234 bp, Homo sapiens
cttgcccagactcaacatggcggctacacgtcgcctgtcagtctgtgaagcctaccccgggcgtgggccgcagcgtcgagtaacgtcattcgaaccccgtcgcgcccctttgtgcgtcacgggtggcgggcgcgggaaggggatttggattgttgcgcctctgctctgaagaaagtgctgtctggctccaactccagttctttcccctgagcagcgcctggaacctaacccttcccactctgtcaccttctcgatcccgccggcgctttagagccgcagtccagtcttggatccttcagagcctcagccactagctgcgatgcatgtgatcaagcgagatggccgccaagaacgagtcatgtttgacaaaattacatctcgaatccagaagctttgttatggactcaatatggattttgttgatcctgctcagatcaccatgaaagtaatccaaggcttgtacagtggggtcaccacagtggaactagatactttggctgctgaaacagctgcaaccttgactactaagcaccctgactatgctatcctggcagccaggatcgctgtctctaacttgcacaaagaaacaaagaaagtgttcagtgatgtgatggaagacctctataactacataaatccacataatggcaaacactctcccatggtggccaagtcaacattggatattgttctggccaataaagatcgcctgaattctgctattatctatgaccgagatttctcttacaattacttcggctttaagacgctagagcggtcttatttgttgaagatcaatggaaaagtggctgaaagaccacaacatatgttgatgagagtatctgttgggatccacaaagaagacattgatgcagcaattgaaacatataatcttctttctgagaggtggtttactcatgcttcgcccactctcttcaatgctggtaccaaccgcccacaactttctagctgttttcttctgagtatgaaagatgacagcattgaaggcatttatgacactctaaagcaatgtgcattgatttctaagtctgctggaggaattggtgttgctgtgagttgtattcgggctactggcagctacattgctgggactaatggcaattccaatggccttgtaccgatgctgagagtatataacaacacagctcgatatgtggatcaaggtgggaacaagcgtcctggggcatttgctatttacctggagccttggcatttagacatctttgaattccttgatttaaagaagaacacaggaaaggaagagcagcgtgccagagatcttttctttgctctttggattccggatctcttcatgaaacgagtggagactaatcaggactggtctttgatgtgtccaaatgagtgtcctggtctggatgaggtttggggagaggaatttgagaaactatatgcaagttatgagaaacaaggtcgtgtccgcaaagttgtaaaagctcagcagctttggtatgccatcattgagtctcagacggaaacaggcaccccgtatatgctctacaaagattcctgtaatcgaaagagcaaccagcagaacctgggaaccatcaaatgcagcaacctgtgcacagaaatagtggagtacaccagcaaagatgaggttgctgtttgtaatttggcttccctggccctgaatatgtatgtcacatcagaacacacatacgactttaagaagttggctgaagtcactaaagtcgttgtccgaaacttgaataaaattattgatataaactactatcctgtaccagaggcatgcctatcaaataaacgccatcgccccattggaattggggtacaaggtctggcagatgcttttatcctgatgagatacccttttgagagtgcagaagcccagttactgaataagcagatctttgaaactatttattatggtgctctggaagccagctgtgaccttgccaaggagcagggcccatacgaaacctatgagggctctccagttagcaaaggaattcttcagtatgatatgtggaatgttactcctacagacctatgggactggaaggttctcaaggagaagattgcaaagtatggtataagaaacagtttacttattgccccgatgcctacagcttccactgctcagatcctggggaataatgagtccattgaaccttacaccagcaacatctatactcgcagagtcttgtcaggagaatttcagattgtaaatcctcacttattgaaagatcttaccgagcggggcctatggcatgaagagatgaaaaaccagattattgcatgcaatggctctattcagagcataccagaaattcctgatgacctgaagcaactttataaaactgtgtgggaaatctctcagaaaactgttctcaagatggcagctgagagaggtgctttcattgatcaaagccaatctttgaacatccacattgctgagcctaactatggcaaactcactagtatgcacttctacggctggaagcagggtttgaagactgggatgtattatttaaggacaagaccagcggctaatccaatccagttcactctaaataaggagaagctaaaagataaagaaaaggtatcaaaagaggaagaagagaaggagaggaacacagcagccatggtgtgctctttggagaatagagatgaatgtctgatgtgtggatcctgaggaaagacttggaagagaccagcatgtcttcagtagccaaactacttcttgagcatagataggtatagtgggtttgcttgaggtggtaaggctttgctggaccctgttgcaggcaaaaggagtaattgatttaaagtactgttaatgatgataatgattttttttttaaactcatatattgggattttcaccaaaataatgcttttgaaaaaaagaaaaaaaaaacggatatattgagaatcaaagtagaagttttaggaatgcaaaataagtcatcttgcatacagggagtggttaagtaaggtttcatcacccctttagcactgcttttctgaagacttcagttttgttaaggagatttagttttactgctttgactggtgggtctctagaagcaaaactgagtgataactcatgagaagtactgataggacctttatctggatatggtcctataggttattctgaaataaagataaacatttctaagtgaaaaaaaaaaaaaaaaaaaaaaaaaaaaaaaaaaaaaaaaaaaa

SEQ ID NO: 752 - DNA, 3313 bp, Homo sapiens
gatctgtcacaactcgagaggtggaaattccggtttccctggcctagagctcccagtgctggctttggcatgatgggcacctggagggccgcactcccgttccagccaggctgagccttctgtcccctgcctctggggcctgggaaccccccttcttctttctcctgaatggcacccccgccctagaatccagacaccgagtttcccactgtggctggttcaagggtatgtgagagctccctggtgacagtctgtggctgagcatggccctcccagccctgggcctggacccctggagcctcctgggccttttcctcttccaactgcttcagctgctgctgccgacgacgaccgcggggggaggcgggcaggggcccatgcccagggtcagatactatgcaggggatgaacgtagggcacttagcttcttccaccagaagggcctccaggattttgacactctgctcctgagtggtgatggaaatactctctacgtgggggctcgagaagccattctggccttggatatccaggatccaggggtccccaggctaaagaacatgataccgtggccagccagtgacagaaaaaagagtgaatgtgcctttaagaagaagagcaatgagacacagtgtttcaacttcatccgtgtcctggtttcttacaatgtcacccatctctacacctgcggcaccttcgccttcagccctgcttgtaccttcattgaacttcaagattcctacctgttgcccatctcggaggacaaggtcatggagggaaaaggccaaagcccctttgaccccgctcacaagcatacggctgtcttggtggatgggatgctctattctggtactatgaacaacttcctgggcagtgagcccatcctgatgcgcacactgggatcccagcctgtcctcaagaccgacaacttcctccgctggctgcatcatgacgcctcctttgtggcagccatcccttcgacccaggtcgtctacttcttcttcgaggagacagccagcgagtttgacttctttgagaggctccacacatcgcgggtggctagagtctgcaagaatgacgtgggcggcgaaaagctgctgcagaagaagtggaccaccttcctgaaggcccagctgctctgcacccagccggggcagctgcccttcaacgtcatccgccacgcggtcctgctccccgccgattctcccacagctccccacatctacgcagtcttcacctcccagtggcaggttggcgggaccaggagctctgcggtttgtgccttctctctcttggacattgaacgtgtctttaaggggaaatacaaagagttgaacaaagaaacttcacgctggactacttataggggccctgagaccaacccccggccaggcagttgctcagtgggcccctcctctgataaggccctgaccttcatgaaggaccatttcctgatggatgagcaagtggtggggacgcccctgctggtgaaatctggcgtggagtatacacggcttgcagtggagacagcccagggccttgatgggcacagccatcttgtcatgtacctgggaaccaccacagggtcgctccacaaggctgtggtaagtggggacagcagtgctcatctggtggaagagattcagctgttccctgaccctgaacctgttcgcaacctgcagctggcccccacccagggtgcagtgtttgtaggcttctcaggaggtgtctggagggtgccccgagccaactgtagtgtctatgagagctgtgtggactgtgtccttgcccgggacccccactgtgcctgggaccctgagtcccgaacctgttgcctcctgtctgcccccaacctgaactcctggaagcaggacatggagcgggggaacccagagtgggcatgtgccagtggccccatgagcaggagccttcggcctcagagccgcccgcaaatcattaaagaagtcctggctgtccccaactccatcctggagctcccctgcccccacctgtcagccttggcctcttattattggagtcatggcccagcagcagtcccagaagcctcttccactgtctacaatggctccctcttgctgatagtgcaggatggagttgggggtctctaccagtgctgggcaactgagaatggcttttcataccctgtgatctcctactgggtggacagccaggaccagaccctggccctggatcctgaactggcaggcatcccccgggagcatgtgaaggtcccgttgaccagggtcagtggtggggccgccctggctgcccagcagtcctactggccccactttgtcactgtcactgtcctctttgccttagtgctttcaggagccctcatcatcctcgtggcctccccattgagagcactccgggctcggggcaaggttcagggctgtgagaccctgcgccctggggagaaggccccgttaagcagagagcaacacctccagtctcccaaggaatgcaggacctctgccagtgatgtggacgctgacaacaactgcctaggcactgaggtagcttaaactctaggcacaggccggggctgcggtgcaggcacctggccatgctggctgggcggcccaagcacagccctgactaggatgacagcagcacaaaagaccacctttctcccctgagaggagcttctgctactctgcatcactgatgacactcagcagggtgatgcacagcagtctgcctcccctatgggactcccttctaccaagcacatgagctctctaacagggtgggggctacccccagacctgctcctacactgatattgaagaacctggagaggatccttcagttctggccattccagggaccctccagaaacacagtgtttcaagagaccctaaaaaacctgcctgtcccaggaccctatggtaatgaacaccaaacatctaaacaatcatatgctaacatgccactcctggaaactccactctgaagctgccgctttggacaccaacactcccttctcccagggtcatgcagggatctgctccctcctgcttcccttaccagtcgtgcaccgctgactcccaggaagtctttcctgaagtctgaccacctttcttcttgcttcagttggggcagactctgatcccttctgccctggcagaatggcaggggtaatctgagccttcttcactcctttaccctagctgaccccttcacctctccccctcccttttcctttgttttgggattcagaaaactgcttgtcagagactgtttattttttattaaaaatataaggcttatgtatgaaaaaaaaaaa

SEQ ID NO: 753 - DNA, 43995 bp, Homo sapiens
tggctccacacctccccgcagcgccatgatgttcttcaggcccagctgcttagctttgtgcagatggcccgtgatctcctccaggcgctgacggcagcaggtcatgtgcaggatggtctccaggccacagtagttcacggcggtgctggcgatcatcatggaggaggtctccttgtctgagccagggtcacctgctgggtgccaggtcacgtctatgtagagggggccacctgctgccatccggtcaaacctgtagggggtttgtttctgaagagaggttccaggagaaataccatccgtcactgccttcccatggggcccgggagttagagaagcatcaatgaaggttggagacagaccaatcagcgttcatatcctggctttgctacttatagctgtgtgatcttgggtacattacttaatctctgtgagttctgtttccttatttataagacacggcagatagtagtacccacttcataataacactaggatgctgggcgtggtggctcacgcctgtaatcccagcacttcaggaggctgaagtgagtggatcacttgaggtcaggagttccagaccgcctggccaacatagtgaaacctcatctctactaaaaatacaaaaattagctgggtgtggtggtgggcacctgtaatcccagctacttgagaggctgaggcaggagaattgcttgagccaggaggcagaggttgcaatgagccaagatcacaccactgcactccagcctgggccacagaatgagactctgtctcaaaaaaaaaaaaaaaaaaaaaaaagcaacaacaacaacaaaaaaccataacactaggagaatatgacggcagctggttccacagaacttagaacagtgcctggtgtacaaaccgaatactcagtatatgtgaggtgccgttataatcactattacagaggtaagacacaacaacagcgctatcattttgtgtgagagcagcacttcagacttttcacagcgcttgcctgtttattatctcaggtgagttaagacatcatgattgagagttaggggaatcctaactgtggcaagcacagcctcgctgtaggaacagttagaaagagggtcagcagactcactttctttcatgccaccccccaagccctgtgcagcagcttacagttatgcagaccaaggccaagttccgaaacgagactcaaaaaaaagcctggatgtgcacgagtacttgtgttacaagctatcaacggtgtatttaaacatccttgtgcatttaaacttcaaaaacttgggagtgacacgtgagacgtgcatacagtaaaaggcataaacttaaaaaaaaaactgcaattcatgaagtgctaatgtaattcagttggcatttctagagttcaagaagcataatccaaatttctaacttgctgaaaacaatctcactgctttgtgacttcctaaactgcactcgtgatccagcccccaagttccctcaaagaatacagtgtgagaatcaacatttttaacccattgaagagtgtgtctaaaataccttgacactgtggagggacttttacaggcaacagagaagttgcagatcagatgacccactctgccttctccttcctgccccctccggctgcttttttctgccgggttaaagggcagcccagcctcagggctgacagtttgctccccaggcaccaccactcccgcctcccaccttaaccttgcatgagtttaccttgagatgagattgacagctccctcagcagttcgaggagggaagaattccagggagaaccacttgtcaccagattccaatcgccgcctcatcttctcccggagtctctcatgccgctcggggtccaggcccggggtggaacatctcgaactatctttggagctctcactgccactgctggcactgccctccaagcaggggttgaggctgctgtttcctctggcttcgttcaccatggctgggttcctactgcacagggtggggcagggagcatcagggggcaggcagccacacccccgacacatcaagacacctgagtggcaggttcaagccggaggcgctgtatttccacacaggaagaaggccaaaaaaggtgacactgccccctcccagtggctccatgctcctcagctatggctgtccgggccgcctcactcaaagccttgccctccgctgctgccaggctccttgcatgcaaggcagcccccacccggcactgcaacatgctcctcggtgacagctacctgatggaaggtggcacagaggacctcacgctgccgacctgcgaggcccatattcctagcgaggggcagtagtgcccagctgggaggaccctggcttttcgatggtccatctctgtcagctcaggcccagagtgcgtggggagggaacagaggcaccttccccagcgggtgtgttcaactgggcggagctgcgacaaaggaagaggcttgagctccagccagcacaagggggcgggggcaaggcttccaggcgaggagggagggctgaggctctagtaaggggaggcggatggaaggagggggactcaggggcagagactgcaggggttggtggagatgaggccaacaggcgttcagggataccagatcaccctccagagaaggaacagctcactctggctggctctgcctggaacatctgttacttgaaacagttcgtgcacaggatggaaggggtgagggcttgactatgcagccagatttctcctgaattcatgctactccaaaaagaccgtgttgtgggttagaacttgatgctggccatgttccaaaaatagccagacccaagttcagtaagggcacgaatttctcagaacaaaagctgccccatctgtgcttgccttgcaggctgctcttcttacacatcacagaattcaattcaaatcatcacagtgacccagctactgggaaggctgaggcagaaggattgcctgagcccaggagttcaaggccagcctgggcaacatagcgagactccatctcttaaaaaaacaaaaaacacacctgtaatcccagcactttgggaggccgaggtgggtggatcacctgaggccaggagtttgagaccagcctggccaacatggtgaaatcccgactctactaaaaatataaaaattagccaggtttggtggcgggcgcctgtaatcccagctactctggaggctgaggcaggagaatcgcttgaacccggaaggcagaggttgcagtgaaccaagattgtgccatagcactccagcctgggcgacaaaagcaaaactccatctcaaaaaaaaaaacaaaaacaaaaaacagaaacaagtaatcagagccaccagggcacagacaggccaacagagggcatagggtcatctggcagtctggttaagaaaataagacaaacacttaaaaacaaacaaaacacttgcacagcaatgggcaaacacacagtagtgaatgggtgtgtggtgacatggcacaacagaggaaagcccaggtgaggttcatttctttcagactgtccaccactaaccctgtgtacctaaccatttggggtcttagactcttttgacaatctgattaaatgcactgctcccttcccctgaaatacacacacaggtgcacagactacacggggatacatccaaagacaaggagttgattccagactaagaaccctgggccaaagctttctccctctagggctgctctctttcattctgacctcaaactccagattctcagtggggatggctgtggggagtgaggaacgggggcgggggggaggagtaacagcaagagcagccagttggctttcctccagcgtttaagggcgcacctcgttaattgcttgctggaacagaacctagagtaggaggaagctgaaccacctgtaaaccctctgattttcaaagacttattgcattcctagtatatgccacgcatgtgccatatttgtaagccaactcccacgatttatccgttatcagctggactcccatagcaccctgggttgtaactgtgggtgaaaaggcctgtctcctttctctttccccagttccctgagacaggaccggtgtcctgcctggggtatccccagagtttggcacacggtgatagccaacattcactgagcgccaaagggccaggtgctgccactctctcaaaataagcctctgccacttactgaacaactagtctgcgccaagcactgggatactaagcctacgactcccagaaaggtcccggcggacccccgtgcgcagcgggacgcagtgggcgccagggaccgcagtgccccgggcccagcgctcttctccaggtgatcgccggggaggcaggtttaaaaggcaggagccggaagccgtctcggcgcccaggtggccgagaatccagtcaccaggtcactgagtcaccgatgggggcgaggacacgggcctgggccggtcagaggggcgggatcgtcacccctggctcaggggcccctccgtccaggcagggagccaaagtcagtcttcgcttgagggttggcggtcgctggaagtggtagccattgggagttacactaatcccgcgaagggtgcgcaagggaggcggcagccccccccaagaagagaggcaggccggcctccagcgctccccgcccacaagcacgtccttgcccccgggaggttgtttgccggctccaggatctccctcccggcgaccccggcctcgccgtcactcaccctccagtcccgggtgactcagaacgctcggccgccggccgcaccactgtggccgctgcaggggcggggaacgcagtgaaggggcgcggcgcaggtgtcaggttgctggagaggcgggcctacagggcggaaaccaccggcgcgggtgaccggaagccccgcccccaacatggccgtgcccacaggtctcgttggaggccgtgcctttatcgtcatgtgacgcgagtcctcgccccacccgtctgcagccactcctggtctcagtcccagagctcgagagggccacgtgaccgtcccggggccagtcacgtgaggcgcagatcctggctgggagggggttggtagaggggtccagagtggcagtaaaggaggaagatggcggggtgcagggggtctctgtgctgctgctgcaggtggtgctgctgctgcggtgagcgtgagacccgcacccccgaggagctggtaagaagccggcggagtcggcctggggagggggcggttgctaagggactgagagaggcgttgccgggggtggggccgggccaatctgggcccgcaggtggcagcgggtggggcctggggaccgcagccagggctctcgaagcgtctaccctgcttcacgtgcctaagtctggggtcttttctcataacccctcctggaatctgagggagaatccaggccagctccagtaaatcccacccatgtttccttttatttccatctgaaaagagtttggaatgaaacaagcgttttcagaatgagcttcctcacaggactttgtgcttatcatgctgctgttttagcttctccagtcctttctcactctatccctcaccctttctgggtcactgacagtccagcttccccctgcaaagcatcctgggaaaacttgagttgtgttcccagagttgacaagtcctttctgatttcagatacgtcacactgtcaaatggaacctgcatttttaccccccttttcagctggcgttggacatctttgaggtgtcctgaagaggagggtggttatttggagactatcagtggaaatgaagagctcagctgatggctgtagatcctcacccacatggtccctcacccctgaaaggttttttttgagggctggttcctatttgataatggctccagatgatttagaagctagccactgatttcagtaaatacttctgcctccttccactcctaaccactaaaaaaggctccctctgcggatctgtttttctagaccatccttggagaaacacaggaggaggaggatgagattcttccaaggaaagactatgaggtgagctcctttgatactgcttgggcaactaaagtagtgagtggcctggtcacttcaggccgaagcattatgattccaaccagagatgctctttgaccttctgtcccagggagtgagtgggtaagagaacttccttctaggaaagagactgtttagcaagcccttttctcaccttaaccccaaaacaaggtctggtgtttttacacgtttataaatctgtggcaccttaacctggatagagtatgtatttgccattaaactgtttgcttttacagcttacagagagacttagagtgaaaggcactggcaggcagtatgtgcccctaacaggtgtgtgcttataaactgttaaggaggccttgcttctcttctaggagagcttgcttttcagatattttcttgctcaagcagcttctctctgacatgttcttgattaagttccacctttcatgtatgggattcttagagtatgtgtttttagtaaagccaacactgctggggtgaaacaacatgcgtgactttttatcattaaattcttaaacgtaataaagaaggtagagaaaagcctataactccattcattaaaagatgactgttaacaccttactaagtatctttctacatccttacccatgcttttatatacatgatacatgctttttttaagtaacaaaaatgagattccactaaatcatctattttaacctgtcccactcaccccctttattatactttttgtatcattaggtaattttccacaaccttttcttttttttgacagagtctcactcttccataaattcttcatgctgtagaatttagtgtcagcgttaggatttgtagcacttttttgtttaacttttattatgaaggatttcaactatatgcaaaaacagaataatctgttgaaaccccttgtcctcatcacacagcttccacagtgatttagctcaagcccagtcttcttttgtctgtgctttcgttatccacttctcctttctcatattattattttttattgtatgtgtgtgtgtgtttgtgtgtgtgtgtgtgtgtgtgtgtgtgtgtgtgtgtgtgtgttttaaagtaaagacagtctccctatgttgcccaggctgttctcgaactccttgacaccagcgatcctcccatgtcagcctcccaaagttctgggattacagtcatgatctaccatacctggccgcccttcccatgttattttgaaagaaattctgtacatcatattatttcacccataattctatatgcatctctaatggataaggacttttaaaaagcataacccaatactattaccacatctaaaaaattaggaatttcttgatatcaaatatctactgtccagattttccagttttcttgtaaatgtcatatgtattttaactttatttgaattaggttccaaaagtccttttttatttgtttgataaatctgttaaatctcttttaatctgtagcttcttccttcatcttttttttttttttgtaagttatttgacaacataattaggacctgggattttctactgtctagattttgccatttggagccgtttgtatagtttaatatgctactctgatgggactgctttgaatgaaccaaaaagcactgtatccactgctgtgttttgttctatttctttttttttcttttttttaaatttgagatggagtctcactcttagtgcccaggttggagtgcaatggctcgatctcagctcactgcaacctccaccccaccctaggttcaagcggttcttctgccccagcctcccgagtagatgggattacaggcgcccaccaccatgcccggctaatttttgtatttttagtagagatagggtttcaccatgttggccaggctggtctcgaactcctgacctcaggtgatactgcttcggtctcccagagtgctgggattacaggtatgagccactatacctggccattttcttctgtttcgtaagtatttgttttcttgtacatagttgagaagtttgcaggaattagtataagatactccatattgttctgtcaccttgcactccctcactgaaccctgttacatcatcctgactgtatcaccaggactgagactgtctcacagccttcatcctacttctaggagctcaccaaggcttccccattgacacccaggctccctcaccccttctactaaattgtacttacatttgtaatgtgcttgccttcagctgatatgcatattcatgtaaatttttgttgttcttgtcattgtttgagacagagtctcactctgtcgcccaggctggaatgcagtggtacggtcttggatcactgcgacctccacccccgcctctgagttcaagctgttctcctacctcagcctcccaagtagctgggactacatgcatacaccaccatgcctggctaagttttgtatttttagtagagatggggtttcaccatgttggtcaggctggtcttgaactcctgacctcaggtgatccacccacctcagcctcccaaagtactgggattacaagcgtgagccaccacgcgtggccatattcatgtacatttcatgggttaatgttcttttgatattggtcattgatatttctcaaccatcttcaagaatgagcttcttgagagcacttgctttgtgtaagaacaaattcaggcacttaaacagaaaagtctggattttatttattcaataaataaatcaacttgacacaaaaagtataataaagaggggagtgagtgggacaggttaaaatagttgatttagtggaatctcatttttgttatttaaaacacgtgttaaaagcatgtgtataaaaacgtgggtaaggatgtagaaggatatttagtaaggtattaatagtcatattttaatgaatggagttatagggttttctctaccttgatagtcagtcaactagaaaacccttctgttgaatatctttctaaaaagtgccccttcttcctgtctcaggaagagttcattgcacatatttgactctttatttgataaatttagggtcttacaaaatgttagaatcccattttgacatccattctcattataggtggtttgaaaaatggtaactttctgtgagatgtgccattgcaaacaggaatgttttcatgcaggtcacacagtctatttatattgtacctttgaattagaaagaggcacactcagaacgtaagacttagaattaaaggcctcccccactggccatagcagcacccctagctcacaaccagttgaaggtggttttggtgtgaacactaagatgccccttcctggttgaattggggctggttcagcccccacctccctcccggccaggtgccattttgctcgtaaccccctgtaacagccctgcaagacacagataacattttatttttttaaaaagttgttagtcccctaaaccaaagagcaacatatactgcagaaataaaaagttagtcatagcaaaggagaagtaacagtatctggttttaataatagctcatatattccattggtacatatttacaaagggccaaactcaactaatttatttaaaaaaaaaagaagcgtggcacagtggctcacgcctatatgctcagcactttgggaggccaaggcaggaggatcgcttaaagccaggagttcaagaccatcctgggcaataaagtgagactttgttcctacaaaaaaatttgttcaaaattagcagggggccgggtgcagtggcccacacctgttacccccacactttaggaggctgaggcaggtggatcacttgagcccaggacttcataccagcctgggcaacatggcgagactccatctcaacaacaaatacgaaaaaattaacgaggtgtggtggctaacctgtggtcccccctactcaggagatcgaagcaggtgaattgcttgagcccaggagacggaggttgcagagagctgtgatcacgccactgcactccagcctgggtgacagagcgagaccctgacaaaaaaaaaagggattctggtgttctagcgttgcggttgtttctaaatgcccttcttagcagttttattgcactataattggcatactattcagttcacccatgtagagtgtacaattcaatggggttttaaaaattagtatattcacagagttgtacaaccattcctacagtcaatttttttttttttttgagacggagtttcgctcttgttgcccaggcaagagtgcaatgttgtgatctcagctcactgcaacctctgcctcccgggttcaagtgattctcctgcctcagcctcccaagtagctgggattacaggcgtctgccaccacacccggctaattttgtatttttagtagagacgaggcttctccatgttggtcaggctggtcttgaactcctggcctcgggtgatccgcccgccttggcctcccaaagtgctgggattacagacgtgagccactgcgcccagctaattcctacagtcaattttagaatattttcatcacctgagaggaaaccctgcactcattagcagccactgcctgttctccttgcccctgactccaggcaaccagtgatctcctttctgtctatttgcctattctagatatctaaaaaccttctaaatgtttacggaaccatatcattattagatggaaccatcaatgaagtacttgaccagtaatttccatacatattttggatgaaggcaagggtattgtttctcctctgctctcaggcaccactcgcggaacactgctaacaccgatatgtggaggttgtttccccactactcaggaggctgaggtgggaggatggcttaagcccaggagttggaggttgcagtgaaccgagattatgccactgcactccatgctgggtgacagagaaagaccccatctcaaaaaaaaaaagtagtaggttgtcacctgcatttctcagcagctggcagtgaattgaaggttcacaggactccctccttgagtttggttaacttgctagagcgggtcagaaaacacagaaatgctacttacatttgctagtttattaataaaggatatcataaaggatacagaagaacagccagatggagagattcaaggaacgtgggagggggcacggagctttcatgccctctccaggcacgctaccctccaggaacctccaaacggttcagctgtctggaagctctctgaaccttgtcattttggagttttatggaagcttttttatgcagtcatgattgattacatcaccagcccttggtgatcagcttaaccttcagcttcggtctcctccctggagggatgggtgtcccaccccgctaatcctgccttggtctttctggtgaccagccccttttctgaagccatctaagggcccccagccgccactcatctcattagcaaacaaaagataccacggctcaaaaaaaaaaaaagacaaagtatgtttgtgtgtgtgtgtgtgtgtgtgtgtgtgtgtgtgtgtgtgtgtgtgtattgttggggctcagaaaatgatacctggaaatatggtgctttgatatgctgaactctccaccctcacactttgtctctcccaaagcacaggatgaggctcttctctgccgttcccttatctacctagaaactggacctaccagagaggaacacagttgtctttgatccctttcctgaaatgtcattaaccagggaacattaaaactcatcttacagaggagactgaagaccaaacaacatacctagagcctggacaaactgtcccaaccgttgtttgttcactgtcccatacaatttccaaagagaatcattcacaagatgatatctgcttcccagatccattcattccccactaagaattatttcctcccacatccctatctccccttcccctgtgaagaagagtatagaagcgtctgtacctcgctggcattattgggtaatcattctgcagttcccctgtgcaatgcatgttaaataagtggatgcctttgctcccattaatctgccttttgtcggttcactttcagcagacctttagagagtgaaaggggaagcttttcctcttggccgctacaatacatatgtaggtgcatatatgtttaatcacttatggatgagtctagtttctaaaagtacttttttcatcactgtgtttcttttctgatcagtaaaaaagattttttttttttttttgagaccgagtctcactctgtcgcctaggctggagtgcagtagcacaatctcggctcactgcagcctctgcctcctgggttcaagcgattctcctgcctcagccaccctagtagctgggattacaagtgtgtgccaccacacccacctaatttgtgtatttttggtagagacggggtttcgccatgttggccgggctggtctcaaactcttggcctcaagtgatccacctatctcggcctcccaaactgctggaattacagacgtgagccatcacgcccagccgatcattttttaaaatataaaaaagcacaccatttgtgctatgagaatttcagacaacacccagaaacaaatatctccttaagcactacctcacggatgttttcccattatgaatgctgacgtacaaataatcctaattttgtttaatcaaaaagggatattatacttttaattctccatcctgctttatttttattttttaattgcatcttgctcttttgctgaataatttttggagattttccatatctttctatatagacttaactataatcattttattggtgtatagtttactatatttggatgtataattgatttactcagtcacttgttggtactccaggactcataaaaaaagaatttggactaactctaggtagtcatatagatagaataaattgtcactcatcacatgtgtttggctgacttgaaactattgtctgggagtgtggctgccacccagccaatgtccagctgatgtgggtaggaacaggttgtgggaaggagagctgatggccgaccattatttttctttgttgccaaactgctgcgtcttttttttttttttttttgagagtgtctcactttgttgcccaggctggagtgcagtggcatgatcttggctggctcactgcaacctccgcctcctaggttcaagcagctctcctgccctagcctcccgagtagctgggattacaggcgtgctccaccactcccagctaacttgtatttttagtagagatggggtttcaccatcttgcctaggctggtctcgaacttctggcctcaagtgatcctcctgcctcagcctcccaaagtgctgggattacaggtgtgagccactgcacccagcccagactgctgcttctctaacaagacaactaaaatgatttcctttgaattgtttctctaaatgtctgtggcatacctgcaagttgcttgcaggatttctgtgttttgtgatgcatgttgtaaaggatgctgcttcagatgtagaagttttaggagccgagagccaagctgaatctgtgcctcttcctaacataaagtggaagttggccaggcgcagtggctcatgcctgtaatcccagcactttgggaggctgaggagggcggatcacgaggtcaggagatcgagaccatcctggctaacacggtgaaatcccgtctctactaaaaatacaaaaaaattagccgggcgtgttggcaggcgcctgtagtcccagctactcaggaggctgaggcaggagaatggtgtgaacccgggaggcggagcttgcagtgagctgagattgcgccactgcactccagcctgggcgacagagcgagactccgtctcaaaaaaaaaaaaaaaaaagtggaagttgcttttaaaaatactttccatgttagtttgtcttgtgactaacctcatttccatagacactaactacaaaagataattataactaattgacattctaaattaatttggttctggctaactgaaacttttgttcatatctaatggagtaagtttcataaggctgatgatagctgaaggtctttaaatattttgccaaaacaggaagtttaaaaataggtaatttaaaacttctcctaaagcatgaagtatgaacctaaagcaacaccactcaaattttaatgtgcatctgagtcatctggggctgcagggctgcaggagtctaagattctgcattttgtttttgtgtttgtttttgaaacggagtctcgctgtgtcacccaggctggagtgcagtggtgcgatctcggctcaccacaacctccacctcccaggttccagtgattctcctgcctcagcctccaaagtagctgggactacaggtgcgcgccaccatgcctggctaattttgtatttttagtagagacagggtttcaccatgttggctagactggtcttgaactcctgacctcaggtgatccacctgccttgacctcccaaagtgctgggattataggcatgagccaccgcacccagccagattctgcattttgaaccagctcctcctgggtgctgcaggtaccactgctctgcccatccacacgttgagtagcaggaacccagaggtttgtccctttgcaggtcttctcacctgacatgaccttttgactcaactttgcctcttttcagagtttggattatgatcgctgtatcaatgacccttacctggaagttttggagaccatggataataaggtgggtcttacaattcttcatctctggggatcaaatcagtcttaacatggcattttttttctcttctaaaggccccagtaaacatctttacaccttgttttttgaaccttttcatgcgatacaggcagacctcactttatgcgctttgctttatttcacctcgcaggtactgcaggttttacaaactggaggttggtggcaaccctgtgttgagcaaggtgccatttttccaatagcatgcattttgtttgcattttttagccataaagtattttttaattaaggtaggtacatttttgtaggcataatgctattacacactttatagacctcagtatagtgtaaacatcacttttatatgcactgggtaaccaaaacactcgtgtgactcactttattgtgatatttgctttattgtggtggtctagaaccaaacccatgctatctgcaaggtaggcctatgttggcatttattccctaggcctttatcctgccaaccagagttccccctgtcagtgcaccttgcccagcctcttaagagtccatcatttttgcactgtaaagcacctgaaatcccaacatcatctttactgtgcctgctctccacgtggaatttagcttaaaactggttggccaagatgtatttcttcccctctgccaccataaccctgtaaactgaatcattcttttcctgtgtgaacagaaaggtcgaagatatgaggcggtgaagtggatggtggtgtttgccattggagtctgcactggcctggtgaggaggcagggcctggagggatggtgggccatagggctggaggggcttacagggaaagccctggcctggtgaataacattgtcatttgtcattataacatttataacattataatgcaataacacttgtcattataatcaagagtgccttttcttttttcccttttttttttttaaatgaataatcctggcacagtttttcacacttcccctgcttttgctttgtgaaatgaaagcgagacacatgacaatggtgctcttgaagcgctcaaaggtttgggcaggactttatcttttatgatatgattatggatcataatctctaatctacctagtaaactagatgtctccctaatgggtagataatgcattgggtagagtaaataatggaagttaaagttacttttttttttcttttaatttaaatagagacagggtctcgctttgtcaccctggctggagcacagtggcgtaatcacagttcactgcagcctcgaccttctgggcttgggtgatcctcctacctcagcctcccgagtggttaggactctaggcaggcatgagatcgctctttagggaaaaagcgaagtcgtgggtacggaactgtgaacatcgtgcccttcatttagcacagcgtgccagtgaacagggtggcacaccatagctattgatctcatgcagggagtttatggtgctatcctgggctcctccccgtacgtcgttaatgttatctagaagatagagccagcagctgtgagtgaagggatatgcccgtatgaacagagttggtggaggcagcaacttcacaggtgaatcaaagacaaggcaagattggaaacatggccaaagatgaggatagcaaaaagtctggaaccaaaactgccgacttcacattgttaaatatgaggaagagaagctggaaaaatcagcatcagtcaaaaagatccatgtcaaatctgattccggtcagtacagtgttgggatagggtatctgtcctcagtaacagcctgttgaccacctttatcttgaactggccacaagcctcctacttaatttgacatgatatgcctagaaaatgtacacatgtgttcggtataatatagccacaggggccaaccacaatttttattttcatggcatgcatcaaatttttactatagtaaatccacaagtaaaggaacatcttactaggtaagactgatggcattcagaagccctcttcagtgatattctgatggataccattttggggaaacttgggttgatttattgttttatttaaatctcagggtgttgggccagggacggtggctcacacctgtaatcccagcattttgagaggccgagacaggaggactgcttgagcccaggagtttgagaccagcctgggcaacgtagggagaccctgtctccttaaaaataaaaaaaaaattaaaaaaaagaaatctcagggtatttattttgctatatatgtttctggttgcagatttctctataataagcatagtccttaggcctctagttgttagtgtttgtgctacttttatatcaaactctttggagctgccacttgtcagtactacaggttgagtgttccttatcagaaaatccaaaatgctccaaaatccaaaactttttgaatgctgacacgattctcaggaaatactcattggcgcattcagattttggatttcaaatttttggatttgggatgtttaatcagtataatgtagatattcgaaaaaaaaatctgaaatccaaaacacttctggtcccaagcatttcagataagtgttactcaagctgaagcaactttacctcctacctttgtattttaggaaggcacacctgcctttatgacatagcactcccaactcttgtccattgatgtgtggccactttatggcttcagtatcaaaaagcctccaggcattggcttgagggaaggccagagttaaaggcaagaagctttgatcctgaatccataaaattagaagtctttctagttctcctttaagccctgagcactttggagagtggaatactggaatttggttgttttctctacccagagtaactatggactataagatggttataagtcaagcctggcacagtggggtgtgcctgtaatcccagctacctgggaggctgaggcaggaggatctcttaaaccctggagttcaaggccagcctaggcaatatagcaagaccccatctcaaaaaaagatgatttcaagtcaaaataatgacttacaaaatagaacctgctaataaggaacatgcaaaaagcacatacacctaaatgaatgttgtgttttaaagcaagcttgtccaacccatggcccaacacagattcatataccttttaaaaacatttatgagatttttctgagtttttcttttcttagctcatcagctgtcattagtgtattttatgtgtggccaaagacaattcttcttccagtgtggtccagggaagccaaaagagtagacacccctgtgtcagtagtctttcttggtctcacatctttttctgcacctgcttccctctttgttttccgttgcttcactcaacttagctgtactctctgcctttgttctttggaggggcagtgggactgggctggagaagggatctcctccttctgcgcttttctgctgtgcattcacgtactgctggctggtgagcagcctccgtatgtgcagtgggggaggagatgccttcaagaggagcacacctgtactatacttgtgctacacttggaaataaggctgtgtgacagatctcttgctcttcacaggtgggtctctttgtggacttttttgtgcgactcttcacccaactcaagttcggagtggtacagacatgtatccttttcacggttcctggtgttcgtggacttcagtggtcaccaagattctttcttacatagaaatgggtctaacagtaagcatagtattagaagggccgcttattagctattcagctttaatatttctaatgatcactgaaggacacaaaagaaggactttaataagcaaagacatatacctatgtttgtggttgataagattacagatgccgcaaagatgcctgtactccctaatctgtaaatttaatgtagttccaatcaaaattccaatagaatttgttgtggaactcagaaattctttgtaaatttgtgtagaagagtaaagggccaaaagcagtcagtatagttctaaatgacaagaaggtggacttgaccctgtcagatatcaagtcttataaaattaacaagtttggggagttagggaaaaaaaagtcataaaatttaagatacagtcattgaaattggtcatattggtgcaggaatacctagacagtggaaaatgatagagaagcagaagctggtcctcacatacatggaactttggtgaatgacagttaatattacaaatcagtgagggagtgatgaatgatttaataaaagacgctgtgttatttaataaataaaagatacacatctctgtagtcccagctacttaggaggtgagcccaggagtttgaggctgtaatgcaccatgactgtgcctgggcagcatagcaagaccctgtcttaaaaaaaatgatgctgggacatgggtgatccatatggaaaaatagttatattcctatttcatactataaataagataaattccagatgaagatgtaaatatgcagaacaaaacttcgggagactatatgttgtcaagagtggggaataatttcttaaaactccagaaggcacagactataagaaaaaacatcaatggggccggacacagtggctcacgcctgtaatcccagcattttgggaggcagaggcaggcggatcacaaggtcaggagattgagaccatcctggctaacacggtgaaaccccgtctctactaaaaatacaaaaaaattagctgggcgtggcggtgtgcgcctgtagtcccagatgctggggaggctgaggcaggagaatggcatgaacctgggaggcggagcttgcagtaagccaagatcacgccactgcactccagcctgggtgacagagcaagactccgtctcaaaaacaaacaaacaaaaacatcaatggctgggtgcagtggctcatgcctgtaatctcaggactttgggaggccgaggcaggcagatcacctgaggtcaggagttcaaggccagcctggctaacatgacaaaaccccatctctactaaaagtacaaaaaattagctgggcatggtggcgggtgcctgtaatcccagctacttggaaggctgaggtgggagaatcgcttgaacccgggagacagaggctgcagtgagccgagatcgcgccattgcactccagcctgggcaatgagagcaaaactgtctcaaaaaacaacaacaaaaaaaaaaaacaaacaaaatcaataaatttgaccacatcaaagtacatattgtatttataaagacaaaaactccaaataacaacaataaaacaccataaataaagtgaaaacaagtccacagcctgagagaggttatttactatgcatttaagaggcagataattagtatccagaatacaggaagaggctgggcgcggtggctgacgcctgtaatcccagcactttgggaggccgaggcaggcggatcacttgaggtcaggagttcaagaccagcctggccaacatggtgaaaccctgtctctactaaaaatacaaattgagctgagtgtggtggtgtgcacctttagtccagatacttgggaggcagaggcaggagaatcacttgaacccaggaggcggaggttgcagtgagccgagattgcaacactgtactccagcctgggtgacagaatgagactctgattcagaacaaataatacaggaagaactcctgcaactcaatcagaaaaacaacagatggtccaatggaaggaaaacgagcaaaggatgtgaactggaattctcaaaagagaaaaactggccagtaaacctctagaaaaaggaaggtgcacattcctgtgactcatacattcctcttagaaatttgaaccgtagacatgtacaaaggtggtaattatagctttatgatagcaaaaagctggagtcaccaaatgggagaatggaaaaattatggtacattcatatggtatcattttagacatcatgtcatttctgtagattgtaaaataaaaattttagacaagtgaaagtgaacgaaccacagagttgtgtgtatcaacatggctaattctcaaagacttaatgttgagaaaaaaagagcaagttacagaatatacaagtgccgtgtacaacagtgtggacacttttgaaatacacacaataatttcaggttagtggtttctcccaggggagagaggaaggaaaactgtttttttttttgttttgttttgtttcttaaaatggtactgaatgttttcttttttaaaaatacctggagcatatatggcatgttgttgagatttgttaaagctacagttgtgagggtatgggtattcgttactttttgtaatgtttgaagtatttcctaatgtcaaaggcatctcaaacaattttttcttttttttaagagatgaggcctcacactgttgcctaggctggaatgcagtggtgcaatgacagctcactgcagcctcagcctcccaggctcaagcgatcctcccacctcagcttcttgagtagctgggaccataggcatataccttttgtactttttgtagcgacatggtctcactacattgcccaggctggcctccaactcttaggctcaagtgatcctcctgcctcagcctcccaaagtgttgggattacaggcatgagccattgcacccagtcatctcaggcagtttttaaaaaatttttatatatagagaaaaagtgcactcagcagccagcatgatccaaaggagaagcagctgcaccctctcaagtgatgacggggacacccctcggctgatgaacaagtttccttaacccagtttccgcagcggtggaggagtgcagccagaaaggctgcctcgctctgtctctccttgaactcctgggttttaacctcacctttgtcttcctggcaagcctccttgttctcattgaggtgaggtggtttggattcacctgctcgcttaggaggttttagagtcccgcactccttttccccacctccttccagaatgtcaggaaactgagaatgcagattcctgcagaaagtggcctcttgttcactaaaggtaaaggtttcacctctggtgagattaaagaagaaaggcctcccaggtgatgctcattcacagggaacttgtacagattctggggggaggaaaaaagggggaaagggctgaaaacaaaactgttgggtgccatgcgcactacctgggtgacaggatcattcatgtcccaaacctcagcatcatgcaatataccctcgtaacatacctgtacatgcaatccctgaacctaaaataaaagtggaaattatttttctttaaaaagtgcaagtctggccactttgggaggccaaggcgggcagatcacctaagatcgggagtttgagaccattctgaccagtgtagagaaaccctgtctctagtaaaaatacaaaattagccggtaaaaatacaaaattagccgggcgtggtggcgcatgcctgtaatcccagctactcgggcgactgaggcaggggaattgctggaacccagaaggcggaggttgcaatgagtggagattgtgccattgcactccagcctgggcaacaagagtgaaactctacctcaaaaaaaaaaaagaaaaaaaagtgcaagtcctcccattgcccctcagacctcctgagtcagatcctctggagtggggcccagcagctgtggttctgcaagccctccaggtgacgctcacgctgctaatgaaggtggccagctctccctcttccgccgcccagattgttgagggtaagccagagaaccaatggatttcgagttatgggtgtgcctgctctcctccatcagccggtggcagcaggttccgggatacccgaggtcaaatgctatctgaatggcgtaaaggtgccaggaatcgtccgtctccggaccctgctctgcaaggtccttggagtgctgttcagtgtggctggaggtaagaagggtccaacttgtatccttcaaatactcaaagggcagagacgacaagaagcatgatgtatttcagttattagatttggactgcagggcccagcctcaaacagctgatgtctgcactttttgttgatgggctgtttttaaatgcagacactgttcgtatgttaccattcagatacctgacaaacacactcttcagttttgggatttggaatttagcttgtggaattagcttttgtcaaaattagcaagctttttgtgtcaacagccagatagtaaatatttaaggctttgtgggccaagaatcagaatggaagctcttatgtagatgtttatgtaactatttacatgtgtgcatttaagaacgtaaaagccagtcttagttctcaggccgtgtaaaaccaggagggagctggtggtctgggctcacaggctctcatttgctgacacacaatttagaatgtagagtgttttctcttctagcaagacttgaaatggagcttatttggtgggaatttggctctttctcttataaagtcttaggatcatctctgttcagttgtcacgaggaaggtttttgtagccaaggtctcctgacccaggggcgtttctgcactgactgttggtctttcctttttcaccctgcccagggctcttcgtggggaaggaaggccccatgatccacagtggttcggtggtgggagctggcctccctcaggtaagatgggctgagagggtgtgggcctctgggcaggcctagtgggaggtctggttacactgggccaaatccattgggacaccctgacatcacattggaacctggtgccattctggcttcacgtgtaaaccatgtgtctatctctcaggaaagggcataacttatacttggaagttttaatgatgccctaccgagccctaggagcaaaaatgagacatagagaaaaactgtgacgtggcggatgaaagtcactgggtgcttccatagccatcaccaggcgcctctatatagggtggctgggtggatcatctcagtgctgccagatccaagaggctcgaagcatcgactgacatggttttaggcacagttccgtgctgattctagttggcgtggtacagtcataataactgctgctaattatggtctgtgtgccagacgccatgtatactaactgctttctccttatagccaccttcaatgattcgttgttattattacccccatcctcagatggggaaactgaggcttagagaggttgaggtactagctcgagacctcaaagctcccattcttgggggctactccagatccctggctgctgttggagaagtctcagttccctgtgaactgtcactcttagtcatttccctctccagtcctgagaagagggagttattgtggttgggagtctctgaggtgaaggagggaagattctttcgtccagagctcgtcttttggtctctctcctgctactgccttgagcaccagatctggcagaagtgagccaaggggtggaaggccaggcgtggagtgggcatcagtgtgcacctttgtggggcagacagaggacaggctctgggcccttctcttcctggcgctgctgagcagagcagactcggtcttctgcaacagcttccgcgtccccttccctcagctcagccatttgcctttattctttcagacttgttgactctgcacaaaatgggatttcagaaggtcctagaaacacgagggcaggaaaaataagctcctcccaagggtggggggtaatctccttttttcccaagtttttttattttcattttttgagacggagtctcactctgttgcccaggctggagtgcgatggtgccatctctgctcactacagcctccgcctcctgggttcaagcgattctcctggctcagcctcctgagtagctgggattacaggcatatgtcaccacgcctggctaaattttgtatttttagtagagacagggttttgccacgttggccaggttggtctccaactcctgaccttaggtaatcagccgtccgcctcggcctcccaaagtggtgggattacaggcgtgagccatgagctaccacgcccagcctccttttttcccaagttgctgttctggactttccttcctgcagcacacttacccaggtgtgctcaagcagaggggcctcccctgatgccgtggattcccatagtttcagtcctaggctgcccctgacctgtgttcttttttttttttccataattactggggtacaggtagtatttggttatatgagtaggctctttagtggctctcttttctcttgctttagtttcagagcatctccttacggaagatccagtttaacttcccctatttccgaagcgacaggtatggaaaggttagaaattggtttcttttttggaaacaacatgttcatgcgctgcgggtcagactcgacacttgctctagcctggcagtatcccctgcggggaaacccgactgggagaagggggcgggctttgaacttttcttctggaaataagaagccaaagcaccaggctggcatcgtgacttttattttgtcatgccgtaaggcctagaagcatctcaggcaaatgaagatggtcccagattaaaaacccaaccaagaaaggccacagacaggcatattcttaggaaggcgttttgtattccccagtgattcacttggtcagccaccctcctgggtcagaaggtactcttagtagacttcttagccctgtatcagatgtgtgtgttactgacctgccggcctcgtaaggctctttcaatcagagactcagtttagagtcacggaccaccttctttttgtattcctgcaagttcggcacatacccagaaggcaccttgatgtttttactgatgccggggttttctggaaggaagatccggtgggaacatggtgcagcagtgatcgtgccgatctttgatctgccccctgagctgggggctgagattctgagatcacagaaaacacagaggtcaggggctcctgttcccaggcagagtagccgccatgctgaaagggactctggtgctaaggtgtgtggctctcgggtggacacactcgcggcaaaggctgcctcaccagtgacctgcccttccaggatccctgcctattcattcacaggtgtgagaaaatgttcatgataaggaagtcagaaaccaccttttgggggctgggggctctttattggataacccgtctctctcctctcctcagagacaagagagactttgtatcagcaggagcggctgctggagttgctgcagctttcggggcgccaatcgggggtaccttgttcagtctagaggagggttcgtccttctggaaccaagggctcacgtggaaagtggtgaggaggaccttcagtgaaagcattaaccacaccccccgaattacactgggtgtcccttactcggtacatggaatggtagttttgatgagactggggggtcaactggatcagaaacagctttcctcttgtgcccataacctccacactggactttctgtacttctcatatcaataccctccctaaccccaaatcaaaccgctgttactttttttttttttttttttttttgagatggagtcttgctctgttgcccaggctggagggcagtgacgcgatctcggcttactgcagcctctgcctcctggattcaagcgattctcctgcctcagccttatgagtagctgggattataggcacgtgccaccgcatccagctaatttttgtatttttagtagagatggggcttctgacatcaggtgatccacccgccttggcttcccaaagtgttgggattacaggcgtgagccaccacgcctggccttgttatcctttcttgatgaaccacctgacatgaaaatgtgaaactggctgttgtcataaagcaggaagtgatggggcttggactggagccggtcttctccctcagagcaggctgtccttccctttgcattgatccttccttttggtgcaaggtctggtctgtaaaggctgtaaataggctctcatagtagagtaggctgctggaacggaaacttcttaaagcccaatctagagttggtcatacctggggtgtatctactgtaagggtgactagatctctgtacccggatgtagattccggaggtctctgcgtagagcagtgggtaccaggaggaagggttgggagagagtaggacatgccactcctgaaccttcttgtcttttgtcacctctcccctagctcttttgttccatgtctgccaccttcaccctcaacttcttccgttctgggattcagtttggaagctggggttccttccagctccctggattgctgaactttggcgagtttaaggtatgttttgtcctttccccaaggatttttaatttgacccatgaaaatttcctctcaagtgaaggaccagagagaaatgagcagagggctaggtacaacttccagggacacatctcacccattagcctctgccgtgcgggaaagcagccccactcttgcttctgtcttctcttctgtctcttccggttctcatggctgctatggtttttctctccctctccctttccccttctctcagtgctctgactctgataaaaaatgtcatctctggacagctatggatttgggtttcttcgtcgtgatgggggtcattgggggcctcctgggagccacattcaactgtctgaacaagaggcttgcaaagtaccgtatgcgaaacgtgcacccgaaacctaagctcgtcaggtatctgcacagtcgcctcccccccgagcctgctgcggctccctgagcttggtgtgggccgcgccatctctcccgaggagcggaccctgcctccacggctttgatttctcatctaagactgagaatctaaacacggccatgcatcttccctacttgacaggccaaagggctgagccagcttaattgatgtcagagttgctggttgactccctgcctgtcctgacttggccactcggacacatgacaaggttagaagggtcaccgtggccctgccgagcagcttgctctcaggaggcttctcgccccaggacttattataatggaaagccattcattccttggagagagatgatgtggacgtagcagcccactttaactgtccactttttacaaacaaattgctggaatacagcaaatcacggatcaattctgcacacatgttgactgaccaggggctgctgtgaatgctgtttggagaaatcggggctgggggtaggcagggttatgttttgaatttctgagaccagagcttctttctgtggcgttgtaacagctgtgctttgcctcctagagtcttagagagcctccttgtgtctctggtaaccaccgtggtggtgtttgtggcctcgatggtgttaggagaatgccgacagatgtcctcttcgagtcaaatcggtaatgactcattccagctccaggtaaccccagtgcacctgctacctttatcccataccacgaggaagaatccagaaatgtatgaccttcctctgttgagaactaatagatatgttgggttcatccttccacacccattacctgagcgttgagagatatgggaatctgtagtcgtctttttacctcagagaaagtgcacaccacatgccctgtgtctttgccacttctgtgaacaaccctggcgtcacagaggggaacctgggaacaaccctggcgtcacagaggggaacctgggaacaaccctggcgtcacagaggggaacctgggaacaaccctggcgtcacagaggggaacctgggaacaaccctggcgtcacagaggggaacctgggaacaaccctggcatcacagaggggaacctgggaacgaccctggcgtcacagaggggaacctgggaacgacactggcgtcacagaggggaacctgggaacaaccctggcatcacagagggcaactcctctctgttgaacaacactcatgggaaacagacacttggaaagctgacagcaaggtgctttctgagccccagttactcttccacctccccttgcctgaaggggccacagcccagaggctcagcacccacctcatggcctctgtgactatgacagtcactcttgagaggaagaaatatctgtgtcagggcaaggaggcttctctcttcccagcatcctctgcctcttcccggcgttgggtcctttgtgggtgcgccaccctcctgcactcctccttttcccttcttggggggcgcgatattttccagaggctttccctgaggagtggtcccatgaggtagtccgtggagcctactccacgctgtgttctttcggtccaacccggaggctctgagagctacacctgtggttcagtgagtcagccagatgtgtgattccagcccttggctgcagacaggtgagcattctctaagtgcggtcggccatccacatttgtgggtcctgcatccatggaattacgtagggtcaaccaactgtggagcaaatatattcaggatgcaaaacataaaaaagaacaagacaacagtaaaaaataatgcaaataaaaaacagtacagtgtaacaattatttacatagcatttacattgtattagggtattataaataatctagagatgatttaaaagtatataggaggacctacataggttatatgcaaatatacaccattttatatctgggacttgagcatccctggattttggtatccatcgggatcctggaccctatccctggtgaatactgaggaacaactgtactctttccttgttgcttctctgtaaccacttgaatctctcagatccccattggggcccttgtcttggaggacagcctcttcagtgtccccagttatatgtatatattatatatatatatatatatatatatatacacacacacactatatatacacacacacacacacacacacacacacacaaacacacattatatatttctgtttgttttgtttttttaagacggagtcttactctgttacccaggccggagtgcagtggcgcgatcttggcccactgcaacttccgcctcccaagttcaagtgattctcctgcctcagcctcccgagtaactgggattacaggcacccaccaccatgcccagctaattttgtatttttagtagagatggtgtttcaccatgttggccaggctggtctcgaactcctgacctcaagtgatccacccatctcggcctcccaaattgctaggattacaggtgtgtcaccacgcccagcctggtttatatatatatgtttttgtttttgtttttgtttttgtttttggcaaagtctcactctgttgcccaagctggagtggagtggcaagatctcggctcactgcaaactccacctcctgggttcaagcgattctcctgcctcagcctcccaagtagctgggacttcaggcacgcaccaccattcccagataatttttgtatttctagtagagacggagtttcactattttggctgggcttgttttgaactcctgaccttgtgatccgcccacctcggcctcccaaagtgctaggattgcaggcgtgagccaccgtgtccagctggtttatatatttttaaagggttgagagaaaaaaaagaatatgccgcagagactgtacatcactggcaacttctaaaatatttactgtctggctctttatgaaaaagtttgccgacccctgttactagttattcccaagcctagctcattaccagacagataccttgatgcgtgtgatttaaagcatacaaaaaacgattctgtggtcaaatgggctaggaattaaatatgcttctttatctttttagagacaggatctcactctgtcacccaggctggagtacggtggtgtgatcatagcttattgtaacctcaaactcctgggctcaagcgatcctcccatctcagcctcccaagtagctgggactacaggtgcatgccaccacatccagcttatttttatagagacaggatctcactatgttgcccaggctggtctcgaacttctggcctaaaatgatctcctgttttaggagtgctaggattatagacacaagccatagcacccaacctaaatacgttcctttagtacagaacttctagggccttattcccataagtgttataaatgtttggtgtctttattgtgtaccagatattccactgagtactttatatgatttcatttaatccttatcagcactgtgcttgctggccagtagctgtgcccccattttacagctaaggaagctgaggcacagtatggtcttgaccaaaaaccttcagctagtcatatatagtgagagggtaggtgttgttaccattttataggtgaggaaactcacaaaatgaaatatccttctcaacgtcactagagagtggcagagtttagagacaaagccatctgattttggagcctgtgctcagcttttagcagacacactgatttccaagaattgctaggatgtttctcagtgcagttgaccacaggactctctggaaagccttcaggactgaacttcctccagacagtttgggaaacactgcatgtgtctattatgaagccatcagctgagctcatcccccgtgcactccacaacgctgaggctctgcacatggctcaccagtgccaggtgctgccagtcagcagtgccgtgctgtttgcacagcagcctgcatacgtctatattgcccagcccgtttcacctggcggggtcacacaaaccaccccctggtattgttagcacgtccacataatggcatctccacagctgtgtcatccagaagaaacccatagccttgattaacctttgtaataagactccctatttgcatgcacagtgataggtgtgaagtacaaccttgtaccgttgtacactgtcaactagaaaataaaacagcacacttgaaacacccttgccttctagcaaagatcccatcttcccacacagaatgatggcaagaaaatgaggtctaaaatgtgtagaagtagtagaagaaataatctctttttctgtttgggttttgttccccagatggggtctagaaggagaggcagcctggaggactgggtctgctctccaggcattatggaggtgggttttcttttgcagcaaattcaggtgctttttttttttttgtagcaaattgcagcaaaatcaaaggctttttctatttggaaccagagttggggctttcggtcaagtggtgccctggattttcctccccagatacctgtcaactcccagtcacttgctctcacctgcctcatattcccccagtcctagggctctcaggccaggcttctagcagcatcacttagaaagttagcaccgggagaggaagcagaaccaaattcacggtgaatcacggccatagtgacattttcatcatgagtgtggatgaacaaaaggccctcatcccgattctttcatctgtgcattcagaatgtgaagaatacacttgcccgtgtggctgccgttggtagaggtcagtttttggcctgtttgattgatggggaaagctgtgcagccacctgttttggacccggctggagacatcccacttgaagactcaaagtcaggtgtccttgtactgattttctgattccttcttctcaggtcacagaagatgtgaattcaagtatcaagacatttttttgtcccaatgatacctacaatgacatggccacactcttcttcaacccgcaggagtctgccatcctccagctcttccaccaggatggtgagtgtctgcactgcagcccaatcgtgggtgattggtgtcatctcggacacagccaggcttgcccttcattccaagcaagaccaggacttctttgtaacgcccacccagacaaaagattggtttctgcctcctgtgttggaaggggaactggtatggggtgtggtcgggcccggtaggtctactgggccttggcaggcatccggtagtgggactcaggttggctcttcccttgcaggtactttcagccccgtcactctggccttgttcttcgttctctatttcttgcttgcatgttggacttacggcatttctgttccaagtggcctttttgtgccttctctgctgtgtggagctgcttttggacgtttagttgccaatgtcctaaaaaggtactctgtgtgtgtgcgtgtgtgtgcgcatgtgcatgtgtgtgcacgtgtgcgtgtgtatgcatgtgtgtgcgtgtgcgtgcgttgatgtgtctgtgcccatgcatgcacatatgtgcataggcacaagagtatgagctgtaggtcctccccacagcctatcagtgtggttcaaagccatgttctcggtgttttccttcactagctacattggattgggccacatctattcggggacctttgccctgattggtgcagcggctttcttgggcggggtggtccgcatgaccatcagcctcacggtcatcctgatcgagtccaccaatgagatcacctacgggctccccatcatggtcacactgatggtgagcacactccctccaggcccctgtcaggctcagggccacgtccgccccacaggacctatttttaggtctttgctttgtgtttcaggtggccaaatggacaggggactttttcaataagggcatttatgatatccacgtgggcctgcgaggcgtgccgcttctggaatgggagacagaggtggaaatggacaagtaaggccatgattttgctcatgtcctagtttcagaatgtataagctctgaggcctaaggaatgttgttattagggtaggaaacagtaactcacttttcttgggctgaaagaagcaacacacccattcctgagcatgtgtgagaatgtggagcagcccatgggctgggggctgcgggggcagggcaggggacacgggcactgtgggactgcagtgggcagggcctcttcgtggtggtttgactcccatggcattctggttagatatgaggtgaggtctctggatcaagttcgtgatgtgattgaatgtttaagggtatgccaagccccaggagtgagaatagcctgtttcacatgtgcccaccagaatgccctactgccagccgggattgttctgggcataatcacctcataacccacctgctaatccacaggtacctgggcttcctgtgtctagatagcaggcaaggcccttacgggctaacacgggggccagcaagccgtttctgtggagggccagacaggagtttattttcaactttccgggctgtatggtctctgtcacgactactcgactctgtcattgcagcaggaaagcagtaagcgtgacggacttgatcagtgggctacagtttgctgtgccctgatctaaagggggacccaagtgctgtgtttattttattattattgtttttcttttttgggacaggatctcactctgtcgcctaggctggagtagggtggcatgattatagctcactgcaacctatgcctcccaggctcaagcgatcctccacctcagcctcctgagtagctgggatcacaggcgcgtgccaccacacctggctaatttttaacattttttttatagaaatggggttttgctgtgttgcccaggctggttttgaactcctgggctcaagcaatctgctggcctcggcctcccaaagtgctgggattacatgcgtgagccgctgcacccagcccacccatttacccagttgtggtaaatgctgtagcagaattagcagttcaggggtagtatgtggagcgtgctgcagggcaccgaggagggcgtggccagcccctggaccagcagccagggcttcctggtgaggggatgttgctgttgagctgagggatgagcccgagcccatcagcctggtacagcagggtacgacattccaggtgcgggaacagcatgtgtcgggggatagaagtacaaaggaatgcatcgggtttgagggagagctggggcagttcagaagagccccccaccccgcccgtggtctgagcagggctggagagccagcacagcttgctcccaggggcctgcgggcactgtcatgaggctggatgacttgccctcctcccccaggctgagagccagcgacatcatggagcccaacctgacctacgtctacccgcacacccgcatccagtctctggtgagcatcctgcgcaccacggtccaccatgccttcccggtggtcacagagaaccgcggtaacgagaaggagttcatgaagggcaaccagctcatcagcaacaacatcaagttcaaggtaaagaaaacggcatgagaggaaaggcaggtgagagacaagcggtcccgtctcacacggcttagtgctttgcccacccctggctggggtggacttaccggctctcaggggaagttggcactgttctcatcacatgcgacagggagagtagatttgacagcaggggcagctttatcaggccgtgaagatgtgtgtgcgttcttgccgcaatgagcatgtggacagatctgtttttcaagtcagcagctttcatggtttgtttaccatgtgagagtatcagggagagttctagagatgccagcaacagaaatggacttcgacctccttaagaaagagaaagaaatccacaggaaagctcaggacagctgggaaagctgaaggaccagaaccatgtgctgtggggagcagtgcagggtctagcagacatcccttgggtaccaggaggaaggagcactggccctgggttcctcctgattccgattcagaatccagggagagggggtatcctgttgcctcacttgggtcatgtgccactccttggctttgggggcaggcacgttgattgaaaattctatcaagacaggatgtaggagatggcttgttcccctctggagaatcaagctgctcttcccagattaaaggaaaccacagaagctgcagccaggtcctagggttcaggctcatttgaaccaccagcctgagccactcttttgaacctcagccccattaagttcctgcgtccggatgtgcttctgaccctccctgtcacccaaatccttaagctccatcagtactgctgtgttcgtttgcccatgcgcagtagcctgtggcctccccacccacagaaatccagcatcctcacccgggctggcgagcagcgcaaacggagccagtccatgaagtcctacccatccagcgagctacggaacatgtgtgatgagcacatcgcctctgaggagccagccgagaaggaggacctcctgcagcagatgctggaaaggaggtgagagcctggcggggcccccactgcccgcagggctacacagcggtggggtgagcctttggctcagatgttgtgaggtggctcctgagtttcctgggaaagttggatggggagcgggctgggaacatggatcagaagcgctcccgctgagggtatcccaggcagcatctggtttttgtgtaacagatacactccctaccccaacctataccctgaccagtccccaagtgaagactggaccatggaggagcggttccgccctctgaccttccacggcctgatccttcggtcgcagcttgtcaccctgcttgtccgaggagtttgttactctgaaagccagtcggtaagtctctccgaggcagaaatcagccaggccagacctgacgaagctcgaggggttgggcgctgccggcgggccgtgaacagtgccatagggaaagctgaatgcaaggcgagaagtgcagagtggacttaggggaggagtcgccacagccgggtggtgagaagcaacagcggtttattccttcatagttcaaggccagaagtacaaaatccgggtgtcaccagggcagcgctccctggctctggtgctgtccttgccccttcctagctcatgggagttgcctgcagaccttggtgctcctgactgtgaacacagcccccatcctcgccactgtcatcacacggcgttctcctgtgtatcttctctcctttccctaaggacgcttgtcaccggatttggggcccgccctaatccagcatgggttcatctgaactcggtcacatctgtagagaccttgtttccagaaaggtcgcattcataggtactagggcttaggacttggccatatcttttggtggggggacacattcaccccccagccactttacttagtgctttctcacttaaacttcctaataagccatttgcatctcatgaatcaggaagaaagggagtgcagacagatcaggggacttgcccagggtgccacagctaggacttggccaaggacttggtttgactggagagctctcactctggagcgcttgctgctgctgcaccacctgcctcagcagcctggagctgggcatattcaggcatcaaggggaggggctctaaggtgaccctgctggccactgctgcctgagcacggacagtgtctgggttggaattgcagagcgccagccagccgcgcctctcctatgccgagatggccgaggactacccgcggtaccccgacatccacgacctggacctgacgctgctcaacccgcgcatgatcgtggtgagaagggctgccccggcctgtcccatgcggagctgcctcttcatgccgttggcgtctcaggcagtcagtgacacgtggtctctttgcaggatgtcaccccatacatgaacccttcgcctttcaccgtctcgcccaacacccacgtctcccaagtcttcaacctgttcagaacgatgggcctgcgccacctgcccgtggtgaacgctgtgggagaggtgagcgaggccccggccctgcccccacctttgagagaggatcccctagccaggtgctgtttgtgcacccaggcttctcaccagaaacgtaggcatcccaccaggaggggagagtgtggcccaacactagctttgaaccctgctcggcttccgtgcactcgggaccctttcccctgcctgccagcagatggcaccagcgtcccactggccgtcctttccagccagagccgcgcctctaccaggctgtgtcttcctcctgaaatgttgctcttcactccgtaccactggtgttccttggttctccacctgcgtagggatttgcgcattagatgagagaatttcaagcaaaatactttgagttttacaaagatataaaacacctagtaattattgctgcagactttccttttttcttctttttagaacttcattattttcttattacacaaatattttcttattacacaaatatgatttcattgtaggaaaatacaaaaacacatatgagcaaaaaacaagcaaaaaccaaaccctcgtccctaccctgtcgcggtagccctggtaacttttcaaggccaccctctcagtcttttgttgttgttgctgttgttgttgttttgagacagggtctcactctgtcacccaggctggagtgcagtggcaagatctcggctcactgcagcctcgaccttccaggctcaagcagtcctcccacctcagcctcctgagtagctgggaccacaggcatgcgccactatgcccagctagtttttgtatttatggtagagacacggtttcgccatgttgcccaggctggtcttgaactcctgaactcaagtgattcacctgcctcggcctcccaaagtgctgggattacatgcgtcagccactgcacccggcctcagtcttttcttctatgcggcacaaccctggcatgcatagtgcgtacttacacaggttttgttgcagtaggttaacttatgtcccttgaaatgtaattgccaactacactgacagagtcctaacatagtttatgacgtggctttggagttcccaacaacagtgacacgtgggaaccactgtaacgacctgtaacaaatgactcccataggtcactttgcaaggtggtgagtatgaggcatggcaggggtcataatctcaggagacttcaagggccccaccgcttgcacatctgtgaagcaggctggtcatgatgggagctgagcgctgagcatgtgccctgtggaaggacattttagttcagatgccagctggcccaagccctttttggagctaaccttgtccccttggcctccagtgtgtgagccctcgttagctgtttatcccaatcaagctgtgtctggctgtgcactatccaggcctccacattctgtgacaaactaacagggccggctcctgtcactcctgttctcgccagcgggttttaccctgaaggtgactcaggccttctctttgccctagatcgtggggatcatcacacggcacaacctcacctatgaatttctgcaggcccggctgaggcagcactaccagaccatctgacagcccagcccaccctctcctggtgctgcctggggaggcaaatcatgctcactccggcgggcacagctggctggggctgttccggggcatggaagattcccagtcacccactcactcagaaagccgggagtcatcggacaccttgctggtcagaggtcctgggggtggttttgaaccatcagagcttggacttttctgacttccccagcaaggatcttcccacttcctgctccctgtgttcccaccctccagtgttggcacaggcccacccctggctccaccagagccagaagcagaggtagaatcaggcgggccccgggctgcactccgagcagtgttcctggccatctttgctactttcctagagaacccggctgttgccttaaatgtgtgagagggacttggccaaggcaaaagctggggagatgccagtgacaacatacagttcatgactaggtttaggaattgggcactgagaaaattctcaatatttcagagagtccttcccttatttgggactcttaacacggtatcctcgctagttggttttaagggaaacactctgctcctgggtgtgagcagaggctctggtcttgccctgtggtttgactctccttagaaccaccgcccaccagaaacataaaggattaaaatcacactaataacccctggatggtcaatctgataataggatcagatttacgtctaccctaattcttaacattgcagctttctctccatctgcagattattcccagtctcccagtaacacgtttctacccagatcctttttcatttccttaagttttgatctccgtcttcctgatgaagcaggcagagctcagaggatcttggcatcacccaccaaagttagctgaaagcagggcactcctggataaagcagcttcactcaactctggggaatgctaccattttttttccaaagtagaaaggaagcacttctgagccagtgaccactgaaaggtatgtgctatgataaagcagatggcctatttgaggaagagggtgtctgcccttcacaaacacctctctctcccctgcactagctgtcccaagcttacatacagaggcccttcaggagggcctcctgtgccgcagggagggtgcgtggggaagatgcttcctgccagcacgtgcctgaaggtttcacatgaagcatgggaagcgcaccctgtcgttcagtgacgtcattcttctccaggctggcccgccccctctgactaggcacccaaagtgagcatctgggcattgggcattcatgcttatcttcccccaccttctacatggtattagtcccagcaggcatccctggggcagacgtgctttggctcaagatggccttcatttacgtttagttttttttaaaaccgtggaggttgcccacgggcctcggcacctggccctggcagcacagctctcaggcccagccctgggcgacctccttggccaagtctgcctttcaccctggggtgagcatcagtcctggctctgctggtccagatcttgcgctcagcacactctagggaataattccactccagagatggggctgcttcaaggtcttttctagctgattgtggcccctccattttccccattttcttatctccctgaccaaaattgctttgacttctaaatgtttctgcttcccagaatgcacctgacttatgaaatggggataatactcccaggaaatagcgcaggacatcacaaggaccaaaaaggcaattcttatttaaatgttactatttggccagctgctgctgtgttttatggcagtgttcagagcttgatcacgttatttcttccttttattaagaaggaagccaattgtccaagtcaggagaatggtgtgatcacctgtcacagacactttgtcccctctccccgccccttcctggagctggcagagctaacgccctgcaggaggaccccggcctctcgagggctggatcagcagccgcctgccctgaggctgccccggtgaatgttattggaattcatccctcgtgcacatcctgttgtgtttaagtcaccagatattttgttcccatcagtttagcccagagatagacagtagaatgcaaatacctccctcccctaaactgactggacggctgccaaggaggccccaaacccaggccccatgcaaaggcacgtggtttccttttctcctctctctgcatctgcgctttccagataagcccaaagacagcaacttctccactcatgacaaatcaactgtgaccctcgctccttccatttctgtccattagaaaccagccttttcagcatctcacccattagcagccccatcacccagtgatcagtcgcctcagtaaagcagatctgtggatggggagcctacgggtggtaagaagtggtgttttgtgtttcatctccagcttggtgttccatggcccctaggcgaggtgatcagggagtggggccaatgggcccccggccctggctttgggaccttgtgctgagggatgatttgctcctgaccttgattaacttaacagttcccagctggaagggacactttcaggacccagtccactgtatggcatttgtgatgcagaattatgcactgacatgaccctgggtgacaggaaagcctttcgagaggcccaaggtggcctcgccagccctgcagtattgatgtgcagtattgcaccacagctctgcggaccttggccattgccgcagtcgcagcttccttttttctgtttgcactgtttgtttgtatgatgttagctaattccactgtgtatataaattgtattttttttaatttgtaaaatgctatttttatttgaacctttggaacttgggagttctcattgtaaccctaacatgtgagaataaaatgtcttctgtctcctctgtctcctttagccttttgtctccatgctgctttctttctttctttctttttttgagacagagtctcgctgtcacccaggctggagtgcagtggtgccatctcagctcactgcaagctccgcctcccaggttcacgccattctcctgcctcagcctcccgagtggctgggactacaggcgcccaccaccatgcctggctaattttttgtatttttggtagagatggggtttcaccatgttagccaggatggtctcaatctcctgacctggtgatcctacccgcctcggcctcccaaagtgctgggattacaggcgtgagccaccacgcccggccctgctgctctttctttcaagggatacttgctttttattttactccccctctttctgatgtgtggaaattacactaggacgtagttttagagtctcagagctctccctatgcagctgggcagtggggctcttcattcttgcgggtccacttctctgtattagacagtgaccttaataagaacagatttcatcctgtggatcttagcagaggtcaccgttgtctgtttctcccttcagatgaacactcttcctgatcctctcctctagaattcatctcctcctgctagcagccgcgtcctggaggagcagcggatggggaatccattctgtttcttcctggtgtttaggaagttgccccacacacagattgccccgatgtccaaccagaagaagtgaaactgctgctgggtctggagaggtgaagacccgtggccagcttctgttgttgccatcggccattgctttttgttcgcttgcttttggttttgcaagaagagcggcctctgtctctgatctgcttcaaatcatcattccatcagtgacagaagtggctgttccatcagtggtcgcagccagttcagctcctgcatccatccccaagtgttctgtaagtcccaggggcattttctgccttgtgtttttgtcatttttcaatcagtttcattcaatgagaactccctgtgttacctgtgttacggtgacaccttgagaatgggctacttcccctcctagcaacccgcaacaccatcccagacctcaggagccaggtttgggccagtgctgtctcctgtcgctcttactttcatccttgtcattctctaccccctggttttcctggtatttaaagtccaggtagagaagattttgactggaggtggttaggtgaggctctccccccacctcaaccccctgccattagttcactgggagcctccccctttcctccgcaaggagcaagttactacttcatttcctcttttcccaatttctggacaagaccaaggcaatttgaccaacatttatggggcatcaactctgagagtgctgaaggggcatttgccctcaaagagcttgcagtctagggacgtagacacaagcaattgcacataggcaactcgtgttgtgtgctattataacagttacatgtgcaacactgcctacgaagggactcattgttactaggcatgaggtaccaggaaagaagtagtgttcatatgagccttaagaaatcagtacaatgtcctcgggaggaccagaggaaggacaccccaggtggaaggaacagcagaaataaaggcacagtggcatgtgtgggtgtggggtgttggagtgtcatagaatctgatgaggttgggatccatgggggtaacaggtgggaaaacagtttactctgtttaaggtgaacttattgcctggtgttttgtgctcagagcaaataccctcttcaggagcagatacaaaaagccggcatcttctccagcagctcttagtaaaatacaagcccaggcccttcagacccggattaggcaaagactatgtctgttttccaaatacttgttagtacacaaaaggcacatgaacttgtagtttgtctgcatggcaaacctttcttcactttgctcagtttttatttttttgagacaagtctcattctgtcacccaggctggaatgcagtgg

SEQ ID NO: 754 - DNA, 2300 bp, Homo sapiens
ccccgccttctcgctgcccagccccggggagggaggcggggccgcgaccccggcgcgggtggggcgaatgcgttcccagcgggtagcctggggctggtgcagagttccaagcccacggccccggtcgcggcctcgccgccctcccgcgccccgcgccgggagcgggcctagagcgctcgcctcgcccctccgcgagcagggctctggcgcccgcccctgtccgcaccgctggcagcctgaagagagtcgctggccgtggtcgccgctaggtaggatatatctgcatcttgaaaggaagataaaacaaaagccttctttggaatagatggatttttgtcactttctgtgtgaactaaagtgattcaatgtctcttttggattgcttctgcacttcaagaacacaagttgaatcactcagacctgaaaaacagtctgaaaccagtatccatcaatacttggttgatgagccaaccctttcctggtcacgtccatccactagagccagtgaagtactatgttccaccaacgtttctcactatgagctccaagtagaaataggaagaggatttgacaacttgacttctgtccatcttgcacggcatactcccacaggaacactggtaactataaaaattacaaatctggaaaactgcaatgaagaacgcctgaaagctttacagaaagccgtgattctatcccactttttccggcatcccaatattacaacttattggacagttttcactgttggcagctggctttgggttatttctccatttatggcctatggttcagcaagtcaactcttgaggacctattttcctgaaggaatgagtgaaactttaataagaaacattctctttggagccgtgagagggttgaactatctgcaccaaaatggctgtattcacaggagtattaaagccagccatatcctcatttctggtgatggcctagtgaccctctctggcctgtcccatctgcatagtttggttaagcatggacagaggcatagggctgtgtatgatttcccacagttcagcacatcagtgcagccgtggctgagtccagaactactgagacaggatttacatgggtataatgtgaagtcagatatttacagtgttgggattacagcatgtgaattagccagtgggcaggtgcctttccaggacatgcatagaactcagatgctgttacagaaactgaaaggtcctccttatagcccattggatatcagtattttccctcaatcagaatccagaatgaaaaattcccagtcaggtgtagactctgggattggagaaagtgtgcttgtctccagtggaactcacacagtaaatagtgaccgattacacacaccatcctcaaaaactttctctcctgccttctttagcttggtacagctctgtttgcaacaagatcctgagaaaaggccatcagcaagcagtttattgtcccatgttttcttcaaacagatgaaagaagaaagccaggattcaatactttcactgttgcctcctgcttataacaagccatcaatatcattgcctccagtgttaccttggactgagccagaatgtgattttcctgatgaaaaagactcatactgggaattctagggctgccaaatcattttatgtcctatatacttgacactttctccttgctgctttttcttctgtatttctaggtacaaataccagaattatacttgaaaatacagttggtgcactggagaatctattatttaaaaccactctgttcaaaggggcaccagtttgtagtccctctgtttcgcacagagtactatgacaaggaaacatcagaattactaatctagctagtgtcatttattctggaatttttttctaagctgtgactaactctttttatctctcaatataatttttgagccagttaatttttttcagtattttgctgtcccttgggaatgggccctcagaggacagtgcttccaagtacatcttctcccagattctctggcctttttaatgagctattgttaaaccaacaggctagtttatcttacatcagacccttttctggtagagggaaaatgtttgtgctttccctttttcttctgttaatacttatggtaacacctaactgagcctcactcacattaaatgattcacttgaaatatatacagaaattgtaatttgcttttttttaaaaaagggggctaaagtaacactttcctacttatgtaaattatagatcctaaattcacgcaccccgtgggagctcaataaagatttactgaattgagtttaaa

SEQ ID NO: 755 - DNA, 1710 bp, Homo sapiens
gtcggcgtgtcgagtggctcttcctggctgctgaggcgggttaaggtctgagggtcttgtggggccacggcgctgatcaccaggtgtttggcttggtcggttcttatttctcgcctggcaatggcgacgtacacctgcataacttgccgggtggcgttccgcgacgcggacatgcagcgggcccactataagacggactggcaccgctacaacctgcggcggaaggtggccagcatggccccagtgaccgccgagggcttccaggagcgagtgcgggcgcagcgggccgtcgcggaggaggagagcaagggctcggccacctactgcaccgtttgcagtaagaagtttgcctctttcaacgcctacgagaaccacctcaagtcccggcgtcacgttgagctggagaagaaggccgtgcaggcagtgaatcggaaagtggagatgatgaatgaaaagaacttggagaaaggactgggcgtggacagtgtggacaaggatgccatgaacgcggccatccagcaggccatcaaggcccagccgtccatgtctcccaagaaggcgcccccagcgcctgcaaaggaggccaggaatgtcgtggccgtgggtactggtggccgtgggacccacgaccgagacccgagtgagaaaccaccccggctccagtggtttgaacagcaggcgaagaagttggcaaagcagcaggaggaggacagcgaggaggaggaagaggacctggatggagacgattgggaagatattgattctgatgaagaattggaatgtgaggatactgaagcaatggacgatgtggtggagcaggatgcagaggaggaagaggctgaggaaggcccaccccttggtgccatccctatcacggactgcttattttgttcccatcattccagctcgctgatgaagaatgtggctcacatgaccaaagaccacagtttctttattcctgatatagaatatctttcagatattaagggactgattaaatacttgggagagaaagttggtgttggcaagatttgcttgtggtgcaacgagaaagggaagtccttctactccacagaagctgtacaggcacatatgaatgacaaaagccactgtaagctcttcacagatggcgatgctgctttggaatttgcagacttctatgattttaggagtagctatccagatcacaaggaaggggaggaccccaataaggctgaggagttgccctcagaaaagaacttggaatatgatgatgaaaccatggaattgattctgccttctggtgccagagtgggtcatcgctccttgatgagatactacaaacagcgatttggcttgtcaagagctgtggcagttgccaaaaatcggaaggccgtgggccgagtacttcagcagtacagagccctgggatggactggcagcacaggagcggctcttatgcgagagcgagacatgcagtatgtccaaaggatgaaatcaaaatggatgctgaagacaggaatgaagaacaatgccaccaagcagatgcactttcgggtccaagtgagattctgagagtctgctgggattgagcaatcatctcctgcccaagtttcctccttgccctgaggaccagtgaaagacagatcataggagagacccttttgctgctacttcattcgttctgacctaataataaaagttagaaccataaaaaaaaaaaaaaaaaaa

SEQ ID NO: 756 - DNA, 3277 bp, Homo sapiens
gcgtgctgtgggcggtgccgcgcggacccccgggaagtgtctctgtgggcggccgccgggttgagctgcggcacacgtgcgacggccgtgatgaagttcgcttaccggttttcaaatttgctgggtacggtgtaccggcgtgggaacctaaattttacctgcgatggaaattcagttatcagtcccgtgggcaatagagtcactgtatttgaccttaaaaacaacaaatctgacacgctgcccctggccactcggtacaacgtcaagtgcgtggggctgtccccggatggccgcctcgctatcatcgtcgatgaagggggcgatgcgctgctggtcagcctggtctgcaggtctgtgctgcaccacttccacttcaagggctctgtgcacagtgtgtccttctcccctgatggcaggaagtttgttgtcacaaagggtaacattgcccagatgtatcatgcccctgggaagaagcgggagttcaacgccttcgttctggacaagacctattttgggccctacgatgagaccacctgcatcgactggacggatgactccaggtgctttgtggttgggagcaaagacatgtccacctgggtgttcggagccgagcgctgggacaacctcatctactatgcactggggggacataaggatgccatcgtggcctgcttctttgaatccaacagcctggacctgtactcactcagccaggacggagtgctgtgcatgtggcagtgtgacacgccccccgagggcttgcggctgaagccccctgcgggctggaaagcagacctgttgcagcgggaggaggaagaggaggaggaggaggaccaggagggcgacagagagaccaccatccggggaaaagccactccggccgaggaggagaagacaggaaaagtgaagtactcacggctggccaagtacttcttcaataaagaaggggattttaacaacctgacagctgcagcatttcataagaagtctcacctcttggtcactggctttgcttctggaatcttccatcttcatgagctgccagagtttaacctcatccactccctgagcatttcagatcagagcatcgcctcagtggccatcaatagctcgggggactggattgcttttggctgttcaggcctgggccagctgctggtgtgggagtggcagagtgagtcctacgtgctcaagcagcagggccacttcaacagcatggtggccctggcctactcgcccgacggacagtacatcgtgactggcggggacgacggcaaggtcaaggtgtggaacaccctcagcggcttctgcttcgtcacttttacggagcactccagcggggtgaccggtgtgacctttactgccaccggctacgttgtggtgacctcatccatggacgggaccgtgcgagcctttgaccttcacaggtaccgaaacttccgcaccttcacctctccacgccccacccagttctcctgtgtggcggtggatgcgagcggtgagatcgtctctgcaggggcgcaggactcctttgagattttcgtgtggtccatgcagacaggcaggctccttgatgttttgtctggacacgaagggcccatcagtggtctgtgttttaacccaatgaagtccgtcctggccagtgcctcctgggacaagacagtgcgcctatgggacatgtttgacagctggaggaccaaggagacgctggccctgacctctgatgctctggctgtgacttttcgccctgatggtgcggagctggctgtggccacactgaactcacagatcaccttctgggaccctgagaacgcggtgcagacgggctccattgagggcaggcatgacctcaagactggcaggaaggagctggacaagattacagccaagcacgcggccaaggggaaggccttcaccgccctgtgctactctgcagacggccacagcatcctggcgggaggcatgtccaagttcgtgtgcatctaccacgtccgtgagcagattctcatgaagaggttcgagatctcttgcaacctgtctttggacgccatggaggaatttttgaaccgaagaaaaatgacagagtttggcaacctggcactaattgatcaggatgctgggcaggaggatggagtcgcgataccactgccaggcgtcaggaaaggtgacatgagttctcggcacttcaaacctgagatcagggtgacctcactccgcttctctcccactgggcgctgctgggcggccaccaccacggagggactcctcatctactccctggacacccgcgtgctctttgacccgtttgagctggacaccagcgtcacccccgggagggtgcgcgaggcactgcgccagcaggacttcaccagggccatcctcatggccctccggctcaacgagagcaaactggtgcaggaggccctggaggcggtgcccaggggcgagattgaagtggtcacctcctcccttcctgaactgtatgtggagaaagtgctggagtttttagcttcctcctttgaagtgtctcgccacctggaattctacctcctctggactcacaaactgctcatgttgcacggacagaagctgaagtccagagccgggacgctgctgcctgtcattcagttcctccagaagagcatccagcggcacctggacgacctgtcgaaactctgtagctggaaccactataacatgcagtacgcactagcagtttccaagcagcggggcacaaaacgctccctagacccgctgggaagtgaggaggaggcagaagcatctgaagatgacagcctgcatctgcttggaggaggaggcagagactcagaagaagagatgctggcctagagccagccggttgcagcgttggattgtgccggctaagacctgccagggagatgggacccttgtgccacctgggccagcaaagaggaggggtccagagaacagctgaaatactgtcactagtggtagtgacttgcttttcctgtgcacacatgtagcccatcaggacagcgagccgacgggtcacgccaggggccggcacgcactggcacctggccccaggagcggggccgtgtgaacggtgatgaatgttgaaaatgcgtctcagagaggtattcacatgaactttgtatgagacttatttatatctttaacataaaggtttgataaagaacttagggattaaaaaaaagatggagttttctaacgtgaggatgaagtctacacttcagattaaaaagggttatgttgtaaaaaaaaaaaaaaaaaa

SEQ ID NO: 757 - DNA, 1604 bp, Homo sapiens
cctccgcccgcccgcctgcctgcctgcccgcccgctcgctcgcccggcccgcgactcatgtcccgccgcaaggccggcagcgcgccccgccgagtagagcccgcgcccgccgccaacccagacgacgagatggaaatgcaggacctcgtcatcgaactcaagcccgagccagacgcgcagccccaacaggccccaaggctggggcccttctccccgaaggaggtgtcctcggcggggcggttcggcggcgaaccccaccactcccctggccccatgcccgccggggccgccctcctcgccctcggcccgcggaacccgtggaccctgtggacgccgttgaccccgaactatcccgaccgccagccctggaccgacaaacacccagatctgttgacctgcggccgctgcctgcagaccttcccgttggaggccatcactgccttcatggaccacaagaagctgggctgtcagctcttcagaggccccagccgcggccagggctcagaacgagaggagctgaaggccttgagctgcctgcgctgtggcaaacagttcacagtggcctggaagctgctgcgtcacgcccagtgggaccacggactgtccatctaccagacagaatcagaggccccggaggccccgctcctgggcctggccgaggtggctgcagccgtgtcggcagtggtggggccagcagctgaggccaagagcccccgtgcaagtggcagcggcctcacccggcggagccccacctgtcctgtgtgcaagaagaccctcagctccttcagcaacctcaaagtgcacatgcgctcacacacaggcgagcggccctatgcttgcgaccagtgtccctacgcctgcgcccagagcagcaagctcaaccgccacaagaagacccaccggcaggtgccgccccagagccccctcatggccgacaccagccaggagcaggcctctgcagcccctccggagccggctgtccatgctgctgcccccaccagcacccttccatgcagcggtggtgagggggctggagccgccgccacagcaggtgtccaggaacccggggctcctggcagtggggctcaagccggccctggtggagacacttggggagccatcaccacggaacaaagaactgaccctgcaaacagccagaaggcatcacccaaaaagatgcccaagtcagggggcaagagccgcgggcccgggggcagctgtgagttctgcgggaagcattttaccaacagcagcaacctgacggtgcaccggcgctcacacaccggggagcgcccctacacctgtgagttctgcaactacgcctgcgcccagagcagtaagctcaaccgccaccgccgcatgcacggcatgacgcctggcagcacccgcttcgagtgcccccactgccatgtgcccttcggcctgcgagccaccctggacaaacacctgcggcagaagcaccctgaggcggccggcgaggcctgagcccaggaaagcccccctcactgtccctggtaccgctgccaacacccattgacctcctcgtttttgcccgccttctccaagtaaattttcccttttatttaaaaaaaaaaaaaaaaaaa

SEQ ID NO: 758 - DNA, 2199 bp, Homo sapiens
acgtgatccacccgcctcggcctcccaaagtttttggattacaggtgtgagccacctcgcccggtcctatctctctttcttctctttctccctctcactttgtttctcttctctctctctctcccgcctccttcccccgtctcccctcccttccccccaccgccctcttcatagctgagcctgtccggcagtgcggcggatgtacggatgattcagtggctggcaggaagcccgccctgcccgcccgccagtgtcagtggtgttggcatcagcttgggcaggtgtgcgggctcaggatggggcggccgtggtgaggaaccctggactctcagagatggaatttcaccgtgttgcctaggctggtctggagctcttgatctcaagcgatcctccctgcctcggcctcccaacgtgctgggattataggcgtgagccaccgctcctggccagggtctgttcctagttgcaacagttcttggaaacccactcgagagggccacgcctccattcaccaggccacgcatcacaagaggcaacaccaggagccaacatgagctcggggactgaactgctgtggcccggagcagcgctgctggtgctgttgggggtggcagccagtctgtgtgtgcgctgctcacgcccaggtgcaaagaggtcagagaaaatctaccagcagagaagtctgcgtgaggaccaacagagctttacggggtcccggacctactccttggtcgggcaggcatggccaggacccctggcggacatggcacccacaaggaaggacaagctgttgcaattctaccccagcctggaggatccagcatcttccaggtaccagaacttcagcaaaggaagcagacacgggtcggaggaagcctacatagaccccattgccatggagtattacaactgggggcggttctcgaagcccccagaagatgatgatgccaattcctacgagaatgtgctcatttgcaagcagaaaaccacagagacaggtgcccagcaggagggcataggtggcctctgcagaggggacctcagcctgtcactggccctgaagactggccccacttctggtctctgtccctctgcctccccggaagaagatgaggaatctgaggattatcagaactcagcatccatccatcagtggcgcgagtccaggaaggtcatggggcaactccagagagaagcatcccctggcccggtgggaagcccagacgaggaggacggggaaccggattacgtgaatggggaggtggcagccacagaagcctagggcagaccaagaagaaaggagccaaggcaaagagggaccactgtgctcatggacccatcgctgccttccaaggaccatttcccagagctactcaacttttaagcccctgccatggttgctcctggaaggagaaccagccaccctgaggaccacctggccatgcgtgcacagcctgggaaaagacagttactcacgggagctgcaggcccgtcaccaagccctctcccgacccaggctttgtggggcaggcacctggtaccaagggtaacccggctcctggtatggacggatgcgcaggatttaggataagctgtcacccagtccccataacaaaaccactgtccaacactggtatctgtgttcttttgtgctatgaatttggattcctaattgctattgttggttgctggggttttaaatgattgataagcttgtacagttaacttatagagggggagccatatttaacattctggatttcagagtagagatttctgtgttgtctcctagaaagcattacatgtagtttatttcagcatccttgttgggtggggccctggctctcttcccctttggtgggacctcccctttctttgggcttcagttcactcaggaagaaatgaggctgtcgccatctttatgtgcttccagtggaaatgtcacttgctacagacaatagtgcatgagagtctagagaagtagtgaccagaacagggcagagtaggtcccctccatggccctgaatcctcctctgctccagggctggcctctgcagagctgattaaacagtgttgtgactgtctcatgggaagagctggggcccagagggaccttgagtcagaaatgttgccagaaaaagtatctcctccaaccaaaacatctcaataaaaccattttagttgaaaagcaaaaaaaaa

SEQ ID NO: 759 - DNA, 3992 bp, Homo sapiens
caatagaatgtggggctcgcccgcgctgctacgtcacgtctgggaccgcggagtattccaggcgcctgcaactaaacgtggccgggtctgcaagctaggtgccagcggggaaagtttccctgcttcttatcgtctgctttaacgccttaaatagcccgctgaaggctgcagcaggtgctaggtagcagcctcccggccctcgggaaaggcggggtggggaggcgagagcagcttagcctcctcgacctcccttcctggtgacggacgaacagttcccgtagaatttcgcttcaccgagtgaccttgagcccagggcgacggtcagcttgttaattcctggctgcaggaactttgtgagaattttaatgcatggaaaagctgtccatgttccaactgctgtacatccaaaagtctcagtgtaatagcaggaccaaaatattctgtcaatcagctgaccatatacttaatgactcctaaaatctcgtggacttctaagaaagcgccatggcctgtgctgctgttatgattcctgggttgttgcggtgctctgttggagccatccgtattgaggctgcgtcactgagattgacactcagcactttgcgccaccttactctaaccagcataatgaaatccaaaaggaaaactgatcacatggagagaactgcaagtgtccttcgacgggagattgtgtcagcagctaaggtgtgtggagctgccagtgagtcaccgtcagtgaagagcctccgcttgcttgttgctgatcaagacttttcctttaaagctggccagtgggttgatttctttattccaggagtctctgtggttggtgggttttcaatatgctccagtcccagactgctagaacaagagagagtgatagaattggcagtgaaatatacgaaccaccctcctgccctctgggttcacaatacgtgtacacttgactgtgaagtggctgtgagagtgggtggagagttcttctttgaccctcagcctgcggatgcctctagaaacctcgtgttgattgcaggaggagtcggaattaaccctctgctttccatcctgcggcacgcagcagatctcctcagagagcaggcaaacaaaagaaatggatatgagataggaacaataaaactattctacagtgcaaaaaataccagcgaactcctgtttaagaaaaatatccttgatttagtaaatgaatttcctgagaagattgcatgcagtttgcatgttacaaaacagactacacaaatcaatgcggaactcaagccatacatcacggaaggaagaataacggagaaggagataagagatcatatttcaaaagagactttgttctatatttgtggcccacctccaatgacagactttttctccaagcaactggaaaacaaccatgtacccaaagaacacatttgctttgagaagtggtggtaggaggcagacaaaggcagaaaaaataaagaggtgagatctactcaggagagctcctgtcctttgtggcatgattaattttttttatctctacttgagttgtcttattttttaaggctataaacttagtgaccagctggataataaaagccagctggcagacttaaatgataaactttttgcaaagacctcagtgatcaaactattttttactatactgattttctgttattaacaacgatttaattgtctcatgatgtaccatgattggtcagtatagatttttcttttgtctttaggcaaaaaaaagatatatacttatgtctaatcataggaaaatgtgatttttgagtataaaatgtgggctagctttaaattatttgacagccatctatatatcttatgtttaatgaaagtataatttaaatacaatcttaataattttactttgaaaattctttttatttaatgcctttgtttactgtaccatggcctacagtcttatttggtccatcaaagttaagtttggacatggaaaattgttaggaaaactgctttagggagttaaatatccagcatatttgctttcttgttaatgaatatcctaagtgtgtatcctgactaattgttagtttcttctcaaatgaaaccctttctgtgtcttggctgtctgccttaacgctgtaggaggcagcttcttgcttgggacaaaggcattggtgatgtgttccatgttgaatctgccttcagtgcctgggctggcttgctatggaaatgtgcttagcattgattagggggtagagagctgtttctaaatcctgcttttctactttttatttcactcatttgccagaattgttcttggcaccagcagctccttaacatatagttgttgaatgactgaaagaaagcaactaatgttttaactccttgctaagtctgagattgggaggcagtcccctagagtggatagaaagaatggtggagcctcatcccaaagctgctctgatgaaactgctagaaagcagattgtagttctttgtttagatttttaaaaatccaaaagaagtcctgactgaggccaggccattccttttatgacaagtagtcctgggcccaaggttgcctgcatagagatcacaggagggtgaagggagcctgggaagaaggacagataagtgctggagacctaggagctccagttgagattctgttctggagcggatgagagaagacaggttaccctttcttatctttgttgttgcaggcctcccagggacttgtgggcttgaacagatatgattcatgggacctgaaggtgactctagcttctgcccagttttgagttttgtcaagttttaagcagagatcatttgtcaactattttgatcccagatttgaatttggggaggaagggaggagctactgacctgatgggaatatcataatccattcaaggaaatggtcattagtacctcagaggtgaagggaatatgtgaagctctggatcactacaaggagccctgacttaccagttggccccaaagtgcccaggctgagggcataggagcatgatgagatgcaaggatgtgggattatcaaggggcacgtctactaactggtgaaggcagtctgcgggggaggacacctaaaggtatgcggaaagtacctaacccagacctctctgcattaggagtggaggtgcaaagtgagcatctccagtgcagcatgggatgggaagatagggaggtgtcgcccactgtctcggtttagccagcaccacggctggctgtgtgcctgctactgtcagagagcaagggtcatctgtcctgcccagctatgcctgccaccctgttgctgactcagtattggcagaattgctgagatgggccaggtcatcacctttgcctggagtgttcatcctttcagtgccattattctggtgctaagtgctgaagaacattttcaggtctagccgagaatgtcctcttgctcttgcctgccaggcctgtccagatctttttggtacttaaattgagctaactccagccagagtggcttggaattcatagtgcggtggctcagagtataggctcgaaagcccttgagccagattgcctgggttcagatctcacctatactacttactaggtagatgaccttgagcaagtcacttaactgctctatgcctcatttaaaattacatacaactacatgtaaaagggagatgatactgctgcctacctacctacatgatagggctgttacggggattgaaggtgatcatacatgtaaagtgcttggcagagcactgcatgagtgtgttgtcgttattaatttgctattccttgtcctattcagaaaggatttcaagaggctggatgccttagatgtggtctaacttgaaaccttcatgtgggtgtgcgtctgtcttgtttattgctgtgccaggcacaaaataggtatttcataaatatttgttaatatgctcagagttgataagctggattaaagtgacttcttaaggaaaaaaaaaaaaaaaaaaaaaaaaa

SEQ ID NO: 760 - DNA, 1586 bp, Homo sapiens
agtggtggaggaacttccggcagcggcagctcaagtggccaaggcaagatgggtcaaagtcagagtggtggtcatggtcctggaggtggcaagaaggatgacaaggacaagaaaaagaaatatgaacctcctgtaccaactagagtggggaaaaagaagaagaaaacaaagggaccagatgctgccagcaaactgccactggtgacacctcacactcagtgccggttaaaattactgaagttagagagaattaaagactatcttctcatggaggaagaattcattagaaatcaggaacaaatgaaaccattagaagaaaagcaagaggaggaaagatcaaaagtggatgatctgagggggaccccgatgtcagtaggaaccttggaagagatcattgatgacaatcatgccatcgtgtctacatctgtgggctcagaacactacgtcagcattctttcatttgtagacaaggatctgctggaacctggctgctcggtcctgctcaaccacaaggtgcatgccgtgataggggtgctgatggatgacacggatcccctggtcacagtgatgaaggtagaaaaggccccccaggagacctatgcagatattggggggttggacaaccaaattcaggaaattaaggaatctgtggagcttcctctcacccatcctgaatattatgaagagatgggtataaagcctcctaagggggtcattctctatggtccacctggcacaggtaaaaccttgttagccaaagcagtagcaaaccaaacctcagccactttcttgagagtggttggctctgaacttattcagaagtacctaggtgatgggcccaaactcgtacgggaattgttccgagttgctgaagaacatgcaccgtccatcgtgtttattgatgaaattgacgccattgggacaaaaagatatgactccaattctggtggtgagagagaaattcagcgaacaatgttggaactgctgaaccagttggatggatttgattctaggggagatgtgaaagttatcatggccacaaaccgaatagaaactttggatccagcacttatcagaccaggccgcattgacaggaagattgagttccccctgcctgatgaaaagacgaagaagcgcatctttcagattcacacaagcaggatgacgctggctgatgatgtaaccctggacgacctgatcatggctaaagatgacctctctggtgctgacatcaaggcaatctgtacagaagctggtctgatggccttaagagaacgtagaatgaaagtaacaaatgaagacttcaaaaaatctaaagaaaatgttctttataagaaacaggaaggcacccctgaggggctgtatctctaatgaaccatggctgtcatcaggaaaatggttgggagatttctcaatccctgaaagggatgaggttgggggagttgcccagaggaatccctgttcccactgatttttattagcaaaacatcctgtgtcttttggagtacgatgtgtaagtgcccattgggtggcctgttggtcactgtgcagcagtctgcttcccaataaagcgtgctctttcacaa

SEQ ID NO: 761 - DNA, 2147 bp, Homo sapiens
gactgtggagttaagcagaacccatcaggaagtgcacaggcgtccggcgtgctcctccctccctgcagccccgggcagcatctcccagaggctccgcggcccaggctcctggtgtgtctgcagtgcaggtggctcctggaagaccctcagcctgcctgctgaggccatgtcggactacgagaacgatgacgagtgctggagcgtcctggagggcttccgggtgacgctcacctcggtcatcgacccctcacgcatcacaccttacctgcggcagtgcaaggtcctgaaccccgatgatgaggagcaggtgctcagcgaccccaacctggtcatccgcaaacggaaagtgggtgtgctcctggacatcctgcagcggaccggccacaagggctacgtggccttcctcgagagcctggagctctactacccgcagctgtacaagaaggtcacaggcaaggagccggcccgcgtcttctccatgatcatcgacgcgtccggggagtcaggcctgactcagctgctgatgactgaggtcatgaagctgcagaagaaggtgcaggacctgaccgcgctgctgagctccaaagatgacttcatcaaggagctgcgggtgaaggacagcctgctgcgcaagcaccaggagcgtgtgcagaggctcaaggaggagtgcgaggccggcagccgcgagctcaagcgctgcaaggaggagaactacgacctggccatgcgcctggcgcaccagagtgaggagaagggcgccgcgctcatgcggaaccgtgacctgcagctggagattgaccagctcaagcacagcctcatgaaggccgaggacgactgcaaggtggagcgcaagcacacgctgaagctcaggcacgccatggagcagcggcccagccaggagctgctgtgggagctgcagcaggagaaggccctgctccaggcccgggtgcaggagctggaggcctccgtccaggaggggaagctggacaggagcagcccctacatccaggtactggaggaggactggcggcaggcgctgcgggaccaccaggagcaggccaacaccatcttctccctgcgcaaggacctccgccagggcgaggcccgacgcctccggtgcatggaggagaaggagatgttcgagctgcagtgcctggcactacgtaaggactccaagatgtacaaggaccgcatcgaggccatcctgctgcagatggaggaggtcgccattgagcgggaccaggccatagccacgcgggaggagctgcacgcacagcacgcccggggcctgcaggagaaggacgcgctgcgcaagcaggtgcgggagctgggcgagaaggcggatgagctgcagctgcaggtgttccagtgtgaggcgcagctactggccgtggagggcaggctcaggcggcagcagctggagacgctcgtcctgagctccgacctggaagatggctcacccaggaggtcccaggagctctcactcccccaggacctggaggacacccagctctcagacaaaggctgccttgccggcggggggagcccgaaacagccctttgcagctctgcaccaggagcaggttttgcggaacccccatgacgcaggcctgagcagcggggagccgcccgagaaggagcggcggcgcctcaaagagagttttgagaactaccgcaggaagcgcgccctcaggaagatgcagaaaggatggcggcagggggaggaggaccgggagaacaccacgggcagcgacaacaccgacactgagggctcctagccgcagcagcgcaggccccgaccagggcacacccaccggcccggcctcctgccacccgggggtgccgacgccctggggcgcagacttccccgagccgtcgctgacttggcctggaacgaggaatctggtgccctgaaaggcccagccggactgccgggcattggggccgtttgttaagcggcactcattttgcggaggccatgcgggtgctcaccacccccatgcacacgccatctgtgtaacttcaggatctgttctgtttcaccatgtaacacacaatacatgcatgcattgtattagtgttagaaaacacagctgcgtaaataaacagcacgggtgacccgcaaaaaaaaaaaaaaaaaaaaaaaaa

SEQ ID NO: 762 - DNA, 3080 bp, Homo sapiens
gggtgcctcatattgccagacaagagctcagacctgaggagagtgactagcttctctgtgtcccaggtggccaccttccactgtggaagctcatggactccattgggtcttcagggttgcggcagggggaagaaaccctgagttgctctgaggagggcttgcccgggccctcagacagctcagagctggtgcaggagtgcctgcagcagttcaaggtgacaagggcacagctacagcagatccaagccagcctcttgggttccatggagcaggcgctgaggggacaggccagccctgcccctgcggtccggatgctgcctacatacgtggggtccaccccacatggcactgagcaaggagacttcgtggtgctggagctgggggccacaggggcctcactgcgtgttttgtgggtgactctaactggcattgaggggcatagggtggagcccagaagccaggagtttgtgatcccccaagaggtgatgctgggtgctggccagcagctctttgactttgctgcccactgcctgtctgagttcctggatgcgcagcctgtgaacaaacagggtctgcagcttggcttcagcttctctttcccttgtcaccagacgggcttggacaggagcaccctcatttcctggaccaaaggttttaggtgcagtggtgtggaaggccaggatgtggtccagctgctgagagatgccattcggaggcagggggcctacaacatcgacgtggttgctgtggtgaacgacacagtgggcaccatgatgggctgtgagccgggggtcaggccgtgtgaggttgggctagttgtagacacgggcaccaacgcgtgttacatggaggaggcacggcatgtggcagtgctggacgaagaccggggccgcgtctgcgtcagcgtcgagtggggctccttcagcgatgatggggcgctgggaccagtgctgaccaccttcgaccataccctggaccatgagtccctgaatcctggtgctcagaggtttgagaagatgatcggaggcctgtacctgggtgagctggtgcggctggtgctggctcacttggcccggtgtggggtcctctttggtggctgcacctcccctgccctgctgagccaaggcagcatcctcctggaacacgtggctgagatggaggacccctctactggggcagcccgtgtccatgctatcctgcaggacttgggcctgagccctggggcttcggatgttgagcttgtgcagcacgtctgtgcggccgtgtgcacgcgggctgcccagctctgtgctgccgccctggccgctgttctctcctgcctccagcacagccgggagcaacaaacactccaggttgctgtggccaccggaggccgagtgtgtgagcggcaccccaggttctgcagcgtcctgcaggggacagtgatgctcctggccccggaatgcgatgtctccttaatcccctctgtggatggtggtggccggggagtggcgatggtgactgccgtggctgcccgtctggctgcccaccggcgcctgctggaggagaccctggccccattccggttgaaccatgatcaactggctgcggttcaggcacagatgcggaaggccatggccaaggggctccgaggggaggcctcctcccttcgcatgctgcccactttcgtccgggccacccctgacggcagcgagcgaggggatttcctggccctggacctcgggggcacgaacttccgtgtcctcctggtacgtgtgaccacaggcgtgcagatcaccagcgagatctactccattcccgagactgtggcccagggttctgggcagcagctctttgaccacatcgtggactgcatcgtggacttccagcagaagcagggcctgagcgggcagagcctcccactgggttttaccttctccttcccatgtaggcagcttggcctagaccagggcatcctcctgaactggaccaagggtttcaaggcatcagactgcgagggccaagatgtcgtgagtctgttgcgggaagccatcactcgcagacaggcagtggagctgaatgtggttgccattgtcaatgacacggtggggaccatgatgtcctgtggctatgaggacccccgttgcgagataggcctcattgtcggaaccggcaccaatgcctgctacatggaggagctccggaatgtggcgggcgtgcctggggactcaggccgcatgtgcatcaacatggagtggggcgcctttggggacgatggctctctggccatgctcagcacccgctttgatgcaagtgtggaccaggcgtccatcaaccccggcaagcagaggtttgaaaagatgatcagcggcatgtacctgggggagatcgtccgccacatccttttacatttaaccagccttggcgttctcttccggggccagcagatccagcgccttcagaccagggacatcttcaagaccaagttcctctctgagatcgaaagtgacagcctggccctgcggcaggtccgagccatcctagaggatctggggctacccctgacctcagatgacgccctgatggtgctagaggtgtgccaggctgtgtcccagagggctgcccagctctgtggggcgggtgtagctgccgtggtggagaagatccgggagaaccggggcctggaagagctggcagtgtctgtgggggtggatggaacgctctacaagctgcacccgcgcttctccagcctggtggcggccacagtgcgggagctggcccctcgctgtgtggtcacgttcctgcagtcagaggatgggtccggcaaaggtgcggccctggtcaccgctgttgcctgccgccttgcgcagttgactcgtgtctgaggaaacctccaggctgaggaggtctccgccgcagccttgctggagccgggtcggggtctgcctgtttcccagccaggcccagccacccaggactcctgggacatcccatgtgtgacccctctgcggccatttggccttgctccctggctttccctgagagaagtagcactcaggttagcaatatatatatataatttatttacaaaaaaaaaaaaa

SEQ ID NO: 763 - DNA, 3040 bp, Homo sapiens
cactgtttcttggtagtttgacttcacttttgttgaagtttatcgcgtcaagaaattccagtttacgtcgaagcacatggaggatgaggacagcgacctcaaggagggggggaagaagcgctttgggcacatttgcagcagccacccctcctgctgctgcaccgtctccaacagctcctggaactgcgacggggaggtcctgcacagccctgccatcgaggtcagagtccactgccagctggttcgactctttgcacgaggaattgaagagaatccgaagccagactcacacagctgagaagccggcgtcctgctcacaaactgggaaagtgtgaaaactatttaagataattattacagaccaattatgttgatatatacatttaaatgtagaaatttatttttgatagttaaatcttgattttagaagaaaacccttttgtcaacaattttgtgtacatatttggcattttcagttctgtacgcatctgcgggttgcagcccacgccgcttactctcagcggatgcagctgctcacttgggggcactggcctcttaggttttaacgatgtcaacagtgtagtttagaaaatggcccgttagtggctctattgcaataatgttagggacattatatgatttccacgcaggtcacaccatctgggcctgaggtagcagtgggtcactttgatccactttgcaggacttattctgtaacggtttgtggccaagttttgggaagtggttgattctctttgccttcatttcaccttcctcttcgtttacggttaggacatcgctgcttgatccttacaatactgtgcaactgcaatgcaacgtggccctgcttcaggtgatccgcgggaggggcctccacgccagcgccgggaaggctgctggggcctccacacctgcctcatcacggcggcgaggctacgacaatccggctgggagcatgaccttggcgtctgttctgggagcacggatgataagctctggaagctggcagtgtgtaaagcactggcaagtttgttactgttaaaatgtcaaataccaatgctttatatcgacgcgaagtgcttaacacagccgggcttgggggcagtcaggaggaagctggccatccgtggaggaggggccggtcctggactcccgcaggactcctctgaggcagggcctgaagtctgtacacgtggtccagatttgtccttgtcttttcttcacactgagttctctatatttattgaacatcttgtccttttaagccagagtagtgtaaactgcgtctcggatgtctgtcttttgcctcgaagccacgatggatcgctggtttcctctgcagcgcgagggctccggcgaccagaggattcttcccggaaggcattcctgccgcgctccccggggcacccctcaattgtgtactacgtccttgtttagtgtgtatccgtgcccacgtagatgatgtctgtaacgtagttttgtttgaaatatgagaatatgcggcttaaactttgatctgtaaggagcggggccgtggccgtttggagcacgctgtagacaccgttcctcatgctgccgggtgggttttgcagaagctcccttagtgatttcatgtttaacaggcagcatccattttcagaatttcctggcattgatttatattttgaagcatacaggaaacttctcgtttcctcgtttagccccacccagatcaggtgaaagggcagctttaatggtggtttttatggaccacattatcagagagcactgtgcaagccaaatggttcaataatgaatgaaaattctgggtgtaaagagtaaatatgccctggctctttctaccaatgtttgctcctggttggaaagaaaccaaagatttaagacgggctgctcttccagactggctgtgcctgcctgtgcccagcaacctgtgcagccggcagtgtgcctggtgtcacgccaggaggctgtggctgctgtgggccctctggaattgtgctcctcacaaagtttccccaaaaggttcttctaagcctttattgtccctggtaaatgtttcccggctgggcgcggtggctcacgcctgtaatcccagcactttgggaggccgaggcgggtggatcacctaaggtcaggagtttgagatcagcctgcccaacatggtgaaacctcgtctctactaaaaatacacaacttagccagtcttgttggcgcacgcctgtaatctcagctactagggatgctgaggcaggagaatcgcttgaacccaagaaagaggtggaggttgcggtgagccaagattgcgccactgcactccagcctgggcaaacagagggagactccatcgccccccccaacaaaaaaaaaagtttcccatacactggcctgccccaaaacccactaacaattttagcaaaacagtccaggccaaagaggaagcatttcatgttcaataagaaacccagccattccgcatggctggttcctgagtggctctggtgatactctccagccacctgctgacattcagaatctcagacctcgggactgctgttgcggtaccgtgtgtctgacacctgccagcagccctttgctatctgcgcgcaggatgggggtgactgcccagacattcccgctagataggctctgatttccggggcagcctttcagatgcggcagacatacaacacctgtactttagagttttaagggaaaaaaaatcagaagtgctggttagatagtaaaaacttaggataacttagaaaggctagttttagcttcctttgtggctccctggtgcaaaacaattagcagttatgcaatggacctgattctagtttattctaattaagaagtgaggccgagtttgacttcgttcctgaatacaatcttgagtaactgggaaagtctgagtgaaaggatggcctcattctctttctaatcttgctggtttcaagattagaaaatggcattatttgatctgaaatgtttgagaagacacgaataaagttacttgggcagaaaaaaaaaaaaaaaaaaa

SEQ ID NO: 764 - DNA, 5865 bp, Homo sapiens
gcggggctcaggtgcctggcagcgcggccggggcccaggaaggggagggggcgaacgctggagcgaggcgggggcgggtgaggagggggtgacgccggacgcgtcgacagcgcgagggttcgcgcgtgagctgcgcgggtcgggcctggtaccgagctttcctgggggctagcaggtcgtggacgccggctcctggaggagagccggtaggagggaggtgaaggtgtccgcggcgtcgtcgacggcggcgccggccatggaggagacgcagccgccgccgcagcctaagctgcccctgtgcgacagcctcatgatctggctgcagacattcaatactgcctcaccttgtcaagatgtcaaacagctgactagtggagttgccatggcacaagttcttcatcaaattgatgcagcttggtttaacgaatcttggttaagccgaattaaagaggatgttggggacaactggagaataaaggccagtaatgtaaagaaggtccttcaaggaattatgagttattatcatgagtttttggggcagcagatttcagaagcacttatccctgatttaaaccaaataaccgaatgttcagatccagtggagcttgggaggttgctccagcttattttaggttgtgcgatcaactgtgaaaagaagcaagaacatattcaaaatataatgacactggaagagtctgttcaacatgtggtcatgactgctattcaagagttgatgagtaaagaaatattgagctctcctccaaatgatgctgttggagaattggagcaacagcttaaaagagccttggaagaacttcaggaagcactagcagaaaaagaagagctgaggcaaagatgtgaagaattggatatgcaggtgactacacttcaagatgaaaagaattcactggtttctgaaaatgagatgatgaatgaaaaacttgaccagttggatggctcttttgatgatccaaacacagtggttgcaaaaaagtattttcatgcacaattacaactagaacaattacaggaagaaaacttcaggcttgaagctgcaaaagatgattaccgtgttcactgtgaagaacttgaaaagcagctaatcgaattccagcataggaatgatgaattgactagtcttgcagaagaaacaagagccctgaaagatgaaatagatgttcttagggctacctctgataaagcaaataaactggagtcaacagttgagatatatcgtcagaagctacaagatctgaatgaccttcgcaagcaggtgaaaactttacaggaaaccaacatgatgtatatgcataatacagtcagcttagaagaagaattaaaaaaagcaaatgcagcacgtacacaattagaaacatacaaaaggcaggttcaagatcttcatgttaaactttcctccgaatccaagagggcagacacactagcgtttgaaatgaagcggcttgaagaaaaacatgaagctttacttaaggaaaaagagagactaattgagcagcgtgatactttgaaagaaacaaatgaagagcttcgatgttcacaagtacaacaggaccacctaaaccaaacagatgcatctgctacaaaaagttatgagaatcttgctgctgagattatgccagtggaatatagggaggtgtttattcgactgcaacatgaaaataagatgcttcgcttacagcaagaaggctctgagaatgaacgtattgaggaacttcaggagcagctagaacagaaacaccgtaaaatgaatgaactggaaactgagcagaggctgagcaaagagcgtattagagaattgcagcagcagattgaggacctccagaaatctttacaggaacaaggttccaagtctgaaggcgaaagttccagcaaattaaagcagaagttggaagctcatatggaaaaactcacagaggtccatgaagaattacagaagaaacaagaactcattgaagatcttcagccagatataaatcaaaatgtacaaaagatcaatgaacttgaagctgctcttcagaagaaagatgaagatatgaaagcaatggaggaaagatataaaatgtacttggagaaagccagaaatgtaataaaaactttggatcccaagttaaatccagcatcagctgaaataatgctactaagaaagcagttggcagagaaagagagaagaattgagattctggagagtgaatgcaaagtagcaaaattccgtgattatgaagaaaaactcattgtttctgcgtggtataataagagtctagcattccagaaactggggatggaatctagacttgtgagcggcggtggtgcctgcagtgacactggtgcgtgcactcctgcgcggtctttcttagcgcagcaacggcacatcaccaacaccagaagaaatctctctgttaaagtccctgctacaacatctgattaaactgcaaaaaaaacaaaacaaaacaaaaaaaccacataaaatagaagtgtccttaaaatattttgtacctttcaactaactaccagattgaaaaagagtttatgatgcgggatatcaggtattttaaaatcaacatgcatcaaattaattttgccagttgactttaaaaacaaattatagaattagccatctctctgagggagcacatttgaataattggagatgcagttatacacacatttcaaacaaacatttgtcttttgagagtattataatttcaaattggccttgtatattttagttaaatgttttcagttgtattagtaacttaattaattttcaatagctattcagtaatacttaatcttagaacattaattggatttgtttaatctttttttgttttttgttgatttatatgaaaacagtcttgaggcagggacatggagaactatgcaagggtgatttctttgacttaatatatacaaggctttacttctgtcccctaattcttccattgaatgtgtacctctaccttgtcatgtcatggaagatacaacatttggaagatctgacaattggaatgactttggaataataaaattgactaattggaaattttgcatattctgaaaatctaatctcatagttctaatttgtacctatggcaaataagggcttctggacatcatgtttaaaatgttaagcataagaaataaactgacatttgtaataggtgactttctgatggaaagcaagctatatatatatatatatatatatatatatatatatatatactttttgtgaaatgtctatatactttttaaggtaattaatgaagatttcagttattgcttttaagcataaagttgtatttagcttctgctgaaaaattgtatcatataataattttgcttcattgaaaagggatgttgcagtgatgaaacaaggtgggatcagtttgattttgtttacttattaaggagtttatcttgggctcagtttgtggtattcagttcgtttctgcccaaagctcttattttcagaggtgttacttttgaacttttggggtcatttttaaaagttagcacttttgaattttagttgtgttaaatatgtgctgtcgtatatcatagccatgagccatatatgacaatttaaatttaattaattataaactcagtctcttggttgcaccagccacatttcagatgctcaatagccacatgtggctagtgggtaccatattggacagggcagctatagaatatttccatcattgcagaaagttctattggatagtaccataatctttttatagtaacttggaaatactatttgatattagatgttagaccacaaaaagaagaaaaatgttaggactatttcagatataaaaaggaactgaattgtgacataattagcatcttacattccatacagttgaataccttatgctgtgacaaccatagttaatcatttcagtgctgttcaacatacatacctatcagcagtgtgtttagaccaggggtctgcaaactttctgtgaatggacaaagagtaaatactttagtaaatgtcttaggctttgtggcctacatgatctttgttgcaagtactcaactctgccattatagagttaaagcagccatacacaatatataaacaaaatgggcatagttgtatttcagtaaaactttatttacaaagacaggcggtaggccagatttggcttgcatgctgtagagctgtggtctaaattttattcatagactttctttgcaaatacagtgtgagtattgttccatttacagtattattattttttagatacctggtttttagattcttgcctggtaactttttactgaaaatacaagaatttcgtactgcatttgcatctccgagattagggagcacctgtcaggatatgttgttctatcagggttacttctgttgactacctcttagattttgatacagttatattgttgagtttcattttcatatattcttgtagtgtctgcttgcctgtgacttctggtaaaataaaataagcctttgaaaatattttagcatggtatttaacattttctaaatattatggcattttgacatattttagtcagcgaagacatctgcccctttggtgtttctacttgcttatgattgagattttacaagcccttcaaactccgttttaaaggaatttattgtaaaacattaactttaataaattagtgttttcacagatcagatcattatacttggaacttctaaatcatgcaatttctgaataaggacataaggctagattcatttttcttaatagagaaaaaggaaatttctgatttatcacttttctagttgataagtaggattcaaaacgtttgatatgtaagtatttatataagactaatgtaatttaaagttctgtattattgtgattaatcatacagaaattcaggaactgatcagaagtgagattcttttccacatctggttaatgtagtgagttgacaccctgtgggtggtaaagcattataaacatttcatcttgaaccatgatttatacacatctgtgttataagggaggcttgagtacatataccaatgaagagatattcagcatttgtctatttgataaggaattaaatgtcctagtgattataaagtaaaaccacagaccaatttgcaaatgatcttcaatgttaagcacttgctctaagattaaaattccttttctttttaaggttaagggtgtgtacgtatggcagtgatgtctatgttgagattaacttatgtattgaggaaaatttgaagtttattttttcgatgaataaggctgtcaaatgatttagtatagattaatgacatcttttttagaaatattaaagtgagtattcctcattatgtcatcatttctgataattagagtgctaatttgaatgttagataatgtttccacatctatacctatttctttctagggcacttctgaccctggggcttggggatggcctttaggccacagtagtgtctgtgttaagttcactaaatgtgtatttaatgagaaacattcctatgtaaaaatgtgtgtatgtgaacgtatgcatacatttttattgtgcacctgtacattgtgaagaagtagtttggaaatttgtaaagcacaaaccataaaagagtgtggagttattaaatgatgtagcacaaatgtaatgtttagcttataaaaggtcctttctattttctatggcaaagactttgacacttgaaaaataaaaccaatatttgatttatttttgtaagtatttaggatattattttaaataaatgattgtccattatcaatataatagttgtgaaatgatttaagtaaataaactttatgcttctgtgtctgttgaaaaaaaaaa

SEQ ID NO: 765 - DNA, 890 bp, Homo sapiens
atcttcacccaggctggcccctttggtgaaactacaactcccaggggtctgtgcgcgagaaggcaggcgggtttttctaccggaagtccgctctagctctgggccctacaactgcaccctgagccggagctgcccagtcgccgcgggaccggggccgctggggtctggacgggggtcgccatgatccgctttatcctcatccagaaccgggcaggcaagacgcgcctggccaagtggtacatgcagtttgatgatgatgagaaacagaagctgatcgaggaggtgcatgccgtggtcaccgtccgagacgccaaacacaccaactttgtggagttccggaactttaagatcatttaccgccgctatgctggcctctacttctgcatctgtgtggatgtcaatgacaacaacctggcttacctggaggccattcacaacttcgtggaggtcttaaacgaatatttccacaatgtctgtgaactggacctggtgttcaacttctacaaggtttacacggtcgtggacgagatgttcctggctggcgaaatccgagagaccagccagacgaaggtgctgaaacagctgctgatgctacagtccctggagtgagggcaggcgagccccaccccggccccggcccctcctggactcgcctgctcgcttccccttcccaggcccgtggccaacccagcagtccttccctcagctgcctaggaggaagggacccagctgggtctgggccacaagggaggagactgcaccccactgcctctgggccctggctgtgggcagaggccaccgtgtgtgtcccgagtaaccgtgccgttgtcgtgtgatgccataagcgtctgtgcgtggagtccccaataaacctgtggtcctgcctggcc

SEQ ID NO: 766 - DNA, 1872 bp, Homo sapiens
ttaattacaaaaactaatgactaagagagaggtggctagagctgaggcccctgagtcaggctgtgggtgggatcatctccagtacaggaagtgagactttcatttcctcctttccaagagagggctgagggagcagggttgagcaactggtgcagacagcctagctggactttgggtgaggcggttcagccatgaggctggctgtgcttttctcgggggccctgctggggctactggcagcccaggggacagggaatgactgtcctcacaaaaaatcagctactttgctgccatccttcacggtgacacccacggttacagagagcactggaacaaccagccacaggactaccaagagccacaaaaccaccactcacaggacaaccaccacaggcaccaccagccacggacccacgactgccactcacaaccccaccaccaccagccatggaaacgtcacagttcatccaacaagcaatagcactgccaccagccagggaccctcaactgccactcacagtcctgccaccactagtcatggaaatgccacggttcatccaacaagcaacagcactgccaccagcccaggattcaccagttctgcccacccagaaccacctccaccctctccgagtcctagcccaacctccaaggagaccattggagactacacgtggaccaatggttcccagccctgtgtccacctccaagcccagattcagattcgagtcatgtacacaacccagggtggaggagaggcctggggcatctctgtactgaaccccaacaaaaccaaggtccagggaagctgtgagggtgcccatccccacctgcttctctcattcccctatggacacctcagctttggattcatgcaggacctccagcagaaggttgtctacctgagctacatggcggtggagtacaatgtgtccttcccccacgcagcacagtggacattctcggctcagaatgcatcccttcgagatctccaagcacccctggggcagagcttcagttgcagcaactcgagcatcattctttcaccagctgtccacctcgacctgctctccctgaggctccaggctgctcagctgccccacacaggggtctttgggcaaagtttctcctgccccagtgaccggtccatcttgctgcctctcatcatcggcctgatccttcttggcctcctcgccctggtgcttattgctttctgcatcatccggagacgcccatccgcctaccaggccctctgagcatttgcttcaaaccccagggcactgagggggttggggtgtggtgggggggtacccttatttcctcgacacgcaactggctcaaagacaatgttattttccttccctttcttgaagaacaaaaagaaagccgggcatgacggctcatgcctgtaatcccagcactttgggaggctgaggcaggtggatcactggaggtcaggagtttgagaccagcctggccaacatggtgaaaccctgtctctactaaaaatacaattagccaggtgtggcggcgtaatcccagctggcctgtaatcccagctacttgggaggctgaggcagaactgcttgaacccaggaggtggaggttgcagtgagccgtcatcgcgccactaagccaagatcgcgccactgcactccagcctgggcgacagagccagactgtctcaaataaataaatatgagataatgcagtcgggagaagggagggagagaattttattaaatgtgacgaactgccccccccccccccccagcaggagagcagcaaaatttatgcaaatctttgacggggttttccttgtcctgccaggattaaaagccatgagtttcttgtcaaaaaaaaaaaaaaaaa

SEQ ID NO: 767 - DNA, 2625 bp, Homo sapiens
actcgaccgggctgcgctcactgcccagccggggccccgggagcctccaggctcccgcccgccctgagctgcggcctccgcatggaggggccactcactccaccaccgctgcagggaggcggagccgccgctgttccggagcccggagcccggcaacacccgggacacgagacggcggcgcagcggtacagcgcccgactgctgcaggccggctacgagcccgagagccctagattggacctcgctacacacccgacgacaccccgttcagaactatcttcagtggtcttactggcaggtgttggtgtccagatggatcgccttcgcagggctagcatggcggactacctgatcagcggcggcaccggctacgtgcccgaggatgggctcaccgcgcagcagctcttcgccagcgccgacggcctcacctacaacgacttcctgattctcccaggattcatagacttcatagctgatgaggtggacctgacctcagccctgacccggaagatcacgctgaagacgccactgatctcctcccccatggacactgtgacagaggctgacatggccattgccatggctctgatgggaggtattggtttcattcaccacaactgcaccccagagttccaggccaacgaggtgcggaaggtcaagaagtttgaacagggcttcatcacggaccctgtggtgctgagcccctcgcacactgtgggcgatgtgctggaggccaagatgcggcatggcttctctggcatccccatcactgagacgggcaccatgggcagcaagctggtgggcatcgtcacctcccgagacatcgactttcttgctgagaaggaccacaccaccctcctcagtgaggtgatgacgccaaggattgaactggtggtggctccagcaggtgtgacgttgaaagaggcaaatgagatcctgcagcgtagcaagaaagggaagctgcctatcgtcaatgattgcgatgagctggtggccatcatcgcccgcaccgacctgaagaagaaccgagactaccctctggcctccaaggattcccagaagcagctgctctgtggggcagctgtgggcacccgtgaggatgacaaataccgtctggacctgctcacccaggcgggcgtcgacgtcatagtcttggactcgtcccaagggaattcggtgtatcagatcgccatggtgcattacatcaaacagaagtacccccacctccaggtgattggggggaacgtggtgacagcagcccaggccaagaacctgattgatgctggtgtggacgggctgcgcgtgggcatgggctgcggctccatctgcatcacccaggaagtgatggcctgtggtcggccccagggcactgctgtgtacaaggtggctgagtatgcccggcgctttggtgtgcccatcatagccgatggcggcatccagaccgtgggacacgtggtcaaggccctggcccttggagcctccacagtgatgatgggctccctgctggccgccactacggaggcccctggcgagtacttcttctcagacggggtgcggctcaagaagtaccggggcatgggctcactggatgccatggagaagagcagcagcagccagaaacgatacttcagcgagggggataaagtgaagatcgcgcagggtgtctcgggctccatccaggacaaaggatccattcagaagttcgtgccctacctcatagcaggcatccaacacggctgccaggatatcggggcccgcagcctgtctgtccttcggtccatgatgtactcaggagagctcaagtttgagaagcggaccatgtcggcccagattgagggtggtgtccatggcctgcactcttacgaaaagcggctgtactgaggacagcggtggaggccgaggtggtggaggggatgcaccccagtgtccacttttgggcacagcctccctccataactgagtggtccacagatttgcactacgggttctccagctcctttccaggcagagaggaggggaggtcctgaggggactgctgcccctcactcggcatcccctgcagagtcaggactgctcccggggccaggctgccctgggagcccccctccgagcccagccagccaggctctcaggccctgcgcctgcctcaggtctttcttgctgcagcctgctccagcctggcccccaccccaggggcaggcggcccctcctggcttctcctgtagggcacctccctgcccctagcctcccaggaaatggtgctctcctggccctgcctctggcccttcccgggccgctgcccctcagccatgtggcacttctgagctcctgacctaggccaaggggaggtctctgcccccttccccggccctgggctacccttgggtcctgctcctcaggccgctcccctgtccctggccatgggtaggagactgccctggtcatggccgcctgcctgtcattcctgactcaccaccgtccccaggtgaaccattcctcccttctcctcagctgcagtcgaaggctttaactttgcacacttgggatcacagttgcgtcattgtgtattaaatacttggaataaatcaagcaggtctcaacgcctccactaaaaaaaaaaaaaaa

SEQ ID NO: 768 - DNA, 951 bp, Homo sapiens
acggaaacgggcgtgccatttccgcgcacgtctgcagatgcggtagtcgattggtcaagtctcccatggctcctccttcatcaggaggtgggcaaaccgcgccatgatagggtcgggattggctggctctggaggcgcaggtggtccttcttctactgtcacatggtgcgcgctgttttctaatcacgtggctgccacccaggtaagaagaggccgctcttcctggggttgtttctccgtgtgacgtgtggcctttgagatcaactctcctgtaccagcgtaggccgcatgagtggggggcgggctcccgcggtcctgctcggcggagtggcctctctgctcctgtcttttgtttggatgccggcgctgctgcctgtggcctcccgccttttgttgctaccccgagtcttgctgaccatggcctctggaagccctccgacccagccctcgccggcctcggattccggctctggctacgttccgggctcggtctctgcagcctttgttacttgccccaacgagaaggtcgccaaggagatcgccagggccgtggtggagaagcgcctagcagcctgcgtcaacctcatccctcagattacatccatctatgagtggaaagggaagatcgaggaagacagtgaggtgctgatgatgattaaaacccaaagttccttggtcccagctttgacagattttgttcgttctgtgcacccttacgaagtggccgaggtaattgcattgcctgtggaacaggggaactttccgtacctgcagtgggtgcgccaggtcacagagtcagtttctgactctatcacagtcctgccatgatgagccctgttcctgctcatcatgaagatccccgcgatacttcaacgccttctgacttccaggtgatgactgggcccccaataaatcccgtctttgggtctctctgccaaaaaaaaaaaaaaa

SEQ ID NO: 769 - DNA, 1557 bp, Homo sapiens
ctcgcccgccccggaagtgcaaactgtgtggtctggcaggtgtggattccgccggtgaaggctgaaggcagctaccttaaagatgccgggatccgcagcgaagggctcggagttgtcagagaggatcgagagcttcgtggagaccctgaagcggggtggtgggccgcgcagctccgaggaaatggctcgggagaccctagggttgctgcgccagatcatcacggaccaccgctggagcaacgcgggggagctgatggagctgatccgcagagagggcaggaggatgacggccgctcagccctccgagaccaccgtgggcaacatggtgcggagagtgctcaagattatccgggaggagtatggcagactccatggacgcagcgacgagagtgatcagcaggagtccctgcacaaactgttgacatccggaggcctaaacgaggatttcagcttccattatgcccaactccagtccaacatcattgaggcgattaatgagctgctagtggagctggaagggacaatggagaacattgcagcccaggctctggagcacattcactccaatgaggtgatcatgaccattggcttctcccgaacagtagaggccttcctcaaagaggctgcccgaaagaggaaattccatgtcattgtagcagagtgtgctcctttctgccagggtcatgaaatggctgtgaatttgtccaaagcaggtattgagacaactgtcatgactgatgctgccatttttgccgttatgtcaagagtcaacaaggtgatcattggcacgaagaccatcctggccaatggggccctgagagctgtgacaggaactcacactctggcactggcagcaaaacaccattccaccccactcatcgtctgtgcacctatgttcaaactttctccacagttccccaatgaagaagactcatttcataagtttgtggctcctgaagaagtcctgccattcacagaaggggacattctggagaaggtcagcgtgcattgccctgtgtttgactacgttcccccagagctcattaccctctttatctccaacattggtgggaatgcaccttcctacatctaccgcctgatgagtgaactctaccatcctgatgatcatgttttatgaccgaccacacgtgtcctaagcagattgcttaggcagatacagaatgaagaggagacttgagtgttgctgctgaagcacatccttgcaatgtgggagtgcacaggagtccacctaaaaaaaaaatccttgatactgttgcctgcctttttagtcaccccgtaacaagggcacacatccaggactgtgtcttgcctttcagatcttaacagagcagcagggcttaacttgttgattttggagcctcttagtgacctggttgcgtctgtgtcaggaacttaaactttctggttcagtagtgtgttaaacataacactgaataccttactgggatacagatttttgctcagaaatggctatgacactttttctaggctctaccaataaaagccacttgaaggttccaaaaaaaaaaaaaaaaa

SEQ ID NO: 770 - DNA, 5379 bp, Homo sapiens
gcacttccttctcggctagattatctgaaactgttgtcggttcttgagatgatactaccaccgaatgtctgtgtttcattgtctagtccaacctgtattgtggatatctacaacgttccggcaatagttttgcaggtgcatcacatttttgtttttgttttgggaggaaaagggagggcacggcagccaggcttcatattcctacaagtgcatgcttcaagattactgtacttacagtgtttccaacatcttctcataaaaggggaaagcttcatagcctcaaccatgaaggaaaccagtcgcatagggcatggagctggagaactataaacagcccgtggtgctgagagaggacaactgccgaaggcgccggaggatgaagccgcgcagtgctgcggccagcctgtcctccatggagctcatccccatcgagttcgtgctgcccaccagccagcgcaaatgcaagagccccgaaacggcgctgctgcacgtggccggccacggcaacgtggagcagatgaaggcccaggtgtggctgcgagcgctggagaccagcgtggcggcggacttctaccaccggctgggaccgcatcacttcctcctgctctatcagaagaaggggcagtggtacgagatctacgacaagtaccaggtggtgcagactctggactgcctgcgctactggaaggccacgcaccggagcccgggccagatccacctggtgcagcggcacccgccctccgaggagtcccaagccttccagcggcagctcacggcgctgattggctatgacgtcactgacgtcagcaacgtgcacgacgatgagctggagttcacgcgccgtggcttggtgaccccgcgcatggcggaggtggccagccgcgaccccaagctctacgccatgcacccgtgggtgacgtccaagcccctcccggagtacctgtggaagaagattgccaacaactgcatcttcatcgtcattcaccgcagcaccaccagccagaccattaaggtctcacccgacgacacccccggcgccatcctgcagagcttcttcaccaagatggccaagaagaaatctctgatggatattcccgaaagccaaagcgaacaggattttgtgctgcgcgtctgtggccgggatgagtacctggtgggcgaaacgcccatcaaaaacttccagtgggtgaggcactgcctcaagaacggagaagagattcacgtggtactggacacgcctccagacccggccctagacgaggtgaggaaggaagagtggccgctggtggatgactgcacgggagtcaccggctaccatgagcagcttaccatccacggcaaggaccacgagagtgtgttcaccgtgtccctgtgggactgcgaccgcaagttcagggtcaagatcagaggcattgatatccccgtcctgcctcggaacaccgacctcacagtttttgtagaggcaaacatccagcatgggcaacaagtcctttgccaaaggagaaccagccccaaacccttcacagaggaggtgctgtggaatgtgtggcttgagttcagtatcaaaatcaaagacttgcccaaaggggctctactgaacctccagatctactgcggtaaagctccagcactgtccagcaaggcctctgcagagtcccccagttctgagtccaagggcaaagttcagcttctctattatgtgaacctgctgctgatagaccaccgtttcctcctgcgccgtggagaatacgtcctccacatgtggcagatatctgggaagggagaagaccaaggaagcttcaatgctgacaaactcacgtctgcaactaacccagacaaggagaactcaatgtccatctccattcttctggacaattactgccacccgatagccctgcctaagcatcagcccacccctgacccggaaggggaccgggttcgagcagaaatgcccaaccagcttcgcaagcaattggaggcgatcatagccactgatccacttaaccctctcacagcagaggacaaagaattgctctggcattttagatacgaaagccttaagcacccaaaagcatatcctaagctatttagttcagtgaaatggggacagcaagaaattgtggccaaaacataccaattgttggccagaagggaagtctgggatcaaagtgctttggatgttgggttaacaatgcagctcctggactgcaacttctcagatgaaaatgtaagagccattgcagttcagaaactggagagcttggaggacgatgatgttctgcattaccttctacaattggtccaggctgtgaaatttgaaccataccatgatagcgcccttgccagatttctgctgaagcgtggtttaagaaacaaaagaattggtcactttttgttttggttcttgagaagtgagatagcccagtccagacactatcagcagaggttcgctgtgattctggaagcctatctgaggggctgtggcacagccatgctgcacgactttacccaacaagtccaagtaatcgagatgttacaaaaagtcacccttgatattaaatcgctctctgctgaaaagtatgacgtcagttcccaagttatttcacaacttaaacaaaagcttgaaaacctgcagaattctcaactccccgaaagctttagagttccatatgatcctggactgaaagcaggagcgctggcaattgaaaaatgtaaagtaatggcctccaagaaaaaaccactatggcttgagtttaaatgtgccgatcctacagccctatcaaatgaaacaattggaattatctttaaacatggtgatgatctgcgccaagacatgcttattttacagattctacgaatcatggagtctatttgggagactgaatctttggatctatgcctcctgccatatggttgcatttcaactggtgacaaaataggaatgatcgagattgtgaaagacgccacgacaattgccaaaattcagcaaagcacagtgggcaacacgggagcatttaaagatgaagtcctgaatcactggctcaaagaaaaatcccctactgaagaaaagtttcaggcagcagtggagagatttgtttattcctgtgcaggctactgtgtggcaacctttgttcttggaataggcgacagacacaatgacaatattatgatcaccgagacaggaaacctatttcatattgacttcgggcacattcttgggaattacaaaagtttcctgggcattaataaagagagagtgccatttgtgctaacccctgacttcctctttgtgatgggaacttctggaaagaagacaagcccacacttccagaaatttcaggacatctgtgttaaggcttatctagcccttcgtcatcacacaaacctactgatcatcctgttctccatgatgctgatgacaggaatgccccagttaacaagcaaagaagacattgaatatatccgggatgccctcacagtggggaaaaatgaggaggatgctaaaaagtattttcttgatcagatcgaagtttgcagagacaaaggatggactgtgcagtttaattggtttctacatcttgttcttggcatcaaacaaggagagaaacattcagcctaatactttaggctagaatcaaaaacaagttagtgttctatggtttaaattagcatagcaatcatcgaacttggatttcaaatgcaatagacattgtgaaagctggcatttcagaagtatagctcttttcctacctgaactcttccctggagaaaagatgttggcattgctgattgtttggttaagcaatgtccagtgctaggattatttgcaggtttggttttttctcatttgtctgtggcattggagaatattctcggtttaaacagactaatgacttccttattgtccctgatattttgactatcttactattgagtgcttctggaaattctttggaataattgatgacatctattttcatctgggtttagtctcaattttggttatctttgtgttcctcaagctctttaaagaaaaagatgtaatcgttgtaacctttgtctcattccttaaatgatgcttccaaacatctccttagtgtctgcaggtgttagtggtgtgctaaaagcaaggaaagcgagttagtcttttcagtgtcttttgcaattcaattcttttgtcatgtataactgagacacacaaacacagcaggagaaatctaaaccgttgtgccttgaccttcctctgctggtcttgttccagggttatgaatatgaaaaaatagagatgagactttttgtgtcaactctgtccacaagagtgagttatctagtatgattagtatagctttctccagcatggcagcaggaagtaactacagggcctcttttatgcctgacatttcttcccttcctttttccctgcctccctttttcatcaattgcaatgctcccacaactctttacagacttgtgaaatcttcaagaacacctttactctataactcaaaaattagttgaaaaataattacttctcaaggattattagaatcttaggtacttatttgtaaagatgtttagtgacttttttttcaagtatcttattaaaggaggcattctagaaaatatgaattagtttccaaatgccttaattttaaactttggcctgaacagttttttctttttcttaatggaagaagatatttaatatcttaaaaatattccaagttaggaagaacactacttgccttatccatttcccatttaaaggacttttaaactttgacacatccttcagatttcctgaaaataattgaaatatcttactttaaaaatattttcatctctgaaatatctcgttatttattggaggtattgtttaaccttagagagaccattaaattatttataaaatattttgtaattacctgtagctaatacattacatagaaaaaaactatgttaacagtgtctctgtttaagtataatcagatataaatatatacttaattttttaattttaaaaatagatacctgtttgactttgaggtagtccagaccttttctttttttttttttttttaatgtgtgcaaaagcccaaaggttcctaagcctggctgcaaagaagaatcaacagggacactttttaaaaacactcttatcagcctgggcaacacagtgagactccatctcttaaaaaaaaaattagctgggtatagtggtatgtgcctgtagtcccaggtactcaggaggctgaggcaggaggattgcctgagcccaggaggtggaaactgcagagagtcatgatcatgtccttacactccagcctggataacagagcgagaccctgtctcaaaaaaataaaataaaaaataaaaaca

SEQ ID NO: 771 - DNA, 2968 bp, Homo sapiens
gtgcgcagcggccccgaccccgcctcagtcttccagggcggcggtgggtgtccgcttctctctgctcttcgactgcaccgcactcgcgcgtgaccctgactccccctagtcagctcagcggtgctgccatggcgtggcggcggcgcgaagccagcgtcggggctcgcggcgtgttggctctggcgttgctcgccctggccctgtgcgtgcccggggcccggggccgggctctcgagtggttctcggccgtggtaaacatcgagtacgtggacccgcagaccaacctgacggtgtggagcgtctcggagagtggccgcttcggcgacagctcgcccaaggagggcgcgcatggcctggtgggcgtcccgtgggcgcccggcggagacctcgagggctgcgcgcccgacacgcgcttcttcgtgcccgagcccggcggccgaggggccgcgccctgggtcgccctggtggctcgtgggggctgcaccttcaaggacaaggtgctggtggcggcgcggaggaacgcctcggccgtcgtcctctacaatgaggagcgctacgggaacatcaccttgcccatgtctcacgcgggaacaggaaatatagtggtcattatgattagctatccaaaaggaagagaaattttggagctggtgcaaaaaggaattccagtaacgatgaccataggggttggcacccggcatgtacaggagttcatcagcggtcagtctgtggtgtttgtggccattgccttcatcaccatgatgattatctcgttagcctggctaatattttactatatacagcgtttcctatatactggctctcagattggaagtcagagccatagaaaagaaactaagaaagttattggccagcttctacttcatactgtaaagcatggagaaaagggaattgatgttgatgctgaaaattgtgcagtgtgtattgaaaatttcaaagtaaaggatattattagaattctgccatgcaagcatatttttcatagaatatgcattgacccatggcttttggatcaccgaacatgtccaatgtgtaaacttgatgtcatcaaagccctaggatattggggagagcctggggatgtacaggagatgcctgctccagaatctcctcctggaagggatccagctgcaaatttgagtctagctttaccagatgatgacggaagtgatgacagcagtccaccatcagcctcccctgctgaatctgagccacagtgtgatcccagctttaaaggagatgcaggagaaaatacggcattgctagaagccggcaggagtgactctcggcatggaggacccatctcctagcacacgtgcccactgaagtggcaccaacagaagtttggcttgaactaaaggacattttattttttttactttagcacataatttgtatatttgaaaataatgtatattattttacctattagattctgatttgatatacaaaggactaagatattttcttcttgaagagacttttcgattagtcctcatatatttatctactaaaatagagtgtttaccatgaacagtgtgttgcttcagactattacaaagacaactggggcaggtactctaatataaaggacaggtggtgtttctaaataattggctgctatggttctgtaaaaaccagttaattctatttttcaaggtttttggcaaagcacatcaatgttagactagttgaagtggaattgtataattcaattcgataattgatctcatgggctttccctggaggaaaggttttttttgttgttttttttttaagaacttgaaacttgtaaactgagatgtctgtagcttttttgcccatctgtagtgtatgtgaagatttcaaaacctgagagcactttttctttgtttagaattatgagaaaggcactagatgactttaggatttgcatttttccctttattgcctcatttcttgtgacgccttgttggggagggaaatctgtttattttttcctacaaataaaaagctaagattctatatcgcacatgagcattaagttcttcattgccttgttaaggaaaatgagtaggcagactcagaatctgttatattgatttcagttacaatttaatctttacaattaaaagggcgaaagatgtagaattttagtttttgttgttgactcgaaataaccagttttcttgattagagtttaagcagatttaataccatgaccttgcttaaccgtttcttcttttttacttgcttgctgttcttttgggtcaaaggagcaggctaatgcaaagcttttggagactgctaagtgttaaaaagtgattaaacacacactctgctattttttcacttcttggaggtagaagtcgagtatgaggcagttattttttagagtgtggaattatagtctttccttgctcctagttattctgtatatctttactttgtaggtaaaaataaatgtttatttaaaacaatttttaaaattataaatttatttttatagccatatgtaggatataaagatttatatagattattttctcaagctacttaatgctttaattctagctactcatcatgaaatagtaaacagttttactgaaataaactctacagacagatgcagtatgaggagctattgaagtagaaaatgtatttcgctttgcacactgagttggttttagcagacaacctcaagtaggtttccataacagccattacctttgaaatctaccttctgtagtttattataaataggaaaatacatcctgattctgtagcaagtagattgtttgctctttgtctttaagaaatactaggagggccgggcgcggtggctcacgcctgtaatcccagcactttgggaggccgaggcgggcggatcacgaggtcaggagatcgagaccatcccggctaaaacggtgaaaccccgtctctactaaaaatacaaaaaattagccgg

SEQ ID NO: 772 - DNA, 2751 bp, Homo sapiens
ccctttactcctggctgcggggcgagccgggcgtctgctgcagcggccgcggtggctgaggaggcccgagaggagtcggtggcagcggcggcggcgggaccggcagcagcagcagcagcagcagcagcagcaaccactagcctcctgccccgcggcgctgccgcacgagccccacgagccgctcaccccgccgttctcagcgctgcccgaccccgctggcgcgccctcccgccgccagtcccggcagcgccctcagttgtcctccgactcgccctcggccttccgcgccagccgcagccacagccgcaacgccacccgcagccacagccacagccacagccccaggcatagccttcggcacagccccggctccggctcctgcggcagctcctctgggcaccgtccctgcgccgacatcctggaggttgggatgctcttgtccaaaatcaactcgcttgcccacctgcgcgccgcgccctgcaacgacctgcacgccaccaagctggcgcccggcaaggagaaggagcccctggagtcgcagtaccaggtgggcccgctactgggcagcggcggcttcggctcggtctactcaggcatccgcgtctccgacaacttgccggtggccatcaaacacgtggagaaggaccggatttccgactggggagagctgcctaatggcactcgagtgcccatggaagtggtcctgctgaagaaggtgagctcgggtttctccggcgtcattaggctcctggactggttcgagaggcccgacagtttcgtcctgatcctggagaggcccgagccggtgcaagatctcttcgacttcatcacggaaaggggagccctgcaagaggagctggcccgcagcttcttctggcaggtgctggaggccgtgcggcactgccacaactgcggggtgctccaccgcgacatcaaggacgaaaacatccttatcgacctcaatcgcggcgagctcaagctcatcgacttcgggtcgggggcgctgctcaaggacaccgtctacacggacttcgatgggacccgagtgtatagccctccagagtggatccgctaccatcgctaccatggcaggtcggcggcagtctggtccctggggatcctgctgtatgatatggtgtgtggagatattcctttcgagcatgacgaagagatcatcaggggccaggttttcttcaggcagagggtctcttcagaatgtcagcatctcattagatggtgcttggccctgagaccatcagataggccaaccttcgaagaaatccagaaccatccatggatgcaagatgttctcctgccccaggaaactgctgagatccacctccacagcctgtcgccggggcccagcaaatagcagcctttctggcaggtcctcccctctcttgtcagatgcccgagggaggggaagcttctgtctccagcttcccgagtaccagtgacacgtctcgccaagcaggacagtgcttgatacaggaacaacatttacaactcattccagatcccaggcccctggaggctgcctcccaacagtggggaagagtgactctccaggggtcctaggcctcaactcctcccatagatactctcttcttctcataggtgtccagcattgctggactctgaaatatcccgggggtggggggtgggggtgggtcagaaccctgccatggaactgtttccttcatcatgagttctgctgaatgccgcgatgggtcaggtaggggggaaacaggttgggatgggataggactagcaccattttaagtccctgtcacctcttccgactctttctgagtgccttctgtggggactccggctgtgctgggagaaatacttgaacttgcctcttttacctgctgcttctccaaaaatctgcctgggttttgttccctatttttctctcctgtcctccctcaccccctccttcatatgaaaggtgccatggaagaggctacagggccaaacgctgagccacctgcccttttttctgcctcctttagtaaaactccgagtgaactggtcttcctttttggtttttacttaactgtttcaaagccaagacctcacacacacaaaaaatgcacaaacaatgcaatcaacagaaaagctgtaaatgtgtgtacagttggcatggtagtatacaaaaagattgtagtggatctaatttttaagaaattttgcctttaagttattttacctgtttttgtttcttgttttgaaagatgcgcattctaacctggaggtcaatgttatgtatttatttatttatttatttggttcccttcctattccaagcttccatagctgctgccctagttttctttcctcctttcctcctctgacttggggaccttttgggggagggctgcgacgcttgctctgtttgtggggtgacgggactcaggcgggacagtgctgcagctccctggcttctgtggggcccctcacctacttacccaggtgggtcccggctctgtgggtgatggggaggggcattgctgactgtgtatataggataattatgaaaagcagttctggatggtgtgccttccagatcctctctggggctgtgttttgagcagcaggtagcctgctggttttatctgagtgaaatactgtacaggggaataaaagagatcttatttttttttttatacttggcgttttttgaataaaaaccttttgtcttaaaaaaaaaaaaaaaaaaaaaaaaaaaaaaaaaaaaaaaaaaaa

SEQ ID NO: 773 - DNA, 11185 bp, Homo sapiens
aactgctagtggctgagtccctggcggggcgcggcggtggaaggtgtcgcgtacgggcttcccgagctgacgtggcttgaattgggaggggggcagctggagcctcaggcggcagcgcttctagaaatgctgagccgattatcaggattagcaaatgttgttttgcatgaattatcaggagatgatgacactgatcagaatatgagggctcccctagaccctgaattacaccaagaatctgacatggaatttaataatactacacaagaagatgttcaggagcgcctggcttatgcagagcaattggtggtggagctaaaagatattattagacagaaggatgttcaactgcagcagaaagatgaagctctacaggaagagagaaaagctgctgataacaaaattaaaaaactaaaacttcatgcgaaggccaaattaacttctttgaataaatacatagaagaaatgaaagcacaaggagggactgttctgcctacagaacctcagtcagaggagcaactttccaagcatgacaagagttctacagaggaagagatggaaatagaaaagataaaacataagctccaggagaaggaggaactaatcagcactttgcaagcccagcttactcaggcacaggcagaacaacctgcacagagttctacagagatggaagaatttgtaatgatgaagcaacagctccaggagaaggaagaattcattagcactttacaagcccagctcagccagacacaggcagagcaagctgcacagcaggtggtccgagagaaagatgcccgctttgaaacacaagttcgtcttcatgaagatgagcttcttcagttagtaacccaggcagatgtggaaacagagatgcaacagaaattgagggtgctgcaaaggaagcttgaggaacacgaagaatccttggtgggccgtgctcaggtcgttgacttgctgcaacaggagctgactgctgctgagcagagaaaccagattctctctcagcagttacagcagatggaagctgagcataatactttgaggaacactgtggaaacagaaagagaggagtccaagattctactggaaaagatggaacttgaagtggcagagagaaaattatccttccataatctgcaggaagaaatgcatcatcttttagaacagtttgagcaagcaggccaagcccaggctgaactagagtctcggtatagtgctttggagcagaagcacaaagcagaaatggaagagaagacctctcatattttgagtcttcaaaagactggacaagagctgcagtctgcctgtgatgctctaaaggatcaaaattcaaagcttctccaagataagaatgagcaagcagttcagtcagcccagaccattcagcaactggaagatcagctccagcaaaaatccaaagaaattagccaatttctaaatagactgcccttgcaacaacatgaaacagcatctcagacttctttcccagatgtttataatgagggcacacaggcagtcactgaggagaatattgcttctttgcagaagagagtggtagaactagagaatgaaaagggagccttgctccttagttctatagagctggaggagctgaaagctgagaatgaaaaactgtcttctcagattactctcctagaggctcagaatagaactggggaggcagacagagaagtcagtgagatcagcattgttgatattgccaacaagaggagctcttctgctgaggaaagtggacaagatgttctagaaaacacattttctcagaaacataaagaattatcagttttattgttggaaatgaaagaagctcaagaggaaattgcatttcttaaattacagctccagggaaaaagggctgaggaagcagatcatgaggtccttgaccagaaagaaatgaaacagatggagggtgagggaatagctccaattaaaatgaaagtatttcttgaagatacagggcaagattttcccttaatgccaaatgaagagagcagtcttccagcagttgaaaaagaacaggcgagcactgaacatcaaagtagaacatctgaggaaatatctttaaatgatgctggagtagaattgaaatcaacaaagcaggatggtgataaatccctttctgctgtaccagatattggtcagtgtcatcaggatgagttggaaaggttaaaaagtcaaattttggagctcgagctaaactttcataaagcacaagaaatctatgagaaaaatttagatgagaaagctaaggaaattagcaacctaaaccagttgattgaggagtttaagaaaaatgctgacaacaacagcagtgcattcactgctttgtctgaagaaagagaccagcttctctctcaggtgaaggaacttagcatggtaacagaattgagggctcaggtaaagcaactggaaatgaaccttgcagaagcagaaaggcaaagaagacttgattatgaaagccaaactgcccatgacaacctgctcactgaacagatccatagtctcagcatagaagccaaatctaaagatgtgaaaattgaagttttacagaatgaactggatgatgtgcagcttcagttttctgagcagagtaccctgataagaagcctgcaaagccagctgcaaaataaggaaagtgaagtgcttgagggggcagaacgtgtaaggcatatctcaagtaaagtggaagaactgtcccaggctctttcacagaaggaacttgaaataacaaaaatggatcagctcttactagagaaaaagagagatgtggaaaccctccaacaaaccatcgaggagaaggatcaacaagtgacagaaatcagctttagtatgactgagaaaatggttcagcttaatgaagagaagttttctcttggggttgaaattaagactcttaaagaacagctaaatttattatccagagctgaggaagcaaaaaaagagcaggtggaagaagataatgaagtttcttctggccttaaacaaaattatgatgagatgagcccagcaggacaaataagtaaggaagaacttcagcatgaatttgaccttctgaagaaagaaaatgagcagagaaagagaaagctccaggcagctcttattaacagaaaggagcttctgcaaagagtcagtagattggaagaagaattagccaacttgaaagatgaatctaagaaagaaatcccactcagtgagactgagaggggagaagtggaagaagataaagaaaacaaagaatactcagaaaaatgtgtgacttctaagtgccaagaaatagaaatttatttaaaacagacaatatctgagaaagaagtggaactacagcatataaggaaggatttggaagaaaagctggcagctgaagagcaattccaggctctggtcaaacagatgaatcagaccttgcaagataaaacaaaccaaatagatttgctccaagcagaaatcagtgaaaaccaagcaattatccagaagttaatcacaagtaacacggatgcaagtgatggggactccgtagcacttgtaaaggaaacagtggtgataagtccaccttgtacaggtagtagtgaacactggaaaccagaactagaagaaaagatactggcccttgaaaaagaaaaggagcaacttcaaaagaagctacaggaagccttaacctcccgcaaggcaattcttaaaaaggcacaggagaaagaaagacatctcagggaggagctaaagcaacagaaagatgactataatcgcttgcaagaacagtttgatgagcaaagcaaggaaaatgagaatattggagaccagctaaggcaactccagattcaagtaagggaatccatagacggaaaactcccaagcacagaccagcaggaatcgtgttcttccactccaggtttagaagaacctttattcaaagccacagaacagcatcacactcaacctgttttagagtccaacttgtgcccagactggccttctcattctgaagatgcgagtgctctgcagggcggaacttctgttgcccagattaaggcccagctgaaggaaatagaggctgagaaagtagagttagaattgaaagttagttctacaacaagtgagcttactaaaaaatcagaagaggtatttcagttacaagagcagataaataaacagggtttagaaatcgagagtctaaagacagtatcccatgaagctgaagtccatgccgaaagcctgcagcagaaattggaaagcagccaactacaaattgctggcctagaacatctaagagaattgcaacctaaactggatgaactgcaaaaactcataagcaaaaaggaagaagacgttagctacctttctggacaacttagtgagaaagaagcagctctcactaaaatacagacagagataatagaacaagaagatttaattaaggctctgcatacacagctagaaatgcaagccaaagagcatgatgagaggataaagcagctacaggtggaactttgtgaaatgaagcaaaaaccagaagagattggagaagaaagtagagcaaagcaacaaatacaaaggaaactgcaagctgcccttatttcccgaaaagaagcactaaaagaaaacaaaagtctccaagaggaattgtctttggccagaggtaccattgaacgtctcaccaagtctctggcagatgtggaaagccaagtttctgctcaaaataaagaaaaagatacggtcttaggaaggttagctcttcttcaagaagaaagagacaaactcattacagaaatggacaggtctttattggaaaatcagagtctcagcagctcctgtgaaagtctaaaactagctctagagggtcttactgaagacaaggaaaagttagtgaaggaaattgaatctttgaaatcttctaagattgcagaaagtactgagtggcaagagaaacacaaggagctacaaaaagagtatgaaattcttctgcagtcctatgagaatgttagtaatgaagcagaaaggattcagcatgtggtggaagctgtgaggcaagagaaacaagaactgtatggcaagttaagaagcacagaggcaaacaagaaggagacagaaaagcagttgcaggaagctgagcaagaaatggaggaaatgaaagaaaagatgagaaagtttgctaaatctaaacagcagaaaatcctagagctggaagaagagaatgaccggcttagggcagaggtgcaccctgcaggagatacagctaaagagtgtatggaaacacttctttcttccaatgccagcatgaaggaagaacttgaaagggtcaaaatggagtatgaaaccctttctaagaagtttcagtctttaatgtctgagaaagactctctaagtgaagaggttcaagatttaaagcatcagatagaaggtaatgtatctaaacaagctaacctagaggccaccgagaaacatgataaccaaacgaatgtcactgaagagggaacacagtctataccaggtgagactgaagagcaagactctctgagtatgagcacaagacctacatgttcagaatcggttccatcagcgaagagtgccaaccctgctgtaagtaaggatttcagctcacatgatgaaattaataactacctacagcagattgatcagctcaaagaaagaattgctggattagaggaggagaagcagaaaaacaaggaatttagccagactttagaaaatgagaaaaataccttactgagtcagatatcaacaaaggatggtgaactaaaaatgcttcaggaggaagtaaccaaaatgaacctgttaaatcagcaaatccaagaagaactctccagagttaccaaactaaaggagacagcagaagaagagaaagatgatttggaagagaggcttatgaatcaattagcagaacttaatggaagcattgggaattactgtcaggatgttacagatgcccaaataaaaaatgagctattggaatctgaaatgaagaaccttaaaaagtgtgtgagtgaattggaagaagaaaagcagcagttagtcaaggaaaaaactaaggtggaatcagaaatacgaaaggaatatttggagaaaatacaaggtgctcagaaagaacccggaaataaaagccatgcaaaggaacttcaggaactgttaaaagaaaaacaacaagaagtaaagcagctacagaaggactgcatcaggtatcaagagaaaattagtgctctggagagaactgttaaagctctagaatttgttcaaactgaatctcaaaaagatttggaaataaccaaagaaaatctggctcaagcagttgaacaccgcaaaaaggcacaagcagaattagctagcttcaaagtcctgctagatgacactcaaagtgaagcagcaagggtcctagcagacaatctcaagttgaaaaaggaacttcagtcaaataaagaatcagttaaaagccagatgaaacaaaaggatgaagatcttgagcgaagactggaacaggcagaagagaagcacctgaaagagaagaagaatatgcaagagaaactggatgctttgcgcagagaaaaagtccacttggaagagacaattggagagattcaggttactttgaacaagaaagacaaggaagttcagcaacttcaggaaaacttggacagtactgtgacccagcttgcagcctttactaagagcatgtcttccctccaggatgatcgtgacagggtgatagatgaagctaagaaatgggagaggaagtttagtgatgcgattcaaagcaaagaagaagaaattagactcaaagaagataattgcagtgttctaaaggatcaacttagacagatgtccatccatatggaagaattaaagattaacatttccaggcttgaacatgacaagcagatttgggagtccaaggcccagacagaggtccagcttcagcagaaggtctgtgatactctacagggggaaaacaaagaacttttgtcccagctagaagagacacgccacctataccacagttctcagaatgaattagctaagttggaatcagaacttaagagtctcaaagaccagttgactgatttaagtaactctttagaaaaatgtaaggaacaaaaaggaaacttggaagggatcataaggcagcaagaggctgatattcaaaattctaagttcagttatgaacaactggagactgatcttcaggcctccagagaactgaccagtaggctgcatgaagaaataaatatgaaagagcaaaagattataagcctgctttctggcaaggaagaggcaatccaagtagctattgctgaactgcgtcagcaacatgataaagaaattaaagagctggaaaacctgctgtcccaggaggaagaggagaatattgttttagaagaggagaacaaaaaggctgttgataaaaccaatcagcttatggaaacactgaaaaccatcaaaaaggaaaacattcagcaaaaggcacagttggattcctttgttaaatccatgtcttctctccaaaatgatcgagaccgcatagtgggtgactatcaacagctggaagagcgacatctctctataatcttggaaaaagaccaactcatccaagaggctgctgcagagaataataagcttaaagaagaaatacgaggcttgagaagtcatatggatgatctcaattctgagaatgccaagctagatgcagaactgatccaatatagagaagacctgaaccaagtgataacaataaaggacagccaacaaaagcagcttcttgaagttcaacttcagcaaaataaggagctggaaaataaatatgctaaattagaagaaaagctgaaggaatctgaggaagcaaatgaggatctgcggaggtcctttaatgccctacaagaagagaaacaagatttatctaaagagattgagagtttgaaagtatctatatcccagctaacaagacaagtaacagccttgcaagaagaaggtactttaggactctatcatgcccagttaaaagtaaaagaagaagaggtacacaggttaagtgctttgttttcctcctctcaaaagagaattgcagaactggaagaagaattggtttgtgttcaaaaggaagctgccaagaaggtaggtgaaattgaagataaactgaagaaagaattaaagcatcttcatcatgatgcagggataatgagaaatgaaactgaaacagcagaagagagagtggcagagctagcaagagatttggtggagatggaacagaaattactcatggtcaccaaagaaaataaaggtctcacagcacaaattcagtcttttggaaggtctatgagttccttgcaaaatagtagagatcatgccaatgaggaacttgatgaactgaaaaggaaatatgatgccagtctgaaggaattggcacagttgaaagaacagggactcttaaacagagagagagatgctcttctttctgaaaccgccttttcaatgaactccactgaggagaatagcttgtctcaccttgagaaacttaaccaacagctcctatccaaagatgagcaattgcttcacttgtcctcacaactagaagattcttataaccaagtgcagtccttttccaaggctatggccagtctgcagaatgagagagatcacctgtggaatgagctggagaaatttcgaaagtcagaggaagggaagcagaggtctgcagctcagccttccaccagcccagctgaagtacagagtttaaaaaaagctatgtcttcactccaaaatgacagagacagactactgaaggaattgaagaatctgcagcagcaatacttacagattaatcaagagatcactgagttacatccactgaaggctcaacttcaggagtatcaagataagacaaaagcatttcagattatgcaagaagagctcaggcaggaaaacctctcctggcagcatgagctgcatcagctcaggatggagaagagttcctgggaaatacatgagaggagaatgaaggaacagtaccttatggctatctcagataaagatcagcagctcagtcatctgcagaatcttataagggaattgaggtcttcttcctcccagactcagcctctcaaagtgcaataccaaagacaggcatccccagagacatcagcttccccagatgggtcacaaaatctggtttatgagacagaacttctcaggacccagctcaatgacagcttaaaggaaattcaccaaaaggagttaagaattcagcaactgaacagcaacttctctcagctactggaagagaaaaacaccctttccattcagctctgcgataccagtcagagtcttcgtgagaaccagcagcactatggtgaccttttaaatcactgtgcagtcttggagaagcaggttcaagagctgcaggcggggccactaaatatagatgttgctccaggagctccccaggaaaagaatggagttcacagaaagagtgaccctgaggaactaagggaaccgcagcaaagcttttctgaagctcagcagcagctatgcaacaccagacaggaagtgaatgaattaaggaagctgctggaagaagaacgagaccaaagagtggctgctgagaatgctctctctgtggccgaggagcagatcagacggttagagcacagtgaatgggactcttcccggactcctatcattggctcctgtggcactcaggagcaggcactgttaatagatcttacaagcaacagttgtcgaaggacccggagtggcgttggatggaagcgagtcctgcgttcactctgtcattcacggacccgagtgccacttctagcagccatctactttctaatgattcatgtcctgctcattctgtgttttacgggccatctatagacttagttgttactctttggaccactcccctcaaaacttggaattctctcacctctaacatcagaacatcaattccagtggaacagtcttcccatttacaggtcttctctccaactcttcacggaaagtgcctgcaaaaacagaggtggatacgaggacaggttggagctgcagggactggcgagtctgctttcttctactgccctgagcctgaacgcttctgcttaatctgagaatcacatttggtttgttgagcctaatatttgttgagattttgcaggaccctgatcttttgtggtcctgtaaaagatactgaggaatgtctttcagccaagccaagaggatggtttcaataaacctaataatctgaagttcagtatcattttgattgataactttctttgccttgtttgcctgtattttctcctgtttcagggggaaggtggctctgccataaacagagttcagggaaatgaacatgtcacctcataggacatctgatttaggtctcttgcagaatagggtggtgaaagctgaaggaactccctaggggttttagctgttagatcacatgggaggacagcatcttcttccctgccaatttcagatataattggagggagaatttcaggtcttagactataaggatagaatccctttgcttttgcccttgatcacatgtatactaaggtattaagtggcccaagtctttcctttcaccaaagggcagggagaagtgtctatggacagcagggttccaattcttgtcattccaggaatatctgaatattcctggaatgtggaccctgagacagtgctcaggggccactgggagccaatattaggcattgactctcagccaggagtctgactggtctaacaccacactgcaactcctgacctcttgaagtactaagctactttgctgttagtgacagttattacagtttctcagccccattgtctctgccctctgtggcaatggaaggagaatatagagaagacaaaattaaatatagatagacctgagaaggacagccaggatagaattccatttgtgcctattccctgcctcccctcccctcccccatcctaccagttggttattttctcattgcatacgtgatgtgttcactgcctagcctctccctaaagaagagagaagacaagtgggctgactgatctgctctaaatctactgtggtgattaaatcttggttacaacatcctgggaagtttcctgaacaactgtaaaataataaaattattttcagaatgaa

SEQ ID NO: 774 - DNA, 1394 bp, Homo sapiens
ccctggaggcggggacctcgcgtgaggaccagacctccctccgcgccccgcactgcgcgcgccctcccaggctcgggggtccccgcgtcccaggcccagggggatgggggtcgcgagaggcccggggagccggggccagcatcccccgccccggcagcaggaagtctgtgcggaggggccgcgcgcgcgcctccatcccgccccgcctggcctgggagcctccctgcccttcgctatcctgacgctggtgaacgccccgtacaagcgaggattttactgcggggatgactccatccggtacccctaccgtccagataccatcacccacgggctcatggctggggtcaccatcacggccaccgtcatccttgtctcggccggggaagcctacctggtgtacacagaccggctctattctcgctcggacttcaacaactacgtggctgctgtatacaaggtgctggggaccttcctgtttggggctgccgtgagccagtctctgacagacctggccaagtacatgattgggcgtctgaggcccaacttcctagccgtctgcgaccccgactggagccgggtcaactgctcggtctatgtgcagctggagaaggtgtgcaggggaaaccctgctgatgtcaccgaggccaggttgtctttctactcgggacactcttcctttgggatgtactgcatggtgttcttggcgctgtatgtgcaggcacgactctgttggaagtgggcacggctgctgcgacccacagtccagttcttcctggtggcctttgccctctacgtgggctacacccgcgtgtctgattacaaacaccactggagcgatgtccttgttggcctcctgcagggggcactggtggctgccctcactgtctgctacatctcagacttcttcaaagcccgacccccacagcactgtctgaaggaggaggagctggaacggaagcccagcctgtcactgacgttgaccctgggcgaggctgaccacaaccactatggatacccgcactcctcctcctgaggccggaccccgcccaggcagggagctgctgtgagtccagctgaggcccacccaggtggtccctccagccctggttaggcactgagggctctggacgggctccaggaaccctgggctgatgggagcagtgagcgggctccgctgccccctgccctgcactggaccaggagtctggagatgcctgggtagccctcagcatttggaggggaacctgttcccgtcggtccccaaatatccccttctttttatggggttaaggaagggaccgagagatcagatagttgctgttttgtaaaatgtaatgtatatgtggtttttagtaaaatagggcacctgtttcacaaaaaaaaaaaaaaaaaaa

SEQ ID NO: 775 - DNA, 3018 bp, Homo sapiens
ggggaggggtgtgacgtacatccggcgagtagctggcggtcccgggtgctgctggttagtgtgctctgagggagggtccgagccagccgctgttttgccggaggagcccctcaggccgtagtaagcattaataatgtctttcatctttgagtggatctacaatggcttcagcagtgtgctccagttcctaggactgtacaagaaatctggaaaacttgtattcttaggtttggataatgcaggcaaaaccactcttcttcacatgctcaaagatgacagattgggccaacatgttccaacactacatccgacatcagaagagctaacaattgctggaatgacctttacaacttttgatcttggtgggcacgagcaagcacgtcgcgtttggaaaaattatctcccagcaattaatgggattgtctttctggtggactgtgcagatcattctcgcctcgtggaatccaaagttgagcttaatgctttaatgactgatgaaacaatatccaatgtgccaatccttatcttgggtaacaaaattgacagaacagatgcaatcagtgaagaaaaactccgtgagatatttgggctttatggacagaccacaggaaaggggaatgtgaccctgaaggagctgaatgctcgccccatggaagtgttcatgtgcagtgtgctcaagaggcaaggttacggcgagggtttccgctggctctcccagtatattgactgatgtttggacggtgaaaataaaagagttttacttctctggactgatcctattcacagcttcctcatgaacttttctaatagaacaaggaaagctctccaaccatgtctggcgttgagaagccaagagtctctgtcaactctctcattgcccagtggtgacatgtgctcttctccacactgttgggaggtaatgctgccccacgtgctggtgcaggtcagtatcctgggacttggaagctggcaggatttgccgggtaaagctgtatgccatcatggggcacctgaaaagaaaaacacgtctcaccactgtggttgattcaaaagaaagtgattctattttttaaagaaagcgttgttaatgtaattggtatccctcctaactttttgagttcacaatttacttggtccagagttttctattcttttttttttttaaactaatgaatgacatttagatacttcataaaattatgaacagatatggaggccagagctcatttgggtaaacttactcctgctgagttagcaggttggtgagagaagctcccctgagctcacctgtctctctgactgccttggagtaggtggcataaccttgtgcacagagaactagaaaaggggcagaaccccggccttgcagttgtggcaggtttccactgtggtaagctaggttcattcctcatcaaggaatgtgtagcagattgttcactgtggaggagttaattatagaatgggttattgttgttattcttactcatgaagttacagattttagccagtctttgcttttatacttttgtgaaatttaatttctctctatagcaccttcctttttcgttttcagttatcaaaagtgactttgacctcataaaagagttgagaacatctctcgtgtcacatactgcaggtgcatcagttacttttgcacagattctagggggacatttttctgaataggaagacaggacaaagttaacagcttaagggctcttaattctgtgagttgaggacttaaaagtattgtagcatttgtttggatccatgaaaaatgtattcagtgggctttaaaatttccatttgcagaatttggtctctcaggctgtttgggagctcttttttttacattttttctcctttgacacctattttattggtgtttaaagtaaaggttaacatctgtagcttttccaggtttttttttttttttttttttttttggtatgaaattgtctttctccattgcagaaataagctagggaaacactaacccaaaaactttctgtagagctgttcctttggaggcagcatcacttattggcagtaaagactcagtataaaagcaccggcatccctacttgggtgatggggattaattttatagcattccattttcctagtgccacatgtgaaattggattttgatgatcttaatctatattctacccttataataaaagatcaaaagatatatctcctatgaacagattggagataggagatgaaaagttgggaggatgtctttattctaatgtgagggtagggaaaatgtggataacattactggggtgagggaggcattgttctttagttggagttctcattcttattctccagtactgacttgtggggaaagcatactttttcactgccaggtactgaatgcagaggctcagtgaagtatatatgtgggaagtgcatgcatttcgtttattagcaaacatagctggattaagacaaagttgttggtttggaaaggggttaaagccttaagtgaacaaatctagctaacagtgaatgaactaggtaatataacttgcatatttttaatttcctttggttaaaggtcccccatacttctctgttcggagacatgagaagtatgattacttcagtgttagttttcttaattttttttttcccctatttgtcccttgtcactttgttgcaagctagaaatctgtgggttatacatagggcagctctttgtgaaagtggtttattccactggagaaaggggattgaaaatcagttagaaccaatgtatttcttgccccacggaacactattcctataagatagctgaaagaagctgctgtgaggagctcagctccaaacacaggatcagcaccttgtataggaattcccatgaattatgacttctcattctgttttatcagagtgcatatatgtcctacttcaggaaaagtaaaacagtcatttacgaaagaaagtcaatctgtatcctaagcattttaataaaaagttaaaacaaaaaaaaaaaaaaaaaaa

SEQ ID NO: 776 - DNA, 1370 bp, Homo sapiens
cacggccggtctgtgccggctgctcccgcggttaggtcccgccccgcgcagcgcgcgcagcctgcggagccagcggccgtgacgcgacaacgattcggctgtgacgcgacaacgattcggctgtgacgcgagcgcggccgctcccgatgcgctcgtgccgcccccgccgtgctcctcggcagccgttgctcggccggttttggtaggcccgggccgccgccaggcctccgcctgagcccgcacccgccatggacaactacgcagatctttcggataccgagctgaccaccttgctgcgccggtacaacatcccgcacgggcctgtagtaggatcaactcgtaggctttacgagaagaagatcttcgagtacgagacccagaggcggcggctctcgccccccagctcgtccgccgcctcctcttatagcttctctgacttgaattcgactagaggggatgcagatatgtatgatcttcccaagaaagaggacgctttactctaccagagcaagggctacaatgacgactactatgaagagagctacttcaccaccaggacttatggggagcccgagtctgccggcccgtccagggctgtccgccagtcagtgacttcattcccagatgctgacgctttccatcaccaggtgcatgatgacgatcttttgtcttcttctgaagaggagtgcaaggatagggaacgccccatgtacggccgggacagtgcctaccagagcatcacgcactaccgccctgtttcagcctccaggagctccctggacctgtcctattatcctacttcctcctccacctcttttatgtcctcctcatcatcttcctcttcatggctcacccgccgtgccatccggcctgaaaaccgtgctcctggggctgggctgggccaggatcgccaggtcccgctctggggccagctgctgcttttcctggtctttgtgatcgtcctcttcttcatttaccacttcatgcaggctgaagaaggcaaccccttctagagggagccatgagggtctgggcttcagagctaggtctttggggaagtcctggctgactgccttagcagtgggggtgggggtgggggcaggggcaggggctttatgtgtttttgcttggggggcgctgggcctagcccagagtagtgcttgctccccctgccttgtcccaccagggaggcagcagactcaggccctccatggtcctctttgtcattttgttgacatgcattcctccttttgtcatcttgttggggggaggggattaaccaaaggccaccctgactttgtttttgtggacacacaataaaagccccgtttatttgtaaaaaaaaaaaaaaaaaaaaaaaaaaaaaaaaa

SEQ ID NO: 777 - DNA, 3359 bp, Homo sapiens
cgcctggaaacccgggggccgggcccccagagggctttcgcagcctggccgcccgaagctcacctgccctttcactgaactccacccggaaggtgcccggggcttcgtgttcctgggtgctgaccgtgcactccccgccgcccgaggacttagagctctggaagtagctctccagcttccttcgtactcgggggccggacttgtacacccgcacgaggagcggggacggcgggcgcagaagtgggccaccatatctggaaactacagtctatgctttgaagcgcaaaagggaataaacatttaaagactcccccggggacctggaggatggacttttccatggtggccggagcagcagcttacaatgaaaaatcaggtaggattacctcgctctcactcttgtttcagaaagtctttgctcagatctttcctcagtggagaaaggggaatacagaagaatgtctcccctacaagtgctcagagactggtgctcttggagaaaactatagttggcaaattcccattaaccacaatgacttcaaaattttaaaaaataatgagcgtcagctgtgtgaagtcctccagaataagtttggctgtatctctaccctggtctctccagttcaggaaggcaacagcaaatctctgcaagtgttcagaaaaatgctgactcctaggatagagttatcagtctggaaagatgacctcaccacacatgctgttgatgctgtggtgaatgcagccaatgaagatcttctgcatgggggaggcctggccctggccctggtaaaagctggtggatttgaaatccaagaagagagcaaacagtttgttgccagatatggtaaagtgtcagctggtgagatagctgtcacgggagcagggaggcttccctgcaaacagatcatccatgctgttgggcctcggtggatggaatgggataaacagggatgtactggaaagctgcagagggccattgtaagtattctgaattatgtcatctataaaaatactcacattaagacagtagcaattccagccttgagctctgggatttttcagttccctctgaatttgtgtacaaagactattgtagagactatccgggttagtttgcaagggaagccaatgatgagtaatttgaaagaaattcacctggtgagcaatgaggaccctactgttgctgcctttaaagctgcttcagaattcatcctagggaagagtgagctgggacaagaaaccaccccttctttcaatgcaatggtcgtgaacaacctgaccctccagattgtccagggccacattgaatggcagacggcagatgtaattgttaattctgtaaacccacatgatattacagttggacctgtggcaaagtcaattctacaacaagcaggagttgaaatgaaatcggaatttcttgccacaaaggctaaacagtttcaacggtcccagttggtactggtcacaaaaggatttaacttgttctgtaaatatatataccatgtactgtggcattcagaatttcctaaacctcagatattaaaacatgcaatgaaggagtgtttggaaaaatgcattgagcaaaatataacttccatttcctttcctgcccttgggactggaaacatggaaataaagaaggaaacagcagcagagattttgtttgatgaagttttaacatttgccaaagaccatgtaaaacaccagttaactgtaaaatttgtgatctttccaacagatttggagatatataaggctttcagttctgaaatggcaaagaggtccaagatgctgagtttgaacaattacagtgtcccccagtcaaccagagaggagaaaagagaaaatgggcttgaagctagatctcctgccatcaatctgatgggattcaacgtggaagagatgtatgaggcccacgcatggatccaaagaatcctgagtctccagaaccaccacatcattgagaataatcatattctgtaccttgggagaaaggaacatgacattttgtctcagcttcagaaaacttcaagtgtctccatcacagaaattatcagcccaggaaggacagagttagagattgaaggagcccgggctgacctcattgaggtggttatgaacattgaagatatgctttgtaaagtacaggaggaaatggcaaggaaaaaggagcgaggcctttggcgctcgttaggacagtggactattcagcaacaaaaaacccaagacgaaatgaaagaaaatatcatatttctgaaatgtcctgtgcctccaactcaagagcttctagatcaaaagaaacagtttgaaaaatgtggtttgcaggttctaaaggtggagaagatagacaatgaggtccttatggctgcctttcaaagaaagaagaaaatgatggaagaaaaactgcacaggcaacctgtgagccataggctgtttcagcaagtcccataccagttctgcaatgtggtatgcagagttggctttcaaagaatgtactcgacaccttgcgatccaaaatacggagctggcatatacttcaccaagaacctcaaaaacctggcagagaaggccaagaaaatctctgctgcagataagctgatctatgtgtttgaggctgaagtactcacaggcttcttctgccagggacatccgttaaatattgttcccccaccactgagtcctggagctatagatggtcatgacagtgtggttgacaatgtctccagccctgaaacctttgttatttttagtggcatgcaggctatacctcagtatttgtggacatgcacccaggaatatgtacagtcacaagattactcatcaggaccaatgagaccctttgcacagcatccttggaggggattcgcaagtggcagccctgttgattaatctctacatcattttaacagctggtatggccttaccttgggtgaactaaccaaataatgaccatcgatggctcaaagagtggcttgaatatatcccatgggttatctgtatggactgactgggttattgaaaggactagccacatactagcatcttagtgcctttatctgtctttatgtcttggggttggggtaggtagataccaaatgaaacactttcaggaccttccttcctcttgcagttgttctttaatctcctttactagaggagataaatattttgcatataatgaagaaatttttctagtatataacgcaggccttttattttctaaaatgatgatagtataaaaatgttaggataacagaatgattttagattttccagagaatattataaagtgctttaggtatgaaaataaatcatctttgtctgattaactggctctgaaaaaaaaaaaaaaaaaa

SEQ ID NO: 778 - DNA, 2508 bp, Homo sapiens
atttccggctcctcccggaagtgccgaagctggctactaagggaacttgggaggatcccacctcagccttcgtgactagtgaggtgcgcaaacgcccgagttttccctggtgcgcgggttccgcctttgcagtgccctccacccttcctggtgtctgacccgcctccttcccaggccttttgttcctgtcccggaaagccggcgtcctgccgcgcgatgcccctgctcggacttcttcccaggagggcctgggcttcgctgctcagccagctcctgcgaccgccctgcgcttcgtgcaccggggcggtccgttgccaaagccaggttgcagaggcagtgttaacatcccaactgaaagcacatcaagagaaaccaaattttattatcaagaccccaaagggtaccagggatcttagtcctcagcatatggttgtgagggagaaaattcttgatttggttatcagctgctttaaacgtcatggagcaaaggggatggacaccccagcatttgagctgaaggaaaccctgactgagaagtatggagaggactctgggctcatgtatgatctgaaggatcaaggtggagagctgttgtccctccgctatgaccttactgttccctttgctcgttatctggccatgaataaggtgaagaagatgaaacgttatcatgttggaaaggtgtggcggcgagagagcccaaccatagtccaaggccgttatagggagttctgccagtgtgattttgacattgctggtcagtttgaccctatgatccccgatgcagagtgtttgaagatcatgtgtgaaatcctaagtggattgcagttgggagactttctcattaaggtaaatgaccggcggattgtggatgggatgtttgctgtctgtggtgttcctgaaagcaagttccgtgccatctgctcctccatagataaactagacaagatggcttggaaagatgtgagacatgagatggtggtgaagaaaggcctggctcctgaggtggctgatcgaattggggactatgtccagtgtcatggtggggtatccctagtagagcaaatgtttcaggatcccagactatcccagaacaagcaggccctggagggcctgggagacctaaagctgctatttgaatacctgactttatttggaattgctgataagatctcctttgacctcagcctggctcggggcctagactactatacaggagtgatctatgaagcagtgctgctgcagaccccaactcaggctggggaggagcccctgaatgtgggcagtgtggctgctggtgggcgctatgatgggctggtgggcatgtttgaccccaagggccacaaggtgccatgtgtgggactcagcattggggttgagcgaatcttctacattgtggagcagaggatgaagaccaaaggtgagaaggtgcggactacagagactcaagtgtttgtggccacaccacagaagaactttctccaagaacggttgaagcttattgcagagctttgggattctggaatcaaggcagagatgctatacaagaacaaccccaaactattaacccagctgcactattgtgagagcacaggcattccactggtggtcattattggtgagcaagaactgaaagaaggggtcatcaagatccgttcagtggccagcagagaggaggtggccattaaacgggaaaattttgtggctgaaattcagaagcgactgtctgagtcttgatccttgcctgattcccatctgctgctctttgtagaaaaggtttcctctagaactgaattcctctggaattgagtgatggacttcacaacaactagccaggaagggtgacaagtaccttctgcctcctccattcttcctgggtgcagaactgtagaagaccctgaggactcctgggctagtgtgagcagctattctgcatgggtgcagatggctggatgtgaaagagacatgctctagctgcagaggcaaatttgaagtgccacggaacgttgtcaagaggtagtgagattgttgctgtgagcaaggctctgggagagtcacctcaggctcaggattctgaaccattgagatcagaaaccagatacttagccttctactgtagctacggaaccagattctggtgaatttgtccacaatcagccattggcctgtctggggagtttttggaagacagcaaagaggggcaatggctgctttcagctttgaggacagatgctatcctaagggcatggcagtacccatgttgatttgacatctctctagcccatccattgcttacagtagaagagtggggctgtatgcttgataatcttgaacattgaacttaatagatgacttgacaaggtagagatctgatattttgagattttggagaccatttcctgtgccagaatcactgctctattccataccgtgccatggaggctgttttagaagtggttggataacatgttaaataaaatattaagtgtaaaaaaaaaaaaaaaaaaa

SEQ ID NO: 779 - DNA, 1650 bp, Homo sapiens
gccttttttgcagtctcaggacgggcgctttggagccggccccaggcagcgtgtgtcggtcgcctagtctggagaactagtcctcgactcacggtgagggaatggaccgacacgggtattgtaccgctgagggaaaggagcgggactccggacctccaggagtgcaaggatgatgctgaaaggaataacaaggcttatctctaggatccataagttggaccctgggcgttttttacacatggggacccaggctcgccaaagcattgctgctcacctagataaccaggttccagttgagagtccgagagctatttcccgcaccaatgagaatgacccggccaagcatggggatcagcacgagggtcagcactacaacatctccccccaggatttggagactgtatttccccatggccttcctcctcgctttgtgatgcaggtgaagacattcagtgaagcttgcctgatggtaaggaaaccagccctagaacttctgcattacctgaaaaacaccagttttgcttatccagctatacgatatcttctgtatggagagaagggaacaggaaaaaccctaagtctttgccatgttattcatttctgtgcaaaacaggactggctgatactacatattccagatgctcatctttgggtgaaaaattgtcgggatcttctgcagtccagctacaacaaacagcgctttgatcaacctttagaggcttcaacctggctgaagaatttcaaaactacaaatgagcgcttcctgaaccagataaaagttcaagagaagtatgtctggaataagagagaaagcactgagaaagggagtcctctgggagaagtggttgaacagggcataacacgggtgaggaacgccacagatgcagttggaattgtgctgaaagagctaaagaggcaaagttctttgggtatgtttcacctcctagtggccgtggatggaatcaatgctctttggggaagaaccactctgaaaagagaagataaaagcccgattgcccccgaggaattagcacttgttcacaacttgaggaaaatgatgaaaaatgattggcatggaggcgccattgtgtcggctttgagccagactgggtctctctttaagccccggaaagcctatctgccccaggagttgctgggaaaggaaggatttgatgccctggatccctttattcccatcctggtttccaactataacccaaaggaatttgaaagttgtattcagtattatttggaaaacaattggcttcaacatgagaaagctcctacagaagaagggaaaaaagagctgctgttcctaagtaacgcgaacccctcgctgctggagcggcactgtgcctacctctaagccaagatcacagcatgtgaggaagacagtggacatctgctttatgctggacccagtaagatgaggaagtcgggcagtacacaggaagaggagccaggcccttgtacctatgggattggacaggactgcagttggctctggacctgcattaaaatgggtttcactgtgaatgcgtgacaataagatattcccttgttcctaaaactttatatcagtttattggatgtggtttttcacatttaagataattatggctcttttcctaaaaaataaaatatctttct

SEQ ID NO: 780 - DNA, 5989 bp, Homo sapiens
gcgtcccgggtccccgcgccgcgccgcgacctgcagaccccgccgccgcgctcgggcccgtctcccacgcccccgccgccccgcgcgcccaactccgccggccgccccgccccgccccgcgcgctccagacccccggggcggctgccgggagagatgctggaagaaacttcttaaatgaccgcgtctggctggccgtggagcctttctgggttggggagaggaaaggaaagtggaaaaaacctgagaacttcctgatctctctcgctgtgagacatgtctgagactcctgctcagtgtagcattaagcaggaacgaatttcatatacacctccagagagcccagtgccgagttacgcttcctcgacgccacttcatgttccagtgcctcgagcgctcaggatggaggaagactcgatccgcctgcctgcgcacctgcgcttgcagccaatttactggagcagggatgacgtagcccagtggctcaagtgggctgaaaatgagttttctttaaggccaattgacagcaacacgtttgaaatgaatggcaaagctctcctgctgctgaccaaagaggactttcgctatcgatctcctcattcaggtgatgtgctctatgaactccttcagcatattctgaagcagaggaaacctcggattcttttttcaccattcttccaccctggaaactctatacacacacagccggaggtcatactgcatcagaaccatgaagaagataactgtgtccagaggacccccaggccatccgtggataatgtgcaccataaccctcccaccattgaactgttgcaccgctccaggtcacctatcacgacaaatcaccggccttctcctgaccccgagcagcggcccctccggtcccccctggacaacatgatccgccgcctctccccggctgagagagctcagggacccaggccgcaccaggagaacaaccaccaggagtcctaccctctgtcagtgtctcccatggagaataatcactgcccagcgtcctccgagtcccacccgaagccatccagcccccggcaggagagcacacgcgtgatccagctgatgcccagccccatcatgcaccctctgatcctgaacccccggcactccgtggatttcaaacagtccaggctctccgaggacgggctgcatagggaagggaagcccatcaacctctctcatcgggaagacctggcttacatgaaccacatcatggtctctgtctccccgcctgaagagcacgccatgcccattgggagaatagcagactgtagactgctttgggattacgtctatcagttgctttctgacagccggtacgaaaacttcatccgatgggaggacaaagaatccaaaatattccggatagtggatcccaacggactggctcgactgtggggaaaccataagaacagaacaaacatgacctatgagaaaatgtccagagccctgcgccactactacaaactaaacattatcaggaaggagccaggacaaaggcttttgttcaggtttatgaaaaccccagatgaaatcatgagtggccgaacagaccgtctggagcacctagagtcccaggagctggatgaacaaatataccaagaagatgaatgctgaaggaaccaacagtccacctcagcgggccagcagcccagggaacccctgcccaccaggattgctggaagtgtgacggagcaggcgggctgaggagagtggaaaaggaagcgacccagaaatggcagggacacttctcttgcagaccaagagggaccctggagcaccttagacaaactacccagcacaggcggggctggaattctggcggagggcatgagcctgggactccatgtcacgtttccttctgatttggaatctctccatctgtaattcctcaccctcacccttccaccgttgttagtatcatggtgtttttgtttttgtttttgttttaagaacctgcagtttgactcttcatcgttcatctaggggaagacatctgatgttgttttcctatggaaatatatatctattatatatatattttttgcaaatctcacaaagtgcggcaagcccagctggtcaggaaagagaatacttgcagaggggttcaggttcctctttttcctgccacgtggatcaggtctgttcctgttactgttgggtcttggctgaaaaaaaaaaatgcttttaaaaaagataaaatgaaaaggagagctctctttttctctctcttgctctgttcttcccttggtcccctctgtcctcccgccctgcctgcagttgagattcagatgccttctgacagagttcagcctcttggagagtcttggggattgttggcacctaaacagaatcagtgacccgggtgctttgtggccagcagcacagaatcaaacccgcatcccagcattgggccacccatctgagggaggccaaaatcatcacagatgctgctgtgctgcagacagatacatgctagtccagagagccgcccctgagatggctgtgagaaccatgtgtctaaggcgtaagataaggatggaaggctgtccaagttatttggaaggcctcggcagcttgggattagcttgggagcgcagcgctgcaaagtggaaaatatgaaaagaccacacaggcccagcagtccagaaactgggcaaaaatattctgcagtggggatttatttttccaaagcaggtaacagaggctagtgagaaagaaaagctcctctctgctccattccaaaggccatcttgtggtcagtttcatgccctcacctgatttttttttttttttttttttttcaattcctaaccttttttaaagtttcctggtctccactggacacagagctttggagacggaggatcccagagggcagtctcagttgcaatcagtgtgtgcccagcctgggcagacaggaaattcctcggatacattattttttctttctttcatagctgtgtctcagaaaggacccatttgtggctctttttcacctcaaaataagatcgatggtatcttgtaaaatgagggtagtgccacttcttagtatttttgaaagctgttttagattttttttttttttccttttctagccatctaaattgactcttccaatataggtctcagaaatccaatatttggagtacaatttcttttaatccagattacacctgccttacaaagcaccccctccttgttcccctctgtttcctctactcagttgggggagaaactcacagctcctccgggatacatatgtgccctcagcagcagctcccaggtgaagttaccagacccctgggcttctccccagctttttctgagttgagtcagacatgtagagtttgggtcacacaggcaagaggaattttccctcggccttactgacaaggacaccaacctagggtgcaaacagatggactatggttcaaggacactggaattgaggagctgatcaaggctctcttcagccttgctctgtccctgcctcttatcagagcacaggtagacacacgggcatagccagcccactcctactgtcacaggcgccccaccattcaaccttccgggaggtcagggaccttctatatgaggcgagtgggtctcagtctgcttgaatggtgatgagattctgctggatctcagcacgctgcaggtgtcttttgagagcattcagtaggacatggtgatccctatttcagcctctaagatgactggtattctatctgaaatgcagagattaagccaaatacctgatgtattgtgaaagccactgattttaagaatggagagaaagggattttttactgcatccctctgtatgaatatgaaatcagagaccagggcatgatgttgctaggattagagcctctcagtctggcctcttcacccaagtgcaagaactcagtctcttactgttcaaagaatcttaacagttgaattatggagggaaattcccttttgccccaagcatttctatatttaaagcaatatcccaggagaatatgttagacttaggatgataccttcagccacttgaagaagaaatagaaggcgctcattccaatatagtctttatttcccattcagatacaggttgagcatccctaatctgaacagttaaaacccccaaatgccccaaaatccaaaccttcctgaacgctatgacaccatgagtggaaaattccacacctaacaaacacatttgctttcttatggttcaatgtacacaaactgttttatatagaaaatgatttcaaatatcataaaattaccttcaggctatgtgtataaagtatatatgagccataaatgaattttgtgtttagactttgtgtccatccccaagatctctcattttatatatatatatatatatatatatatatatatatatatatatatatacacacacacacacatacacaaatattccaggatacaaaaaaaaacatttaaaaatccgagacccagaacacttctggtcccaagcatttcagataagggatatcaatctgtactaccaataaggatttcgtaattcccctaactgcaaatgtcctcttcatttgttctttatgagaaaacccgggtagtgccagcacctggatacagtatttacaccctgcagaccctaaagatttcagattcagttagcaaaccttgatgaagcacctgctggacactgagggacccaaagctcaatcagccataatccctgctttcagagtttatattgtacctgcctaatccacccggcgtgactcatttcaacactaagtactaggggtgttgtcaggagacaaatctgaagtcaggagaggaaaatgcaaaggagccctgccgtgtgatggatgtgcattctcacttgggtcttgaagttctcattcctacatctcaagctagccaggcagtctcctctctatcagaagaaagcactggtaattggctagactggctatgttgaaggtaacatgaactctaagatcttgacccagggcgacttggttttgcttaaggtggcatcaccaatgttccaaatcctttagggagatgagggtatccccacagaaaaagaggaataatagaccaatggattttctcctttcaccagtatgtttggaaccctctgatccaatgtcttttgatactgatctcttgtccaaatgagaatgtcgctttagctgaaattcaaatggctgtgacaatttaccgaaatgatgaagtaaccaccattcccacctttcactgcctaggctccaagtctgaatacatttttgaaataggaactcccttttgcaaaaaagaaacctgggtgtcagggaggtgaagtgacttgccctaggagcagacagcatgccaagaatggaattaggctcaggatccagcctgggctcaccctgtgtggctcattcccacccaggaaactgaagataaaagatttgggaaaacacaccaagaaaaaggggcagttttctttgcccaagcatttggtgctagttagaggctgttcactctctcctgctcctcttcggagtagaaataaaggctgtgacacaaggaagccagtggggtgggagggaggcaccataatccctccctaaaacccacagaagactaacctgatactcttttgacccaactgcatcaacactaaacagctgcagaccccctgaatctttcacacatgccaagtgaacattcttgatgatttctctttgtgaccgcaaccacctgcaaaccagaacgactctagaatttccttccccgcccccctttttgtttagtttctaatctcttgtttatgaggtgtggggtttataagggactgaatcaaatgaatgtaacaaaaaagaaaaaaaaaacaaaaaaaaatgccttttctcagggccagtgagttgcaaataatttttaaagaaaagcctataattacatcatctcaataaattttttataaaaaaaaaaaaa

SEQ ID NO: 781 - DNA, 930 bp, Homo sapiens; identical to SEQ ID NO: 227

SEQ ID NO: 782 - DNA, 2952 bp, Homo sapiens
cagaagtctttgggaggcggccccacgcctcaggcgactggttgttaccgaggaagatggcggcgccagacccgaggcgctagggaagatcgcaccgcggacgcccgctgagcttggcgcacgggccgaccaggagctggtgactgccctcatgtgtgatttgcggcggccagcggcaggtgggatgatggacttggcctacgtctgtgagtgggagaaatggtccaagagcacccactgcccatcggtgcccctggcctgcgcctggtcctgccgaaatctcatcgccttcaccatggacctgcgcagcgatgaccaggacctgacccgcatgatccacatcctggacacggagcacccctgggacctgcactcgatcccctcagagcaccacgaggccatcacctgcctggagtgggaccagtcaggctcccggctcctgtcagcagatgccgacgggcagatcaagtgctggagcatggcggaccacctggctaatagctgggagagctcagtgggcagcctagtggagggggaccccattgtggccctgtcctggctgcacaatggtgtgaaactggccctgcacgtggagaagtcgggcgcctccagcttcggggagaagttctcccgagtcaagttctcaccgtcgctcacgctgttcggcggcaagcccatggagggctggatcgcggtgacggtcagcggcctggtcaccgtgtccctgctgaagcccagcgggcaggtgctgacgtccaccgagagcctgtgccggctgcgcggccgcgtggccctggccgacatcgccttcaccggcggcggcaacatcgtggtggccacggcggacggcagcagcgcgtcgcccgtgcagttctacaaggtgtgcgtgagcgtggtgagcgagaagtgccgtatcgacacggagatcctgccctccctgttcatgcgctgcaccaccgacctcaaccgcaaggacaagtttcccgccatcacccacctcaagttcctggcccgggacatgtcggagcaggtgcttttgtgcgcgtccagccagaccagcagcatcgtggagtgctggtccctgcgcaaggagggactccccgtgaacaacatcttccagcagatctcccccgtggttggcgacaaacagcccacaattctcaaatggcggatcctatcggccaccaacgatctggaccgtgtgtcggccgtggcgctgcccaagctgcccatctcgctcaccaacaccgacctcaaggtggccagcgacacacagttctaccctggcctcgggctggccctggccttccacgacggcagcgtccacatcgtgcaccggctctcactgcagaccatggccgtcttctacagctccgcggccccgaggcctgtggatgagccggccatgaagcgcccccgcaccgcgggccccgccgtccacttaaaggctatgcagctatcgtggacgtcactggccctggtggggattgacagccacgggaagctgagcgtgctccgcctctcaccttccatgggccacccgctggaggtggggctggcgctgcggcacctgctcttcctgctggagtactgcatggtgaccggctacgactggtgggacatcctgctgcacgtgcagcccagtatggtacagagcctggtggagaagctgcacgaggagtacacgcgccagaccgctgccctgcagcaggtcctctccacccggatcctggccatgaaggcctcgctctgcaagctgtcgccctgcacggtgacccgcgtgtgcgactaccacaccaagctcttcctcatcgccatcagctccaccctgaagtcgctgctgcgcccccactttctcaacacgcctgacaagagccccggcgaccggctgaccgagatctgcaccaagatcaccgacgtcgacattgacaaggtcatgatcaacctcaagacggaggaatttgtgctggacatgaacacactgcaggcgctgcagcagctcttgcagtgggtgggcgacttcgtgctgtacctgctggccagcctacccaaccagggttccctgctgaggccgggccacagctttctgcgggacggcacctcgctgggcatgcttcgggaattgatggtggtcatccgcatctggggccttctgaagcccagctgcctgcccgtgtatacggccacctcggatacccaggacagcatgtccctgctcttccgcctgctcaccaagctctggatctgctgtcgcgatgagggcccagcgagcgagccggacgaggcgctggtggatgaatgctgcctgctgcccagccagctgcttatccccagcctggactggctgccagccagcgacggcctggttagccgcctgcagcccaagcagccccttcgtctgcagtttggccgggcgcccacgctgcctggcagtgctgccaccctgcagctcgacggcctcgccagggccccaggccagcccaagatcgaccacctgcggaggctgcaccttggcgcttgccccacggaggaatgcaaggcctgcaccaggtgcggctgtgtcaccatgctcaagtcgcccaacagaaccacggcggtgaagcagtgggagcagcgctggatcaagaactgcctggctgttgaaggccgtgggccggacgcctgcgtgaccagcagagcttctgaggaagcccctgcctttgtccagctgggcccgcagtccacacaccactctcccaggacccccagatccctggaccatctgcatccagaggaccgtccgtgacggccgggggtccaggcggaccttgtggtgacccggctcgggcgtctcctcggtttccttgcctcacccgcggagagcgctgaacctggacaagcagcggctgggaaggacaggtccaataaacgccctctgcgcccagaaaaaaaaaaaaaaaaaaaaaaaaaaaa

SEQ ID NO: 783 - DNA, 1456 bp, Homo sapiens
gacttcctctttccagtgcatttaaggcgcagcctggaagtgccagggagcactggaggccacccagtcatgggggacaccttcatccgtcacatcgccctgctgggctttgagaagcgcttcgtacccagccagcactatgtacatgttcctggtgaaatggcaggacctgtcggagaaggtggtctaccggcgcttcaccgagatctacgagttccataaaaccttaaaagaaatgttccctattgaggcaggggcgatcaatccagagaacaggatcatcccccacctcccagctcccaagtggtttgacgggcagcgggccgccgagaaccaccagggcacacttaccgagtactgcagcacgctcatgagcctgcccaccaagatctcccgctgtccccacctccttgacttcttcaaggtgcgccctgatgacctcaagctccccacagacaaccagacaaaaaagccagagacatacttgatgcccaaagatggcaagagtaccgcgacagacatcaccggccccatcatcctgcagacgtaccgcgccattgccgactacgagaagacctcgggctccgagatggctctgtccacgggggacgtggtggaggtcgtggagaagagcgagagcggttggtggttctgtcagatgaaagcaaagcgaggctggatcccagcatccttcctcgagcccctggacagtcctgacgagacggaagaccctgagcccaactatgcaggtgagccatacgtcgccatcaaggcctacactgctgtggagggggacgaggtgtccctgctcgagggtgaagctgttgaggtcattcacaagctcctggacggctggtgggtcatcaggaaagacgacgtcacaggctactttccgtccatgtacctgcaaaagtcggggcaagacgtgtcccaggcccaacgccagatcaagcggggggcgccgccccgcaggtcgtccatccgcaacgcgcacagcatccatcagcggtcgcggaagcgcctcagccaggacgcctatcgccgcaacagcgtccgttttctgcagcagcgacgccgccaggcgcggccgggaccgcagagccccgggagcccgctcgaggaggagcggcagacgcagcgctctaaaccgcagccggcggtgcccccgcggccgagcgccgacctcatcctgaaccgctgcagcgagagcaccaagcggaagctggcgtctgccgtctgaggctggagcgcagtccccagctagcgtctcggcccttgccgccccgtgcctgtacatacgtgttctatagagcctggcgtctggacgccgagggcagccccgacccctgtccagcgcggctcccgccaccctcaataaatgttgcttggagtggaccgaggctctgcaggaatgcagggagggccgggctccgccccagggttatttctaagttga

SEQ ID NO: 784 - DNA, 3261 bp, Homo sapiens
ggtggactcagggcggctagagcgacgcggcggcaggggtggggagagtgcggagcccgagcgcggaggcttcggttccggtggcggcgatggcttctctttccacctggagcagccctgcagagcccagggagatggaagacttcgcccgaggggcggcctccccaggcccctcccggcctggcctggttcccgtcagcatcatcggggctgaggatgaggattttgagaacgagctggagacaaactcagaagagcaaaacagccagttccagagcctggagcaggtgaagcggcgcccagcccacctcatggccctcctgcagcacgtggccctgcagtttgagccaggacccctgctttgctgtctgcatgccgacatgctgggctcactgggccccaaggaggccaagaaggccttcctggacttctaccacagcttcctggagaagacagcggttctccgggtgccggtccctcccaacgtcgcctttgaacttgaccgcactagggctgacctcatctccgaggatgtccagcggcggttcgtgcaggaggtggtgcaaagccagcaggtagccgtgggccggcagctggaggacttccgttccaagcggctcatgggcatgacgccctgggagcaggagctggcccagctggaggcttgggttgggcgggaccgagccagctacgaggcccgggagcggcacgtggcggagcggctgctcatgcacctggaggagatgcaacataccatctctaccgacgaagaaaagagtgctgccgtggtcaacgccattggcctgtacatgcgccaccttggggtgcggaccaagagtggagacaagaagtcggggaggaacttcttccggaaaaaggtgatggggaaccggcggtcggacgagcctgccaagaccaagaaggggctgagcagcatcctggatgccgcccgctggaaccggggagagccccaggttccagattttcgacacctcaaagcagaggttgatgccgagaagccaggtgctacagaccggaagggaggcgtggggatgccctctcgggaccggaatatcggggctcctgggcaggacacccctggagtctctctgcaccctctgtccctggacagcccagaccgggaaccaggtgctgacgcccccctggagctgggggactcatccccgcagggcccaatgagcctggagtccttggcgcccccagagagtaccgacgagggggccgaaaccgagagccccgagcctggagatgagggggagccggggcggtcgggactggagcttgaaccagaagagcctcccggctggcgggaactcgtccccccagacaccctgcacagcctgcccaagagccaggtgaagcggcaggaggtcatcagcgagctgctggtgacagaggcggcccacgtgcgcatgctgcgggtgctgcacgacctcttcttccagcccatggcagaatgcctgttcttccccttggaggagctgcagaacatcttccccagcctggacgagctcatcgaggtgcattccctgttcctcgatcgcctgatgaagcggaggcaggagagtggctacctcatcgaggagatcggagacgtgctgctggcccggtttgatggtgctgagggctcctggttccagaaaatctcctcccgcttctgcagccgccagtcatttgccttagagcagctcaaagccaagcaacgcaaggaccctcggttctgtgccttcgtgcaggaagctgagagccgcccgcggtgccgccgcctgcagctgaaggacatgatccccacggagatgcagcggctgaccaagtaccccctgctcctgcagagcatcgggcagaacacagaagagcccacagaacgggagaaagtggagctggcagccgagtgctgccgggaaattctacaccacgtcaaccaagccgtgcgtgacatggaggacctgctgaggctcaaggactatcagcggcgcctggacttgtcccaccttcggcagagcagcgaccctatgctgagcgagttcaagaacctggacatcaccaagaagaaattggtccacgagggcccactgacgtggcgggtgactaaggacaaggcagtggaggtgcatgtgctgctgctggacgacctgctgctgctgctccagcgccaggacgagcggctgctgctcaagtcccatagccggacactgacgcccacgcccgatggcaagaccatgctgcggcccgtgctgcggctcacctccgccatgacccgcgaggtggccaccgatcacaaagccttctacgtcctttttacctgggaccaggaggcccagatatacgagctggtggcacagactgtgtcggagcggaaaaactggtgtgctctcatcactgagactgccggatccctgaaagtccctgcccctgcctctcgccctaagccccggcccagcccgagcagcacccgagaacccctcctcagcagctctgagaacggcaatggtggccgagagacgtctccagctgatgcccggaccgagagaatcctcagtgacctcctgcccttctgcagaccaggccccgagggccagctcgctgccacggcccttcggaaagtgctgtccctgaagcagcttctgtttccggcggaggaagacaatggggcggggcctcctcgagatggggatggggtcccagggggcggccccctgagcccagcacggacccaggaaatccaggagaacctgctcagcttggaggagaccatgaagcagctggaggagttggaggaggaattttgccgcctgagacccctcctgtctcagcttggggggaactctgtcccccagcctggctgcacttgaggttcccgcccaggaaggccttttgcaagaaggagaggaatgggggagaggacgtgagggaccacccccacccacacagctgccgcagcatctcacaccccgagggcctgaggagagggagctgtgggccacgcctgggaggggcccagctggggttactggccccgcatgagcctcggccatctctccctcctgccctctgcttgggggactcagggctccattctggagggcaccacggtgacccgggccatctcagtattgcctgtgggggccacccctccacccccacccccaagtgccttcgctctgtttttataccctgaattggaggtttattttttaatatatattatctaagaagaaaaaaaaaaaaaaaaaaaaaaaa

SEQ ID NO: 785 - DNA, 3383 bp, Homo sapiens
gttgtgggcaggcgcctgaggctgacggctggcaagcagggcaccgcggtgcgctgaagctagagattccgaaagggggttcgggtagttcgctccggagaagtctgagaagggtggctccggtgatcccagccctagctgtttcccatattcctttatcgtgagtgtcaccccggtccccgtcacccaatcccagagccccgcccctcccctgaggggtccgtagtcccattccgagaccccagtaccgcggcgacccctgctccctcgagcacttgttgtgtgcactttagttatcaaaacagtctatgtggaaatccagtcccgctcttcattcggagagtccgcgattcctagagcctcagacttcgtcatcccggtctgcgtgactttatgagattctgagtttctgttcccagcacctgcctttgaaggagaccagactccggctccgcccggcccgtgccgggtggtctgcggccccgagtccgtgaccaagccctccgagtgatcggcctgccctcgggtgcacccgcgggtcccaacgtgggggatccctccatccgcaaagccagggtcctaaagatcgctctgggaaaagggaaggatgccgctcttcttccggaagcggaaacccagtgaggaggctcggaaacgcctggagtaccagatgtgtttggcaaaagaagctggggcagatgacattctcgacatctctaaatgtgagctctcagagattccatttggagcttttgcaacatgcaaagttctgcagaagaaggtgctgatcgtccacacgaatcacctcacttccctgcttcccaaatcctgcagcctcctgagtctggcaaccatcaaggttctagatctccacgataatcagctgacagcccttcctgacgatctggggcagctgactgccctccaggtcttaaacgtggaaaggaatcaactgatgcagctcccacgttccattgggaacctgacccagctccagactctcaatgttaaagacaacaagctgaaggagcttccagacaccgtgggggagcttcgaagcctgcgtaccctcaacatcagtggaaacgagatccagagattgccgcagatgctggctcacgttcgaaccctggagatgctgagccttgacgcctcggccatggtctacccgccgcgggaggtgtgtggtgccggcactgcggccatcttgcagttcctctgcaaagagtcagggctggaatactaccccccttctcagtacttgctgccaattctggagcaagatggaatcgagaactctcgggacagccctgatgggcccacggacagattctcaagggaggagttagagtggcagaacaggttctcagactatgagaagaggaaggaacagaagatgctggagaaactcgagtttgaacggcgcctggaactggggcagcgggagcacacccagctccttcagcagagcagcagccagaaggatgagatccttcagacggtcaaggaggagcagtcccggctggagcagggcctgagtgagcaccagcgccacctcaacgcagagcggcagcggctgcaggagcagctgaagcagacggaacagaacatttccagccggatccagaagctgctgcaggacaatcagagacaaaagaaaagctccgagattttgaaatcgctggaaaatgaaagaataagaatggaacagttgatgtccataacccaggaggagactgagagcctgcggcgacgtgacgttgcctccgccatgcagcagatgctgactgagagctgtaagaaccggctcatccagatggcctacgaatctcagaggcagaacttggtccagcaggcctgttccagcatggccgaaatggatgaacgattccagcagattctgtcgtggcagcaaatggatcagaacaaagccatcagccagatcctgcaggagagcgcgatgcagaaggctgcgttcgaggcactccaggtgaagaaagacctgatgcatcggcagatcaggagccagattaagttaatagaaactgagttattgcagctgacacagctggagttaaagaggaagtccctggacacagagtcactccaggagatgatctcggagcagcgctgggccctcagctccctgctccagcagctgctcaaagagaagcagcagcgagaggaagagctccgggaaatcctgacggagttagaagccaaaagtgaaaccaggcaggaaaattactggctgattcagtatcaacggcttttgaaccagaagcccttgtccttgaagctgcaagaagaggggatggagcgccagctggtggccctcctggaggagctgtcggctgagcactacctgcccatctttgcgcaccaccgcctctcactggacctgctgagccaaatgagcccaggggacctggccaaggtgggcgtctcagaagctggcctgcagcacgagatcctccggagagtccaggaactgctggatgcagccaggatccagccagagctgaaaccaccaatgggtgaggtcgtcacccctacggccccccaggagcctcctgagtctgtgaggccatccgctccccctgcagagctggaggtgcaggcctcagagtgtgtcgtgtgcctggaacgggaggcccagatgatcttcctcaactgtggccacgtctgctgctgccagcagtgctgccagccactgcgcacctgcccgctgtgccgccaggacatcgcccagcgcctccgcatctaccacagcagctgagtgctgcccgcccacctgggcctggtcctagccctgcctcggccactgtgagccccgggctcctgctcagccttgtgccagccagactcgtatgaggctcccccctgccctgggccccttccccactgcccaggagcccccatcctaagctccaagcatgtctgggccaggcagaggtgctcctcatccatgacaccaccagtctgaatggtcctgggggctggggctggagaggccgctgcaccaccacccgagcctgggagccagcgtcccagcctaatcacggatctgctgcctcccagctgtcttgactgaaggccaccgcccctgcaggagcttgggtcctcatctgggggccatgcacaggcccgtcccaccctgcatgtgggaagggagcaggagggcctggctgggtgaggggaggccttcctgggaaggcgtgtggtgcaggcctgtgctcacagtggcaccagcaaccctgggtctccctctctgctgctccccagaaccccggggccctcctgctctccacaactgtccctccttaccccatgtagctcgatccgaagcaggagtgtcaataaacctgtcttcagtgcgctaa

SEQ ID NO: 786 - DNA, 4266 bp, Homo sapiens
atttttaccactgctctccccttccccggtccccctggtgtcctttccacagttaaaggctactttctcttgaagcacatgaggagaagccttagcaacctcaataccgaagttcttcgcgcgctcgctctttctgcctccgcccgaactatgcctgagtccctcacaggagttggatagtagaggcgagagaaggaagtctttgcaggccaaaattgggacaacctgcttggacttccgcctcccggcctccggaaggcagtgcgcacgcgctcgctgcgactccggcgcggttgacttccgctcccactgtgctctgcgagccgaatcatggatcacactgacaatgagttacaaggcactaatagttctggatccttgggtggtcttgatgttcgcagacgaattcctataaagctcatctccaaacaagcaaacaaagcgaaacctgcaccgcgaactcaaagaactataaacaggatgcctgcaaaggctccacctggtgatgaagaaggatttgattataatgaagaagaacggtatgactgtaaagggggtgagctgtttgcaaatcagcgaagatttcctggacaccttttttgggactttcagataaacatcttaggtgaaaaggatgatacaccagttcatttctgtgacaagtgtggattgcctattaaaatctatgggagaatgattccatgcaagcatgttttttgctatgactgtgctattttacatgaaaaaaagggagataagatgtgtccaggctgtagtgatcctgtgcagcgaattgagcagtgtacacgaggttctctcttcatgtgtagcattgttcaagggtgcaagagaacatatttgtctcagagagacttacaggctcatatcaaccatcgccatatgagagctggaaaacctgttacccgtgcttcacttgaaaatgttcatcctcctattgccccaccaccaactgaaatccctgagcgttttataatgccaccagacaagcaccatatgagccatattccgccaaagcagcacatcatgatgccaccacctcctttgcaacatgtgccacatgagcactataatcagccacatgaggatattcgtgctcctccagcagaattgtccatggctccacctccacctcgatcggtcagtcaggaaacctttcgtatttcaacaagaaaacacagcaatttaataaccgtccctattcaggatgactcaaattcaggtgctagagaaccaccacctcctgccccagcacctgctcaccatcatcctgaatatcagggtcaaccagtggtatcgcaccctcatcatattatgcctccacagcaacattatgcaccacccccacctcctccaccaccaataagccatccaatgccacatcctccccaggctgcaggtactcctcacttggtatatagccaagctccacctccaccaatgacctctgctccaccaccaataacccctccccctggacatattattgcccagatgccaccttatatgaatcatcctcctccaggacctcccccacctcaacatggtggtccacctgtaactgcaccccctcctcaccattataatcctaactcattaccccagttcactgaagatcaaggaactctgagccctccatttacacaaccagggggaatgagtcctggtatatggcctgcaccaagagggccaccaccacctccacgattgcagggtccgccttctcaaaccccacttcctggaccacatcatccagatcagacaagatatagaccgtattaccaatgataatagtattttgaatggaagatatgagggggaaaaaaacttatgtgtagtcaatcttttaagctttgactgttttgggaaggaagagtacctcttatcgaggtagtataaaacacatagggtcttgtttcttaaaatggttttaaatcttgaccttaagattgatttcaagtaccatactgtagtacagataagtggctcagttgagcacagctatattttaacatctctttgttcccctagtttagtaaattgacccagaggtgaccatttgtaaaaaatttgaaaaaatttttcattgttttacttcaaaagtattgttttgttaaacccaacgtttagtttttcttgtgatacattttgttaacctgtgtaaaaggattaaatttcaatatggttgtaaaaatgctatttttatgtgaatttaagtgcagccacatactgttttttaaaccatatgttttaccactaatttcccaaagttataataaaatcctgaaagtaaaaatctactagaatttgctgtaaggcagactgttaaatgatagagaattatttcacattttaggcactgaaatgttgaggtttcgaggtatagtaagtatacaatgcacttcacttggatgccttttcatttttaggcagcctcaggagcaccaaaatacattggaattctagtactaagatatatttgttcgtaatgttaaaagacattactaattatttggaaagagatggccaaaataatcaactctacaggcttcaagctggtgggggaatgctgttactcattaatgcttttttactgaatggtcggaatcacatatgcaccacacatactgatcttaagtaacattattttatagaactgtttaaatgggtttaaatggtgttctttagatgaaatgtgttctgttttgttcattgtcttaaactgaatagggctgaataggctttatgtaattcttcatttcatggtagagtttgatgctgtgtttaagtgggttcttgtttataggattttcaactacagtttgaatgccatggaggaatttgaataatatattaatgaaggacatattcttgtaatcacaaatttgcatttgctcaggtttcattgctgtgtgataggatttttcctctaacttgaaatttaaaaacttttatttcctattccttttgtcggtaaagcagtctgaatttggaacattttatcatggagtcaacagtgaagactaccagataattttgtattggagaagaggaaataacagctaaattgtggatttcagtgctttacatggtgcctttcgagtcagcttttacattataggggcttgttatagtttagctaagatgaccacttaacagtttatacagaactcatatgtataaatcaacattcttaggatattatttatatcctttgaataaatccctgtgaagtttttcctccccactaaaatggtgcataataaaacatgaaatatgtagtatgcagatatcatttattagatagtttgtagtgtatacatttagaacatacttcttttgacaaagggtgatctgattgctaatttaccattttattctgtcaggtacaggtgaaacaaattctcatcttgaatgatcagatgcaaaatcatttctgaaccctagagcagaagttagaaataacaaaatggccgtttcaaccttgactggccaaaaataactaataaacttttttgttttaagtcaggcaagtgattttctacatttagcagtttgaaagtccagtgttaatgcaatatttctagtgagaaatgcttgttattaaaagcatgggagtgatagtgtgaaatggtggtgagtgcttctatcatattactgtaggtacttggactggtgcaaacttgattccttttcatccccctgtttaggagctattaaaatattactgttaaaaatccaaaccattctttgttccatgtaataagaaaatagccaaaatcactttagagcttctcaactatttatgaagagctatcctgcttttattgaaagtcactagagttgaatgtggtaagaaaccacttagcctatgtattggacgagaaaatcagtatcatgataaaattttgaattaagagaacccttgtagagtttttaaaaaatgatttattttcaattaggtttaagaaatctatgttatgcagggaggcatatcagatgaatgttgtagcagacaaaagttttaaatcgtgttagacttgaattcatcaattgtttgaatgagggtgggtgggtagaaggataacaaaattactgttagtgtttctttccttacggaaaaagatgtgaatcccagccttatttcagggaagcctttgaagctatgatggacataagtctaaattaaatgtatgtatgtttcattatattgctcttaagactactgaggtggcagtttaattctta

SEQ ID NO: 787 - DNA, 2100 bp, Homo sapiens
ctgcccatccgtcccgccccctagacgcacgtccgctcgcccggcgcccgagccagtccgcgcgcacgccgtctgcgccccgaaagccccgccccaaggcgcgcccgcccaccgctctccacgtgctcgctggagggcggtgcgaggggccgagccgacaagatgttcttgctgcctcttccggctgcggggcgagtagtcgtccgacgtctggccgtgagacgtttcgggagccggagtctctccaccgcagacatgacgaagggccttgttttaggaatctattccaaagaaaaagaagatgatgtgccacagttcacaagtgcaggagagaattttgataaattgttagctggaaagctgagagagactttgaacatatctggaccacctctgaaggcagggaagactcgaaccttttatggtctgcatcaggacttccccagcgtggtgctagttggcctcggcaaaaaggcagctggaatcgacgaacaggaaaactggcatgaaggcaaagaaaacatcagagctgctgttgcagcggggtgcaggcagattcaagacctggagctctcgtctgtggaggtggatccctgtggagacgctcaggctgctgcggagggagcggtgcttggtctctatgaatacgatgacctaaagcaaaaaaagaagatggctgtgtcggcaaagctctatggaagtggggatcaggaggcctggcagaaaggagtcctgtttgcttctgggcagaacttggcacgccaattgatggagacgccagccaatgagatgacgccaaccagatttgctgaaattattgagaagaatctcaaaagtgctagtagtaaaaccgaggtccatatcagacccaagtcttggattgaggaacaggcaatgggatcattcctcagtgtggccaaaggatctgacgagcccccagtcttcttggaaattcactacaaaggcagccccaatgcaaacgaaccacccctggtgtttgttgggaaaggaattacctttgacagtggtggtatctccatcaaggcttctgcaaatatggacctcatgagggctgacatgggaggagctgcaactatatgctcagccatcgtgtctgctgcaaagcttaatttgcccattaatattataggtctggcccctctttgtgaaaatatgcccagcggcaaggccaacaagccgggggatgttgttagagccaaaaacgggaagaccatccaggttgataacactgatgctgaggggaggctcatactggctgatgcgctctgttacgcacacacgtttaacccgaaggtcatcctcaatgccgccaccttaacaggtgccatggatgtagctttgggatcaggtgccactggggtctttaccaattcatcctggctctggaacaaactcttcgaggccagcattgaaacaggggaccgtgtctggaggatgcctctcttcgaacattatacaagacaggttgtagattgccagcttgctgatgttaacaacattggaaaatacagatctgcaggagcatgtacagctgcagcattcctgaaagaattcgtaactcatcctaagtgggcacatttagacatagcaggcgtgatgaccaacaaagatgaagttccctatctacggaaaggcatgactgggaggcccacaaggactctcattgagttcttacttcgtttcagtcaagacaatgcttagttcagatactcaaaaatgtcttcactctgtcttaaattggacagttgaacttaaaaggtttttgaataaatggatgaaaatcttttaacggagacaaaggatggtatttaaaaatgtagaacacaatgaaatttgtatgccttgatttttttttcatttcacacaaagatttataaaggtaaagttaatatcttacttgataaggatttttaagatactctataaatgattaaaatttttagaacttcctaatcacttttcagagtatatgtttttcattgagaagcaaaattgtaactcagatttgtgatgctaggaacatgagcaaactgaaaattactatgcacttgtcagaaacaataaatgcaacttgttgtg

SEQ ID NO: 788 - DNA, 4040 bp, Homo sapiens
actttgggtttcgaaatgttcgctggctgttccgagaatcagtccgggtcacgttggtgcctctcctttcctgttctgattggttgcttacgtgagcgtgactactttcttgcctcatgattggctgaaatcagtagcgtcatcggcggccgggagggcggagggacgagggaagtcggcgagagggagactgggttgggggaggggttcaggcctgttccccgcggctgcggcagcaccagggccggccgccaccgcctctagaacgcggaggaggtgggtcctgggaagcgggatgtccatcgctccagcttggtggtgaatgctgaggagagtcactgttgctgcagtctgtgccacccggaggaagttgtgtgaggccgggcgggagctcgcggcgctctggggaatcgaaacgcggggtcggtgcgaagactctgctgctgccagaccctttcctattctggccatgcctggaaggaacaaggcgaagtctacctgcagctgccctgacctgcagcccaatggacaggatctgggcgagaacagccgggttgcccgtctaggagcggatgaatctgaggaagagggacggagggggtctctcagtaatgctggggaccctgagatcgtcaagtctcccagcgaccccaagcaataccgatacatcaaattacagaatggcttgcaggcacttctgatttcagacctaagtaatatggaaggtaaaacaggaaatacaacagatgatgaagaagaagaggaggtggaggaagaagaagaagatgatgatgaagattctggagctgaaatagaagatgacgatgaagagggttttgatgatgaagatgagtttgatgatgaacatgatgatgatcttgatactgaggataatgaattggaagaattagaagagagagcagaagctagaaaaaaaactactgaaaaacagcaattgcagagcctgtttttgctgtggtcaaagctgactgatagactgtggtttaagtcaacttattcaaaaatgtcttcaaccctgctggtcgagacaagaaatctttatggggtagttggagctgaaagcaggtctgcacctgttcagcatttggcaggatggcaagcggaggagcagcagggtgaaactgacacagttctgtctgcagcggctctttgtgttggagttgggagtttcgctgatccagatgacctgccggggctggcacactttttggagcacatggtattcatgggtagtttgaaatatccagatgagaatggatttgatgccttcctgaagaagcatgggggtagtgataatgcctcaactgattgtgaacgcactgtctttcagtttgatgtccagaggaagtacttcaaggaagctcttgatagatgggcgcagttcttcatccacccactaatgatcagagatgcaattgaccgtgaagttgaagctgttgatagtgaatatcaacttgcaaggccttctgatgcaaacagaaaggaaatgttgtttggaagccttgctagacctggacatcctatgggaaaatttttttggggaaatgctgagacgctcaagcatgagccaagaaagaataatattgatacacatgctagattgagagaattctggatgcgttactactcttctcattacatgactttagtggttcaatccaaagaaacactggatactttggaaaagtgggtgactgaaatcttctctcagataccaaacaatgggttacccagaccaaactttggccatttaacggatccatttgacacaccagcatttaacaaactttatagagttgttccaatcagaaaaattcatgctctgaccatcacatgggcacttcctcctcaacagcaacattacagggtgaagccacttcattatatatcctggctggttggacatgaaggcaaaggcagcattctttctttccttaggaaaaaatgctgggctcttgcactgtttggtggaaatggtgagacaggatttgagcaaaattctacttattcagtgttcagcatttctattacattgactgatgagggttatgaacatttttatgaggttgcttacactgtctttcagtatttaaaaatgctgcagaagctaggcccagaaaaaagaatttttgaagagattcggaaaattgaggataatgaatttcattaccaagaacagacagatccagttgagtatgtggaaaacatgtgtgagaacatgcagctgtacccattgcaggacattctcactggagatcagcttctttttgaatacaagccagaagtcattggtgaagccttgaatcagctagttcctcaaaaagcaaatcttgttttactgtctggtgctaatgagggaaaatgtgacctcaaggagaaatggtttggaactcaatatagtatagaagatattgaaaactcttgggctgaactgtggaatagtaatttcgaattaaatccagatcttcatcttccagctgaaaacaagtacatagccacggactttacgttgaaggctttcgattgcccggaaacagaatacccagttaaaattgtgaatactccacaaggttgcctgtggtataagaaagacaacaaattcaaaatccccaaagcatatatacgtttccatctaatttcaccgttgatacagaaatctgcagcaaatgtggtcctctttgatatctttgtcaatatccttacgcataaccttgcggaaccagcttatgaagcagatgtggcacagctggagtataaactggtagctggagaacatggtttaattattcgagtgaaaggatttaaccacaaactacctctactgtttcagctcattattgactacttagctgagttcaattccacaccagctgtctttacaatgataactgagcagttgaagaagacctactttaacatcctcatcaagcccgagactttggccaaagatgtacggcttttaatcttggaatatgcccgttggtctatgattgacaagtaccaggctttgatggacggcctttcccttgagtctctgctgagcttcgtcaaagaattcaaatcccagctctttgtggagggcctggtacaagggaatgtcacaagcacagaatctatggatttcctgaaatatgttgttgacaaactaaacttcaagcctctggagcaggagatgcctgtgcagttccaggtggtagagctgcccagtggccaccatctatgcaaagtgaaagctctgaacaagggtgatgccaactctgaagtcactgtgtactaccagtcaggtaccaggagtctaagagaatatacgcttatggagctgcttgtgatgcacatggaagaaccttgttttgacttccttcgaaccaagcagacccttgggtaccatgtctaccctacctgtaggaacacatccgggattctaggattttctgtcactgtggggactcaggcaaccaaatacaattctgaagttgttgataagaagatagaagagtttctttctagctttgaggagaagattgagaacctcactgaagaggcattcaacacccaggtcacagctctcatcaagctgaaggagtgtgaggatacccaccttggggaggaggtggataggaactggaatgaagtggttacacagcagtacctctttgaccgccttgcccacgagattgaagcactgaagtcattctcaaaatcagacctggtcaactggttcaaggcccatagagggccaggaagtaaaatgctcagcgttcatgttgttggatatgggaagtatgaactggaagaggatggtaccccttctagtgaggattcaaattcttcttgtgaagtgatgcagctgacctacctgccaacctctcctctgctggcagattgtatcatccccattactgatatcagggctttcacaacaacactcaaccttctcccctaccataaaatagtcaaataaataaactgcagtcacgttggcctgaagcaatgtgtattttaaaaaaaaaaaaaaaaaa

SEQ ID NO: 789 - DNA, 4222 bp, Homo sapiens
ttatttccccccgaacttaagatggccgcaggtgggcccggaacagccctcatggcaaacgtctcagagcgtttttccactctgaaaatcgcggagaccgcgcctgagccacagtccagtttttaaggccttggtgtcaggccgttttgctgacgagaaagcctgctgctggtgacaagatggaactggggctgtgtttgtttcccaggacggtcgcacaaacttagcattttggtttatctaaccgagcgcatccatgttcccaaagatcatgtctgttagcccttttgacagcagattaaattttcctcctgaaaggtcacactgtcccaaagctttcagaaaaagtcaacgcacctcttgctttttcctccaaagtatgttatgttaagtttcgtgatccatcaagtgttggcgtggcccagcatctaactaacacggtttttattgacagagctctgatagttgttccttgtgcagaagtgatgcagccaacacgaacggttgtcatgtgtaacacaactttcgatcaccgcgaaaacaccgtcctgggaaagcgtccatgcttgatatcgtttggttcatgaacattaagtttccagtacaggtaaaatcccagaggaatccaaagccctctctttattggctcctgctccaaccatgacaagtctgatgcctggtgcaggattgcttccaataccgaccccaaatcctttgactactcttggtgtttcacttagcagtttgggagctataccagcagcagcactagaccccaacattgcaacacttggagagataccacagccaccacttatgggaaacgtggatccttccaaaatagatgaaattaggagaacggtttatgttggaaatctgaattcccagacaacgacagctgatcaactacttgaattttttaaacaagttggagaagtgaagtttgtgcggatggcaggtgatgagactcagccaactcggtttgcttttgtggaatttgcagaccaaaattctgtaccaagggcccttgcttttaatggagttatgtttggagacaggccactgaaaataaatcactccaacaatgcaatagtaaaaccccctgagatgacacctcaggctgcagctaaggagttagaagaagtaatgaagcgagtacgagaagctcagtcatttatctcagcagctattgaaccagagtctggaaagagcaatgaaagaaaaggcggtcgatctcgttcccatactcgctcaaaatccaggtctagctcaaaatcccattctagaaggaaaagatcacaatcaaaacacaggagtagatcccataatagatcacgttcaagacagaaagacagacgtagatctaagagcccacataaaaaacgctctaaatcaagggagagacggaagtcaaggagtcgttcgcattcacgggacaagagaaaagacactcgagaaaagatcaaggaaaaggaaagagtgaaagagaaagacagggaaaaggagagagagagggaaaaggaacgtgaaaaagaaaaggaacggggtaaaaacaaagaccgggacaaggaacgggaaaaggaccgggaaaaagacaaggaaaaggacagagagagagaacgggaaaaagagcatgagaaggatcgagacaaagagaaggaaaaggaacaggacaaagaaaaggaacgagaaaaagacagatccaaagagatagatgaaaaaagaaagaaggataaaaaatccagaacaccacccaggagttacaatgcatcgcgaagatctcgtagttccagcagggaaaggcgtaggaggaggagcaggagttcttccagatcgccaagaacatcaaaaaccataaaaaggaaatcttctagatctccgtcccccaggagcagaaataagaaggataaaaagagagaaaaagaaagggaccacatcagtgaaagaagagagagagaacgttcaacgtctatgagaaagagttctaatgatagagatgggaaggagaagttggagaagaacagtacttcacttaaagagaaagagcacaataaagaaccagattcaagtgtgagcaaagaagtagatgacaaggatgcaccaaggactgaggaaaacaaaatacagcacaatgggaattgtcagctgaatgaagaaaacctctctaccaaaacagaagcagtataggaccgacaagtgtacctctgcactcaatgctggaatcaaatccaaagcttttaattctctcaacaagatgtaaacaggaaagaaatctagttgagcatgaagataggatctaacagcttttccagttgttagatgactttgtggccatcttgttattgagtaagaaaataaagcatggacatcatgaaaataacagatgttacccaaactcatcttctaaaatctgtgcatttccatggtggctgacacacttgtcatgtggtctgttagtgtttgccaagaaccattgcaaataaattgaacatcaaagatccaagtttgtactatccctaaagactggagataagcattggaggctcttttaaaaaatgctagttactgaattttgtattgttttacttttttttttatttcaatatatacagtttgatgatgtgcttgaaattggtgcaaatatatacacacccttgtaagtgcaaagtatgtaagaagttttaacatttacttcacaggacttgtgattgtgttaaattctcactattgtgttttcttttgctcactgtttaggacaatttttctttaaaatagttttgcagattaaaattgcttaaataagtggattaaaaaactgacaatgcatgctactgttctctttcaaaaggaagagcaaccgtgttgaatactaataatgatgaattagtattcagtgtttagaatcattgggactacccacaaagtgagcatttctttttaaattttcttgacatttccaagcttattatgaataatattgcagtgtgtcttgtcagctgtaggtggcaaaggtgcccttataaaaaaggaaactggcttttcaaaatgggctatgggagcacaagctgaagctttagtgccttctacaatgtggtatactgttttctagaattttatatgtgctagtcattctcaattcatatggaatctagatggatatttcatgcatacccatagagaagtgtgtaagtgatatgtcagaagagcttcttactgatttcacctaaaatgagaaggaagtcctgttttcaagaatgacattagagtcatgcagctttgggaccatcagttttatactgtgataattgaaaatgaaacatgttcttattttccttaaattgaagaaaaccctttagttgtctacattggatggccttattacctctcaatcatcttttcataaatgatgtgcagaaattgtacttaaggacttaggagtatatgggaggttattggttttatgtttaaggatacgtttacttgagtttaagatacaggtcatccatcattcttaggctcactttttacagaaagtatgcaaatagtaaagtgacagcactgctaatgtttttccccagtactataacttgtggtttctgaactcattattgttgtatttccaaaaaagtaataccttttaattagtgtattaaaagttaagtataattattttaatgcaatctaatacaatcagattactcagttgccttacctcatgggaagagttacttttttagatctaaaaagctgaatagcatgttagttacttggtttcaacttgagttttcttttaatgttaataagattgaaactttagtatttagtggggaatggaaagagttgcccttgttgcaagtaatgaagcctgatttgattatgaagctgcttaatcactcttcatgtgttcagaattactgttttttttgtttgtttttcctttttgtcactgtgtacattaaaattttggaagatgctttactatgtaaagtatagatggtcattttaatcattcagccacatacggttggctggtaaacagcttattctgatacaagaatgcttgggtgcatatggaaagattgtgaaagagtgtgtcttgcatcaacagctgtcttatttatgatatataagtagaaatagagcaaatgttggaatctgttatttttagtaccatgtctttaataaagctaagtattttagaggaaaaaaaaaaaaaaaaaaa

SEQ ID NO: 790 - DNA, 948 bp, Homo sapiens
attgtggtgccttgtagctgtcccgggagccctcagcagcagttggagctggtgcacaggaaggatgaggaagaccaggctctgggggctgctgtggatgctctttgtctcagaactccgagctgcaactaaattaactgaggaaaagtatgaactgaaagaggggcagaccctggatgtgaaatgtgactacacgctagagaagtttgccagcagccagaaagcttggcagataataagggacggagagatgcccaagaccctggcatgcacagagaggccttcaaagaattcccatccagtccaagtggggaggatcatactagaagactaccatgatcatggtttactgcgcgtccgaatggtcaaccttcaagtggaagattctggactgtatcagtgtgtgatctaccagcctcccaaggagcctcacatgctgttcgatcgcatccgcttggtggtgaccaagggtttttcagggacccctggctccaatgagaattctacccagaatgtgtataagattcctcctaccaccactaaggccttgtgcccactctataccagccccagaactgtgacccaagctccacccaagtcaactgccgatgtctccactcctgactctgaaatcaaccttacaaatgtgacagatatcatcagggttccggtgttcaacattgtcattctcctggctggtggattcctgagtaagagcctggtcttctctgtcctgtttgctgtcacgctgaggtcatttgtaccctaggcccacgaacccacgagaatgtcctctgacttccagccacatccatctggcagttgtgccaagggaggagggaggaggtaaaaggcagggagttaataacatgaattaaatctgtaatcaccagctatttctaaagtcagcgtctcaccttaaaaaaaaaaaaaaaaaaaaaaaaaaaa

SEQ ID NO: 791 - DNA, 3052 bp, Homo sapiens
ggcagctgggaaccgcgggcgctaggcgcgcgcacccagcactcggtcccagccgataaatctggggcagcgcgcggtaggagctgcgggcggccaggccccttcctgcgtccgcacctggccccgcgcgcccctctcgggcgtccggcttccggcgtcctggcggctcgggtggcggcggttcgggcggccgcctggctgctcctcggggcggcgaccgggctcacgcgcgggcccgccgcggccttcaccgccgcgcgctctgacgccggcataagggccatgtgttctgaaattattttgaggcaagaagttttgaaagatggtttccacagagaccttttaatcaaagtgaagtttggggaaagcattgaggacttgcacacctgccgtctcttaattaaacaggacattcctgcaggactttatgtggatccgtatgagttggcttcattacgagagagaaacataacagaggcagtgatggtttcagaaaattttgatatagaggcccctaactatttgtccaaggagtctgaagttctcatttatgccagacgagattcacagtgcattgactgttttcaagcctttttgcctgtgcactgccgctatcatcggccgcacagtgaagatggagaagcctcgattgtggtcaataacccagatttgttgatgttttgtgaccaagagttcccgattttgaaatgctgggctcactcagaagtggcagccccttgtgctttggagaatgaggatatctgccaatggaacaagatgaagtataaatcagtatataagaatgtgattctacaagttccagtgggactgactgtacatacctctctagtatgttctgtgactctgctcattacaatcctgtgctctacattgatccttgtagcagttttcaaatatggccatttttccctataagttttatgtagttaaatgcttcctagaaacctaaataagatctattaatttctgacgagaggtgttcttctagaattaattacttttatcttttgtcttcatttgtggccaaaattatgtttactagaggaaatttgggatcattctcagctaattccaaaatgtagtgctctattgcatggatccttggtaatcctcaagcatcagatgccataaggggaaacttaattctgctaaattaatgtttattttgtgagaagtgactttatcttcatttggggtagaaaaattatttctttatgtagtagagacaaattattctcattttgcaagtactttcaatttaagctacaaattgagaaaaccgttataaataagaataaaataggccaggcacagtggctcacacctgtaatcccagcactttgggaggccgaggtgggcggatcaccagaggtcaagagtttgagaccagcttggtgaaaccctgtctctactaaaaatacaaaagttagctggggctggtggtgggcatctgtagtcccagctaattggaagggtgaggcgggaggatcgcttgaacctgggaggcggaggttccagagagccaagatcgcaccactgcactacagcctgggcgacagaacgagaccctgtctccaaaggaaaaacaaaaaagaagaataaaataatttggatgaaaatcatgtttatttaaatagtaatgtcatgagactattaaagatgtgccagagtttcaatgaaaatcattaaagtaggacagctaagaaattaatattaatatcaaaattattgataatcttaaattattgattattccttaacgcactccattctccttttacattttatcatgtttcttttgaatatatgaattggcaaaggacttgatgaaactgagtactaagatttggtacagagtatgtcaggaagacaactcagattgccattttaaataaagttgtacatgaacaataattggaatcatcaggtaatttttttaaacaaaggttcttcatttactgttatgattggaaaaaaattagaaaataaagtaagtgccataggctaattaaaaaataaaaccttggccgggcgcggtggcttacgcctataatcccagcactttgggaggccgagacgggcagatcacgaggtcaggagattgagaccatcctggctaacacggtgaaaccccatctctactaaaaatacaaaaaaatgagccgggtatggtggtgcatacctgtagtcccagctactcgggaggctgaggcaggagaatggcatgaacccggaaggcagagcttgcagtgagccgagatcacgccactgcactccagcctgggcgacagagtgagactctgtctcaaaaaaaaaaaaaaaaaaaaaaaaaaaaaagtaaataaaaccttagggcaagcatgttccaaaacagaagacatcaaaccagggtgtgttggcattatttattttatgtagagtattgagatgtgataaacctttgtatatgccatcactgctccatttcctaaagtattttggtgttttcatgggactacatcttgtataatttgacatgtatgacctgactagtcctaacagttctttttaaacgtgtatttgagacttaaatattggaaaaggtaacccagtgccataaagcagaaacagtgacctttaaaatgactaaaatttcaacccagtatagtttcatacctatttcatgctttctcgtaagaaagaatttcatgttttagaaacatttctttcactatgggattaataatatgacactgaaatggaattatatatgtcagctacaattcaggcattgttttgggatatggttagattgacaggcaacgttttggaatatggttagacggggagggaacacggtactgtttaacatcttaagagtatgtgggggtatgtgtatacagaatgtttttgtttttgctcatcacaaccaggtttcatcagtatttaaaatatttaagattgtggcttggaatgtggttcagccatttactcacttatacaaatattcagaagtgtaataaaaatgtgaatgaagaaaaaaaaaaaaaaa

SEQ ID NO: 792 - DNA, 5503 bp, Homo sapiens
aattgggcggccggtttccaattggaagggcttctgagcctcagtcttcgggcggcgctgaccattggcgggcaggatggaggcggagccttgggttgtcgcccgccgccgggggttaaggtgagcgactgcaggcaaacccggcgacagcgcagctcgcgtcgaccctggctcctctgcctgccccctcaggcccccgcctccttcaggatgacgctggacgtggggccggaggatgagctgcccgactgggccgccgccaaagagttttaccagaagtacgaccctaaggacgtcatcggcagaggagtgagctctgtggtccgccgttgtgttcatcgagctactggccacgagtttgcggtgaagattatggaagtgacagctgagcggctgagtcctgagcagctggaggaggtgcgggaagccacacggcgagagacacacatccttcgccaggtcgccggccacccccacatcatcaccctcatcgattcctacgagtcttctagcttcatgttcctggtgtttgacctgatgcggaagggagagctgtttgactatctcacagagaaggtggccctctctgaaaaggaaaccaggtccatcatgcggtctctgctggaagcagtgagctttctccatgccaacaacattgtgcatcgagatctgaagcccgagaatattctcctagatgacaatatgcagatccgactttcagatttcgggttctcctgccacttggaacctggcgagaagcttcgagagttgtgtgggaccccagggtatctagcgccagagatccttaaatgctccatggatgaaacccacccaggctatggcaaggaggtcgacctctgggcctgtggggtgatcttgttcacactcctggctggctcgccacccttctggcaccggcggcagatcctgatgttacgcatgatcatggagggccagtaccagttcagttcccccgagtgggatgaccgttccagcactgtcaaagacctgatctccaggctgctgcaggtggatcctgaggcacgcctgacagctgagcaggccctacagcaccccttctttgagcgttgtgaaggcagccaaccctggaacctcaccccccgccagcggttccgggtggcagtgtggacagtgctggctgctggacgagtggccctaagcacccatcgtgtacggccactgaccaagaatgcactgttgagggacccttatgcgctgcggtcagtgcggcacctcatcgacaactgtgccttccggctctacgggcactgggtaaagaaaggggagcagcagaaccgggcggctctctttcagcaccggccccctgggccttttcccatcatgggccctgaagaggagggagactctgctgctataactgaggatgaggccgtgcttgtgctgggctaggacctcaaccccagggattcccaggaagcagaactctccagaagaagggttttgatcattccagctcctctgggctctggcctcaggcccactaatgatcctgctaccctcttgaagaccagcccggtacctctctccccactggccaggactctgagatcagagctggggtggaagggagccattctgaacgccacgcctggcccggtcagtgctgcatgcactgcatatgaaataaaatctgctacacgccagggagaacaggtgtcctgtgtctgtctggcttgggcaggaaagcccagaaggtgctcagcagggtgcagggatggtgccattctggcccagacctttattggggaaaatgttgggggtcacttggtcttgctcttgcctttacccggaggtagctggaagggccgctctagtgcagtcaacttgctgctgagcctttcctcgctggccttgagccgctcctccaccagcccctggagctgctccagctctttgttcacttgggtcttgatgtaggctcggaggacgtggatgtggcctgcaggggcagggaagaaggggcagggtgaggagagatgctgtctggcaatggggggatggtccctagttgggcaaacagtccccaaatttcccctggtggggatatagaggtagcaatgttgtttccctttaggaaatgttagcaagcccttgtgtgagaggtagttgggtagggtggctatgctggactttgcagcttcaaattctgatccctactcagtagctgtgtgaccttaggcaggttatttaacctatctgtgcctcagtttccttgtatgaaatgtggatagtgatacctagcacataggattgagggaggattaaatgagttaatttatgtaaaatgcttagagcagggcatgcactgcacacctattgccaagtatgtgctggctgttattgtcattggctttctctttttttttttttttttgagatggagtcttgctttatcccccaggctggagtgcagtggcagcgatctcagctcactgcaagctctgcctcccaggttcatgccattctcctgcctcagcctcccagtagctgggactacaggcacccgccaccacgcccggctaactttttgtatttttagtagagacggggtttcacagtgttagccaggatggactcgatctcctgacctcgtgatccgcctgcctcagcctcccaaagtgctgggattacagttgtgagccactgcacctggcctgttctttgtttttttttaactcttaagttctgggatacgagcagaacatgcaggtttgctacgtaggtatacatgggccatggtggtttgctttacccatcaacccatcatataggttttaagccaccgtcattggctttctaatgatcatttctctggagccacttcagctgtgctttttgtttgtttgtttgtttgttttgagacagagtcttgctctgttgcccaggctggagtgcagtggccagatcttggctcactgcagtctccacctcctgggttcatgcagttctcctgcctcagcctcctgagtagctgggactacaagcgcgcaccaccatgcctggctattttttgtattttagtagatagggggtttcacggtgttgcccaggctggtcgcgaactcctgagctcaggcaatccgcctgcctcagattgtgctgggattacaggtgtgagccaccacgcctggcctgcagctgtgcttttatctgtcatcttggacttctgcataagggatcatttagagaaaggactctgactaaaaacaaaaagtctgaagtcctgatgtcatccaaacccttcattctacacctgctcagagggacagggcagcctgccctctccagatcctcacttggctctggctctggtggggccactgtctctagttcctctttctgcggggtaactgcctgctcctccatctccttgctttcttctttctctgcaaaccagaagcaggaagagactgtggccccaggcctggcccagcccagccctgccctggcactctcccttacccgtctcactctctggccacagtttgggtggctgtagccccatgtaagtcaaagacagatccagccgcacctgggaagcaaggcagagggaggctgaaaggagtgcacctgtgctgaggggaggggcggttgagggtggctcctcatggtccaccaccccctacctggggtgtgaagacgtatttatagagcttgaagtggcggaagtaagtgttgaccacgtagtcttccaaggccagcagctgttcctctttgaagaggtcgatgctgaaaggaggccgctgtggtggtgactcggaattagaaccctgactaccttccggagccctggctttgcctccaaaagcccagcaacaggagcaaggagagcccactggggtcttcacaagaagataagggtgatgaatgtgagagagactgggtgagaccttgtctggggatgggtaaagtttccagaatgttccaggggaactgaccctgactccatggcaaaaaaggacactggtgaagtagcggtagcactcctccacgttgcccaagggggttgctggtagggaaagcaagatgcagcagtgaggccctctctggtatccattcattcacttcactcaacagctgtttatgaccatgagcttcagaagcagacagatctgggtttcagcactggcttgtttccttaactcatgtaacaaatactgaatacccactatatgcccactgtatggttttcggcactgaacaagacagacaaggtcctgcccttacgaagcttatattctaggggaataaaccaagaaatagatcatttcagctattaaacattctgaagcaagagctattaaacattctaaagcaggtgttattgtgcactatgcatatatttgcatatattatttctcagaacagtcctgtaaaatgtgtgctgtatccttaatttctagataaggaagcagtggattggaaagctgatggcttgtgtatgatgatgctactaataatgacatattccaggcagaaatcccctgcttctgcttcccatggtcacttgtgccaggcccggttcctcttctccctggggctcaaacctggtagctgccccctctcaccaatacaagccttgtgaagatcctggagcagggcacaagccgctgacgtctgctccagtgagaagccctgctggcggcagaaaatgagcgcgtggcagaagaggtccagggtgatggcgtccctcaggctctgctcaggacaccctagctccagcagctcagccagcacccttgggagggagagaggagtgagtgacaactgggcctcctttcatcaccctacacccaccacatgctttggagtcagccattcctcatgttttcccaacctgacccctcagcctttgccaagagctcttcccacgcccccctcagtccctactccctcatctcagcattggtggtcttctccagctggtgcatggaatggacgtccaggtacttcctgttatagtaaaagaaaaagagtattggtggccgttacctatcatgacaaggctgtgacagctagtgcgtgagactgggagttggccaccggcgtgaagctgggctcttttgccagcttgctgtgtgactatgcaaatcgttaactctctgggcctaaatgaactcttatgagcctctccatttctaaagcctagggttaggaatcttgaattcttttttctgctctgccactaccttgtatgaccttggtcaagtactccctgtggccctcagtgtccccctctgtacaatactccttagcggccatgagactccatttacattctgtctttggctctttttttctcacactgcctcctctttggactggagaggctggaaagccaacttccagtcacctggagtaattgcatctccaggcctcagtctcatctgtaaaatggggatgccctggccacagacaggactgttggggagacaataaagaacgcaaatattcagtgtaa

SEQ ID NO: 793 - DNA, 2591 bp, Homo sapiens
gctgagcgcgggcgcggggccgctacgtgcgcggggagcgcggggagcgcggggagcgcggggctgcgctcgtgtgcgctcctgggcgctcgccgccgccgctgccgccgcgcgcctttgagtcagcaaactccgcggcccgcaagcccggctcggcccggccctgctctgttctgcccggaggagccgcccattgatcgtgtcctgtgctgaagatgtttccggaacaacagaaagaggaatttgtaagtgtctgggttcgagatcctaggattcagaaggaggacttctggcattcttacattgactatgagatatgtattcatactaatagcatgtgttttacaatgaaaacatcctgtgtacgaagaagatatagagaattcgtgtggctgaggcagagactccaaagtaatgcgttgctggtacaactgccagaacttccatctaaaaacctgtttttcaacatgaacaatcgccagcacgtggatcagcgtcgccagggtctggaagatttcctcagaaaagtcctacagaatgcacttttgctttcagatagcagccttcacctcttcttacagagccatctgaattcagaagacattgaggcgtgtgtttctgggcagactaagtactctgtggaagaagcaattcacaagtttgccttaatgaatagacgtttccctgaagaagatgaagaaggaaaaaaagaaaatgatatagattatgattcagaaagttcatcctctgggcttggacacagtagtgatgacagcagttcacatggatgtaaagtaaatacagctccgcaggaatcctgaaaaataattctaatgttactatcttaggaatagcaaattatgtccagtcatagagaagaaagcttcataataatacattcttacctaaagctcactgtcatgatgttaggtatttaaattcttaaagatgttgggttgtttattagtggtatttttatgttgtcttattttaggtaagcttctgtgtaaagctaaaaatcctgtgaatacaatactatcctttacaggcagacattattggtaaacaagatcttgccctccaatgaaatgacttacatgttttaaaaaaccgagttggttttattgaatttaaaaagataggtaactaagtagcatttaaaatcaagatagagcattccttcttgtatcagtggggcagtgttaccataaacacggtgtatatgttgttaaaccctatgaagagtaacagtgtagaccagactgcctctctcagatatgtgcctgatattttgtggatacctcccctgcactggcaaaacactatgcttttgggtgttagactgaaatattttaagagtatttaacctttccagtattctgtttcacgcttagatggaaatgtatcttatgaatagagacatattaaaataatgtttacatcttagaaaaaacatagatagtgctagtaatattacttataactgtaatatatagattcagaaatacattttcattatccaaaatcagcttcaacaaatggtttctggagacaaataatttgttttcattatcattgtataatcaggttaatgatttattttttgactaaatgtgcaatttcttatcactagataactttcagtatcagtggtggttacttattacttaaatcagaggaaggattttataaagattaataaatttaattttaccaataaatattcccataatttagaaaaggatgtcgacttgctaatttcagaaataattattcatttttaaaaagccccttttaaagcatctacttgaagattggtataattttcataaaatgtctttttttttagtgtcccaaagatatcttagataaactattttgaagttcagatttcagatgaggcaacattttcttgagataattacccaagtttcatccatgttgaatggtacaaaatatttctgtgaaactaacaggaagatattttcagataactaggataacttgttgctttgttacccagcctaattgaagagtggcagaggctactacaaaaagcaaccttttcattttcactaagagtttaaaagctattgtattattaaaaagtctttacaatgcttgtttcaaagaaccaacagaaaaaaaagctaagaaaactgagaactaacattaaaaaaattaaatttagaataagaatgatttctttaatttgtcctttttttctttggtctaaaacattattaaatttttgtaaatattttgatttaatgtgtcttagatcctcattattttaatacaggaaaagaaaagatttagtaatttcttaccatgctaatatgtaaagttcatgccatccaggcatttaagagcgatcctcatcccttcagcaatatgtatttgagttcacactatttctgttttacagcagttttgaaaaacacatactatgccaccaattgtcatattatttttagatgatgtaacatagccatcaaaattaatattatgtaatgcctaatacttagtatgtaaatgtcacgagatcatttttacattaaacgtgaaaaaaaatcaaaaaaaaaaaaaaa

SEQ ID NO: 794 - DNA, 2026 bp, Homo sapiens
gcccctccagcctgctggagccggagccggagccggagccggagccggagccggagccagagccagagctcgaggactcaccggcccagtctccgtccgggatggggccccgctcccgggcgcgttgccgcccagtcccggggaccgtccctaccgcgagggtctgaggcgcggctgccccggggagggtggaaggccaggcgtggggcccgaacctctggctgactttggcagggcccatctggcacggcctccgcggcgcgcagctgttttcaagtcagcaaacatttactgaggatctactatgtacaagatgaacatctgcaacaagccctccaacaagacggcccctgagaagagtgtgtggacggcaccggcacagcccagcggaccctcccctgagctgcagggccagcgatcccgccggaatgggtggagctggccccctcacccgctccagattgtggcctggctgctgtacctcttctttgctgtgatcggctttgggatccttgttcccctcctgcctcaccactgggtgcccgctggctacgcttgcatgggcgccatctttgctggccaccttgtggtgcacctgaccgccgtctccatcgatccagcagatgccaacgtgcgggacaagagctatgcggggcccctgcccatcttcaaccgaagccagcacgcacatgtcattgaagacctgcactgcaacttgtgcaacgtggatgtgagcgctcgctccaagcactgcagcgcctgcaacaagtgcgtgtgcggtttcgaccaccactgcaagtggctcaacaactgtgtgggcgagcggaactaccggctctttctacacagtgttgcatccgctttactgggcgtcctgctcctggtgctggtggccacatatgtcttcgtggagttctttgtcaaccccatgcgtctgcgcaccaaccgacactttgaagtcctgaagaatcacacggatgtgtggttcgtgttcctgcctgccgcccccgtggagacccaggcccctgccatcctggccctggccgccctgctcatccttctgggcctcctgtccacagccctcctggggcacctgctctgcttccacatttatctcatgtggcacaagctcaccacctatgagtacatcgtgcagcaccgcccaccacaggaggccaagggggttcacagggagctcgagtcatgtcctcccaagatgcggcccattcaggagatggagttctacatgcggaccttcagacatatgcgcccagagccccctggccaggccgggccagcagcagtgaatgccaaacactctcgccctgcctccccggatccgaccccaggtaggagggactgtgctgggcctccggtccaggtggagtgggatagaaagaagcctctaccctggcgctcgcctctgcttcttttggcgatgtggggccctcaggctcccccgtgtctctgcagaaaaagaggaagaggcgcgtgtataaagtgcgaacgtctgagacctcggatccggcgtcggggcctagggcccccagccgccgctccagctcgtcgacggattccgcggacgccagccctgtgcacgccgctggccctgccggcgcctaccactcggcgtcggcagagtccgtggacgagattccagtggcgcagacgcgcctgggcagcgccgctctggccgccccgcggggccggggccgacagcccacgctggcgcggcaggcgcgtgcgcccgccgttttcgtgagcccgagcagcggcgagcccagggcgccgggcggccgggaggctggtctggcttagctgggccgagaggccggagggccgagttagagcggccggcctgactctctatgcaacaccccatccttgccgcaccgagtgcactttaggggcccctacggccggcgggatcggcctccctcccccacgactcagcaatacccgccccaccggctgtgatgctccaataaacttttttatgcttttgcggaaaaaaaaaaaaaaaaaa

SEQ ID NO: 795 - DNA, 2538 bp, Homo sapiens
ggtagctcccggaataggagcgttgcgagacggtcggttccaagtgggcctgggcgcgggggagaggcgggtctgtcctcgggaactgcaaggccctgtgagcgggaggactgggatcccggccgcggctgctggaagcgtcgaagctcagcggggccgcggacactgacctgtgcttagaactcatcctggcccgcagagcctgccgcgagtccctggcgtcccctgtggcgggctcttggagccactttcccgagcggaagtcagcccgcggctcggactccggcgggacctgctcggaggaatggcgccgccgggttcaagcactgtcttcctgttggccctgacaatcatagccagcacctgggctctgacgcccactcactacctcaccaagcatgacgtggagagactaaaagcctcgctggatcgccctttcacaaatttggaatctgccttctactccatcgtgggactcagcagccttggtgctcaggtgccagatgcaaagaaagcatgtacctacatcagatctaaccttgatcccagcaatgtggattccctcttctacgctgcccaggccagccaggccctctcaggatgtgagatctctatttcaaatgagaccaaagatctgcttctggcagctgtcagtgaggactcatctgttacccagatctaccatgcagttgcagctctaagtggctttggccttcccttggcatcccaagaagcactcagtgcccttactgctcgtctcagcaaggaggagactgtgctggcaacagtccaggctctgcagacagcatcccacctgtcccagcaggctgacctgaggagcatcgtggaggagattgaggaccttgttgctcgcctggatgaactcgggggcgtgtatctccagtttgaagaaggactggaaacaacagcgttatttgtggctgccacctacaagctcatggatcatgtggggactgagccatccattaaggaggatcaggtcatccagctgatgaacgcgatcttcagcaagaagaactttgagtccctctccgaagccttcagcgtggcctctgcagctgctgtgctctcgcataatcgctaccacgtgccagttgtggttgtgcctgagggctctgcttccgacactcatgaacaggctatcttgcggttgcaagtcaccaatgttctgtctcagcctctgactcaggccactgttaaactagaacatgctaaatctgttgcttccagagccactgtcctccagaagacatccttcacccctgtaggggatgtttttgaactaaatttcatgaacgtcaaattttccagtggttattatgacttccttgtcgaagttgaaggtgacaaccggtatattgcaaataccgtagagctcagagtcaagatctccactgaagttggcatcacaaatgttgatctttccaccgtggataaggatcagagcattgcacccaaaactacccgggtgacatacccagccaaagccaagggcacattcatcgcagacagccaccagaacttcgccttgttcttccagctggtagatgtgaacactggtgctgaactcactcctcaccagacatttgtccgactccataaccagaagactggccaggaagtggtgtttgttgccgagccagacaacaagaacgtgtacaagtttgaactggatacctctgaaagaaagattgaatttgactctgcctctggcacctacactctctacttaatcattggagatgccactttgaagaacccaatcctctggaatgtggctgatgtggtcatcaagttccctgaggaagaagctccctcgactgtcttgtcccagaaccttttcactccaaaacaggaaattcagcacctgttccgcgagcctgagaagaggccccccaccgtggtgtccaatacattcactgccctgatcctctcgccgttgcttctgctcttcgctctgtggatccggattggtgccaatgtctccaacttcacttttgctcctagcacgattatatttcacctgggacatgctgctatgctgggactcatgtatgtctactggactcagctcaacatgttccagaccttgaagtacctggccatcctgggcagtgtgacgtttctggctggcaatcggatgctggcccagcaggcagtcaagagaacagcacattagttccagaagaaagatggaaattctgaaaactgaatgtcaagaaaaggagtcaagaacaattcacagtatgagaagaaaaatggaaaaaaaaaactttatttaaaaaagaaaaaagtccagattgtagttatacttttgcttgtttttcagtttccccaacacacagcagatacctggtgagctcagatagtctctttctctgacactgtgtaagaagctgtgaatattcctaacttacccagatgttgcttttgaaaagttgaaatgtgtaattgttttggaataaagagggtaacaataggaacaaaaaaaaaaaaaaaaaaaaaaaaaaaaaaaaa

SEQ ID NO: 796 - DNA, 1343 bp, Homo sapiens
catctggggacgctctcaggtcttggtgcccagcccagcttccttcaaaatatctgctgttcatgaaatcctgtgcaagctcagcttggagggtgaacactctacactcccaagtgcatttgggtcagtcaaagcctacaccaaatttgatgctgagcaggatgctttgaacattgaaatggccatcaagaccaaaggtgtggatgagatcaccactgtcaacattttgactaaccacagcaatgcacagagacaggatattgccttcacctaccagagaaggaccaaaaaggaacttgtatcagcacttaagtcagccttatctggccacctagatagtggctttgggcctattaaagacacctgctcagtatgatgcttctgagctaaaatcttccatgaaggggctgggaaccaacaaggactccctcattgagatcatctgctcaagaaccaaccaagagctgcaggaaattaacagagtctacaaggaaatgtacaagactgatctggagaaggacattatttcggacacatctggtgacttctgcaagctgatggttgccctggcaaagggtagaagagcagaggatggctctgtcattgattatgaactgattgaccaagatgcccgggatctctatgacgctggggtgaagaggaaaggaactgaagttcccaagtggatcagcgtcatgaccgagcggagcatgtcccacttccagaaagtatttgataggtacaagagctacagtccttatgacatgttggagagcatcaagaaagaggttaaaggagacctggaaaattctttcctgaacctggtccagtgtattcagaacaagcccctgtatttcgctgaccggctgtacgactccataatgggcatggggactcaagataaggtcctgatcagaatcatggtctcccacaatgaagtggacatgttgaaaattaggtctgaattcaagagaaagtatagcaagtccctgtactattacatccagcaagacactaagggtgctgtacctgtgtggtggagatggctgaagtccgacacagcacgagcgtccagaaatggtgctccccatgcttccagctaacaggtctagaaaacccgcttgtgactagcagtccctgtggctgttcctgtgaggatgacgttagcattgcccccaacctcattttagttgcctaagcattgcctggctttcctgtctagtctctcctgtaagccaaagaaatgaacattccaaggaattggaagtgaagtctatgatgtgaaacactttgcctcctgtgtactgtgtcataaacggattaataaactgaatttgtacttt

SEQ ID NO: 797 - DNA, 6276 bp, Homo sapiens
cggccgcggaggagcaggacgcttggtccggacggagctcggcgctgggaagaagccgggagcttccctgatggtgccgccgcctccgagccggggaggagctgccaggggccagctgggcaggagcctgggtccgctgctgctgctcctggcgttgggacacacgtggacctacagagaggagccggaggacggcgacagagaaatctgctcagagagcaaaatcgcgacgactaaatacccgtgtctgaagtcttcaggcgagctcaccacatgctacaggaaaaagtgctgcaaaggatataaatttgttcttggacaatgcatcccagaagattacgacgtttgtgccgaggctccctgtgaacagcagtgcacggacaactttggccgagtgctgtgtacttgttatccgggataccgatatgaccgggagagacaccggaagcgggagaagccatactgtctggatattgatgagtgtgccagcagcaatgggacgctgtgtgcccacatctgcatcaataccttgggcagctaccgctgcgagtgccgggaaggctacatccgggaagatgatgggaagacatgtaccaggggagacaaatatcccaatgacactggccatgagaagtctgagaacatggtgaaagccggaacttgctgtgccacatgcaaggagttctaccagatgaagcagaccgtgctgcagctgaagcaaaagattgctctgctccccaacaatgcagctgacctgggcaagtatatcactggtgacaaggtgctggcctcaaacacctaccttccaggacctcctggcctgcctgggggccagggccctcccggctcaccaggaccaaagggaagcccaggcttccccggtatgccaggccctcctgggcagcccggcccacggggctcaatgggacccatgggaccatctcctgatctgtcccacattaagcaaggccggaggggccctgtgggtccaccaggggcaccaggaagagatggttctaagggggagagaggagcgcctgggcccagagggtctccaggaccccctggttctttcgacttcctgctacttatgctggctgacatccgcaatgacatcactgagctgcaggaaaaggtgttcgggcaccggactcactcttcagcagaggagttccctttacctcaggaatttcccagctacccagaagccatggacctgggctctggagatgaccatccaagaagaactgagacaagagacttgagagcccccagagacttctacccatagcacatcccaacaccgtcacgccaaaggaagagaaagatcaactcacctgcagttaaaccatctaaagagaagaaagaccactggagacctagaaaacatacatttttctcttctcttctcctgacgtctctccactcctcttcttccaaatacgatgctattttcagagtcccctcctaggcctgcagacatgagggagtgaatgattgatttacctgcttctcactaagagtccattggggtggtttgcattgtaacttttcttttacatcctatttttccaggaactttggatttaagtactctcacagtgtcttaaatcataaattcttgaagttaaatttggcagagtatcaaaagggggaaaatgacaaagtgagctctaagaaaatgtgaggctacttctaagatgtgtgttcacaatagaccataactcctctagtatcaaaattggggctcttcagttaaaaaggggtggggaggacaaacgtgtcgatgtgctttggtggagaattttttccttgtgcttctagtagactttaaatattgtatccctttgtcaaaccttgtttcccaaattcaattaaagagaggagagaattgaatggcgtttagagaagatagaaaagaatcacagtcatatatttactgttatatagattgccacattctaaaattcaaatacggtgcttaaggtttcatgccatgcttatctgtaagtatcctatttagggaagaagattaaactctcttttcaaaaaaacaaagtgaaatgcctggattcacattaaaacaatgggctctcgtttgctataatattttaaagctgtttaatcaacagtggagtctgctctataaatatagattatttgttcaataaactggctgagcttagagagaggtgcagaattcctggttctgagcaggtgcccagaaggtaccattaggtgccatgatccaggctgaaccaatatacagtggggctgaagtctgcaaggaggttgctggcttgggctgacctcactaatgccatcagcagcggtaggtaaattttttctccttgggtattacaagtttttgtctggagccaaccaagcttgccaccaacatattgagagtaatacactattgaaagttatcttggatggggagaaaaaaaaatagtggttttccttgtttgcaaaaacttccttcctattctcattttttcttaattttctttaatttagtccaagttccagttcttttaggccttctctttgatttattttcccctgcatgtgagaagcagttcagaaaaaggtctatatctccacctcctagtgagttagagtgttttctcagagcacctctgggtggcaaagggaagcatgttcctgccaaggtttgctgtggattcagaagcaccaggagcaagagaccagaaggatgatctgctcctttgtaacgttgttgagggccctcttgtttccaatgagcagcttataggttactcacagtccactttctcactggacacacaaagtggctctttatctacctttgcgggagattttcactctcctgcaaatgatcgttctcacactcatattagctcatgttggaatttcccatcctgccatgtcctttcccatttctttttggcttttttgcctccaccttttagcccacatcatttaactccactactgtgaaagcttgcttaaagaaaatccctcttggccgggtgtggtagcccacgcctctaatcccagcactttgggaggctgaggcggggagatcacaaggtcaggagatcgagaccagcctgaccaacatggtgaaaccctgtctctactaaaaatacaaaaattagctgggcgtgttggcacacacctgtaatcccagctactcaggaggctgaggcaggagaattactttaacctgcggggggagcctagattgcgctactgcactccagcctaggcaacagagggagactctgtctcattaaaaaaaaaaaaaaaaaaaaaaaaaggccgggcttggtggctcatgcctgtaatcccagcactttgggaggccgaggcgggcggatcacgaggtcaggagatcgagaccacagtgaaaccctgtctctactaaaaacacaaaaaattagtcgggcgtggtggtgggcgcctgtggtcccagctgctcgggaggctgaggcaggagaatggcgtgaacctgggaggcggagcttgcgctgagccgagatcgtgccactgcactccagcctgggcgacagagcgagactctgtctcaaaaaaaaaaaaatatcccttttgttgtgtttgaatgccacctttcagtcttcttccttaagaatgttaggaaggggctttgcaaacctctagtggcaacagtcttccttcccttcttcctaccacgttggaaatgcaggactcatgtcagtcagcatgtgaccgagtctttcatgaacactttgctcctctatgtctcatttatgcaaaattcctggtgactctccactaacatttttaaagtgaaagcaaactttcactttaaaaaaagtgagcgagaggatcccttgagcccaggagttcaaggccagtctgggcaacatagcaagaccccatccctaaaaaaaaaaaaataagttttattaaatgtggcactttcccctagaagggcagtaaccccaggaaccagtctgcctcttttcgaataaaggagactttttaaaaagaaaaaatttctttttagggtggggtgctctttatctagcatctttccttcctccttctctctgcaaaattcaacattcatgacagagggccacaccaaccacgggtttatagagagaggaactgaacagctgttgattcccatctggaatatatttaatgtttgcctgcttgtggagcatggtatttaaagggtgtggatggatgaatgtttaaaaaaaaacacacaaaactatgcacaagctgtatgagagatggctaggtccatctatgattttttttaaaagaagaattttaataccttttctttgacagtgaactgtatttagaaatatgatctttattgtgaaatgctcataaaatgcaaccaaactgcatgtttggccataggctagaataatatattaaaagaattaatggaaagtagtattgtctgggtttcatgaaactattccagataatattctccagcaaaacttatggtaacctgtattttataatgtcaatctgctggaccaagttaatttagaaaataatttttaatcctcagattttcaaaacttggactactgcaagactgatatgtactttttatgcccaaatcatatttttcaaagataggacatcataaggcatcattatttctaatgtatcttttaactagatagaaaaagctttactgtctaaacaggacttctgctcaaaacctaatgggaaagctatttctggggtaagatttgtaacagtgcttctaggtcatttcatgttttatagggaaaaagatctttgtacacctcctcaacctgttagtagaaatgttgacttcgattttttgcaccctcttcacaggacctcataagttgcctctgttcttggaaagcaatgggaataaaaatatgctgttgaaaatagtgcatggggccaggcacagtggttatgcctgtaatcccaacactttgggaggctgaggcgggcgcatcatgaggtcaggagatcaagaccatcctgaccaacacgtggtgaaaccccatctctactaaaataaataaaaaaaaaaattagccaggcgtggtggtgcacgcctgtagtctcagctactcgggaagctgagacacaagaattgcttgaacccgggaggtggaggttgcagtgagccaagattgcgccactgcactccagcctggctacagagtgagactccgtctcgaaaaaagaaaatagtacatggagggcatgcattttagtttaggaaacccccctcccttcccagttccagagggagaaattataagctatactgtgccaaaagtgagtggggctgcagagagaatggtgccttttctcaccttctgagttaatgcccgacatctgccattggattcattgaccaaaggaagtcatttctactgtataaactcaggagtatcatagcccaacaagtaaataataaatgttcattggttttggaaggaaggaaaggtgagtattaccccaccaaataccagcgaagagcaccctggctttggccatctttccaaggttcataattgctgtgggcctggtgagccctgttcccaggtatgcaagggagggcttctccaggccagacatttctgtaggttttcaggtagcaactcccccatcatattttgggtgtcattccccactctctctccccacttctcagcctgtgccccagaaacaaccacagcagcctcattctgcagacttaacatctgtcaaataaccttcctgaaaaggaaagttattggaggaatccaggccaaacaacaagtagaatagagccatctaaagttattaataatgagttcagggaaatagatgaattttttcctggcatagtcaatatttatatctcacaacaagtcaaaaataattttccatttggaaaacaaaacacaccatgactgtaattgttaaggcatataatcatgaacttcacatgctccctcaacaaacgttactgctctagggaaatcatagaaaaggaccctcttactccccaggggatcaaagcaagtccccttaggaatttcatgtgtgccgtgggtctgtttttatttcacagtgactagtcatatactggagtagctctgttgttcattatttgtaacaggtccatgtaacagtcaagttagcattcaagcaattatggatgtgatactatgatgtacttttgttatgattgtatatgcttaataacaaagttatttttcttaaaaaaaaaaaaaaaaa

SEQ ID NO: 798 - DNA, 2258 bp, Homo sapiens
acagcgccctgcagcgcaggcgacggaaggttgcagaggcagtggggcgccgaccaagtggaagctgagccaccacctcccactccccgcgccgccccccagaaggacgcactgctctgattggcccggaagggttcaggagctgcccagcctttgggctcggggccaaaggccgcaccttcccccagcggccccgggcgaccagcgcgctccggccttgccgccgccacctcgcggagaagccagccatgggcgccgccggctcctccgcgctggcgcgctttgtcctcctcgcgcaatcccggcccgggtggctcggggttgccgcgctgggcctgaccgcggtggcgctgggggctgtcgcctggcgccgcgcatggcccacgcggcgccggcggctgctgcagcaggtgggcacagtggcgcagctctggatctaccctgtgaaatcctgcaagggggtgccggtgagcgaggcggagtgcacggccatggggctgcgcagcggcaacctgcgggacaggttttggcttgtgatcaaccaggagggaaacatggttactgctcgccaggaacctcgcctggtcctgatttccctgacctgcgatggtgacaccctgactctcagtgcagcctacacaaaggacctactactgcctatcaaaacgcccaccacaaatgcagtgcacaagtgcagagtgcacggcctggagatagagggcagggactgtggcgaggccaccgcccagtggataaccagcttcctgaagtcacagccctaccgcctggtgcacttcgagcctcacatgcgaccgagacgtcctcatcaaatagcagacttgttccgacccaaggaccagattgcttactcagacaccagcccattcttgatcctttctgaggcgtcgctggcggatctcaactccaggctagagaagaaagttaaagcaaccaacttcaggcccaatattgtaatttcaggatgcgatgtctatgcagaggattcttgggatgagcttcttattggtgacgtggaactgaaaagggtgatggcttgttccagatgcattttaaccacagtggacccagacaccggtgtcatgagcaggaaggaaccgctggaaacactgaagagttatcgccagtgtgacccttcagaacgaaagttatatggaaaatcaccactctttgggcagtattttgtgctggaaaacccagggaccatcaaagtgggagaccctgtgtacctgctgggccagtaatgggaaccgtatgtcctggaatattagatgccttttaaaaatgttctcaaaaatgacaacacttgaagcatggtgtttcagaactgagacctctacattttctttaaatttgtgattttcacatttttcgtcttttggacttctggtgtctcaatgcttcaatgtcccagtgcaaaaagtaaagaaatatagtctcaataacttagtaggacttcagtaagtcacttaaatgacaagacaggattctgaaaactccccgtttaactgattatggaatagttctttctcctgcttctccgtttatctaccaagagcgcagacttgcatcctgtcactaccactcgttagagaaagagaagaagagaaagaggaagagtgggtgggctggaagaatatcctagaatgtgttattgcccctgttcatgaggtacgcaatgaaaattaaattgcaccccaaatatggctggaatgccacttcccttttcttctcaagccccgggctagcttttgaaatggcataaagactgaggtgaccttcaggaagcactgcagatattaattttccatagatctggatctggccctgctgcttctcagacagcattggatttcctaaaggtgctcaggaggatggttgtgtagtcatggaggacccctggatccttgccattcccctcagctaatgacggagtgctccttctccagttccgggtgaaaaagttctgaattctgtggaggagaagaaaagtgattcagtgatttcagatagactactgaaaacctttaaagggggaaaaggaaagcatatgtcagttgtttaaaacccaatatctattttttaactgattgtataactctaagatctgatgaagtatattttttattgccattttgtcctttgattatattgggaagttgactaaacttgaaaaatgtttttaaaactgtgaataaatggaagctactttgactagtttcagaaaaaaaaaaaaaaaa

SEQ ID NO: 799 - DNA, 1723 bp, Homo sapiens
ctccgagtgtccacaccctgtgcgtctctctgtcctgccagcactgagggctcatccatccgcagagcagggcagtgggaggagacgccatgacccccatcctcacggtcctgatctgtctcgggctgagtctgggccccaggacccacgtgcaggcagggcacctccccaagcccaccctctgggctgagccaggctctgtgatcatccagggaagtcctgtgaccctcaggtgtcaggggagccttcaggctgaggagtaccatctatatagggaaaacaaatcagcatcctgggttagacggatacaagagcctgggaagaatggccagttccccatcccatccatcacctgggaacacgcagggcggtatcactgtcagtactacagccacaatcactcatcagagtacagtgaccccctggagctggtggtgacaggagcctacagcaaacccaccctctcagctctgcccagccctgtggtgaccttaggagggaacgtgaccctccagtgtgtctcacaggtggcatttgacggcttcattctgtgtaaggaaggagaagatgaacacccacaacgcctgaactcccattcccatgcccgtgggtggtcctgggccatcttctccgtgggccccgtgagcccgagtcgcaggtggtcgtacaggtgctatgcttatgactcgaactctccctatgtgtggtctctacccagtgatctcctggagctcctggtcccaggtgtttctaagaagccatcactctcagtgcagccaggtcctatggtggcccccggggagagcctgaccctccagtgtgtctctgatgtcggctacgacagatttgttctgtataaggagggagaacgtgacttcctccagcgccctggttggcagccccaggctgggctctcccaggccaacttcaccctgggccctgtgagcccctcccacgggggccagtacagatgctacagtgcacacaacctctcctccgagtggtcggcccccagtgaccccctggacatcctgatcacaggacagttctatgacagaccctctctctcggtgcagccggtccccacagtagccccaggaaagaacgtgaccctgctgtgtcagtcacgggggcagttccacactttccttctgaccaaggagggggcaggccatcccccactgcatctgagatcagagcaccaagctcagcagaaccaggctgaattccgcatgggtcctgtgacctcagcccacgtggggacctacagatgctacagctcactcagctccaacccctacctgctgtctctccccagtgaccccctggagctcgtggtctcagcatccctaggccaacacccccaggattacacagtggagaatctcatccgcatgggtgtggctggcttggtcctggtggtcctcgggattctgctatttgaggctcagcacagccagagaagcctacaagatgcagccgggaggtgaacagcagagaggacaatgcatccttcagcgtggtggagcctcagggacagatctgatgatcccaggaggctctggaggacaatctaggacctacattatctggactgtatgctggtcatttctagagacagcaatcaatatttgagtgtaaggaaactgtctggggtgattcctagaagatcattaaactgtggtacatttttttgtctatgaaaaaaaaaaaaaaaaaaaaa

SEQ ID NO: 800 - DNA, 802 bp, Homo sapiens
cgacgttcgcagcgctacccttttccgctccacggtgacctccgtgcggccgggtgcgggcggagtcttcctcgatcccgtggtgctccgcggcgcggccttgctctcttccggtcgcgggacaccgggtgtagagggcggtcgcggcgggcagtggcggcagaatgttggctaccagggtatttagcctagttggcaagcgagcaatttccacctctgtgtgtgtacgagctcatgaaagtgttgtgaagagcgaagacttttcgctcccagcttatatggatcggcgtgaccaccccttgccggaggtggcccatgtcaagcacctgtctgccagccagaaggcactgaaggagaaggagaaggcctcctggagcagcctctccatggatgagaaagtcgagttgtatcgcattaagttcaaggagagctttgctgagatgaacaggggctcgaacgagtggaagacggttgtgggcggtgccatgttcttcatcggtttcaccgcgctcgttatcatgtggcagaagcactatgtgtacggccccctcccgcaaagctttgacaaagagtgggtggccaagcagaccaagaggatgctggacatgaaggtgaaccccatccagggcttagcctccaagtgggactacgaaaagaacgagtggaagaagtgagagatgctggcctgcgcctgcacctgcgcctggctctgtcaccgccatgcaactccatgcctatttactggaaacctgttatgccaaacagttgtaccactgctaataaatgaccagtttacctgaaa

SEQ ID NO: 801 - DNA, 465 bp, Homo sapiens
atacagtgacctcgggcggcgggtcacgtcggccgggcatggctgcatggagcccggccgcggcagcgcctctcctccgcgggatccgcgggcttccacttcaccatcggatgtttgccactcagactgagggggagctcagagtgacccaaattctcaaagaaaagtttccacgagctacagctataaaagtcactgacatttcaggcactaaaagaagaaatcaaagagatgcatggattgcggatatttacctctgtccccaaacgctgaccacgccctggctgcatagatgctgctgcttaagaccttggatgaacttcactgacatcattcttccctaagcagtcaccaaaaaatttatatattttgctcatatacatttccatattataattatagaagatgtataatctatttagatgttaattaaaggaaacaaacaactgaagcttttgaagggtc

SEQ ID NO: 802 - DNA, 3288 bp, Homo sapiens
atggaccaccaggacccctactccgtgcaggccacagcggccatagcggcggccatcaccttcctcattctctttaccatcttcggcaacgctctggtcatcctggctgtgttgaccagccgctcgctgcgcgcccctcagaacctgttcctggtgtcgctggccgccgccgacatcctggtggccacgctcatcatccctttctcgctggccaacgagctgctgggctactggtacttccggcgcacgtggtgcgaggtgtacctggcgctcgacgtgctcttctgcacctcgtccatcgtgcacctgtgcgccatcagcctggaccgctactgggccgtgagccgcgcgctggagtacaactccaagcgcaccccgcgccgcatcaagtgcatcatcctcactgtgtggctcatcgccgccgtcatctcgctgccgcccctcatctacaagggcgaccagggcccccagccgcgcgggcgcccccagtgcaagctcaaccaggaggcctggtacatcctggcctccagcatcggatctttctttgctccttgcctcatcatgatccttgtctacctgcgcatctacctgatcgccaaacgcagcaaccgcagaggtcccagggccaagggggggcctgggcagggtgagtccaagcagccccgacccgaccatggtggggctttggcctcagccaaactgccagccctggcctctgtggcttctgccagagaggtcaacggacactcgaagtccactggggagaaggaggagggggagacccctgaagatactgggacccgggccttgccacccagttgggctgcccttcccaactcaggccagggccagaaggagggtgtttgtggggcatctccagaggatgaagctgaagaggaggaagaggaggaggaggaggaggaagagtgtgaaccccaggcagtgccagtgtctccggcctcagcttgcagccccccgctgcagcagccacagggctcccgggtgctggccaccctacgtggccaggtgctcctgggcaggggcgtgggtgctataggtgggcagtggtggcgtcgacgggcgcagctgacccgggagaagcgcttcaccttcgtgctggctgtggtcattggcgtttttgtgctctgctggttccccttcttcttcagctacagcctgggagccatctgcccgaagcactgcaaggtgccccatggcctcttccagttcttcttctggatcggctactgcaacagctcactgaaccctgttatctacaccatcttcaaccaggacttccgccgtgccttccggaggatcctgtgccgcccgtggacccagacggcctggtgagcccgcctgcgctgcccctgtggggttggtgcggtggcgccggggtcaccctgcttcttgccctgctgtgtgtggctgcctcccctgggctttctgctccctgcccagatcctgtaggcctcatcttaggaaccccttgggaggggtgggcaggggggctgctagcaagggtcccagtgaagcttccccttgccggcttagctgtgggggaccccttctccaccctctccctgagcacaggccgatggaggtggttcaaatcctctggaacatagccaagaccaggagaagagagagcactttcttcccagagccccatgctctccagaccaatgtctgggcttccctttcttgaggaccttgtgttcctggcaggtcacttgcttgtggtgttttcgtttctttttcatctcccccccacccacaaagagcacggagccagccttccacttttcccagtggggcctgctgctgagggggaggaagaaacgaagactgatcacccacgctaggcactcgcggtccctggcaggcgctgggatgggggcttatggggtggcatcgtctctgggccctcctttccccctttgcctgttttcggatctgtggttcctttgaaagccagaacaatggatcggcttccttacccagcacccctccggtaggtgggtggccacgtggatgcctcgctggggcggtcttggaggcctggtctctgcctcgacgggagatccccgatcactggcattcaccccctgcaaaaatcggggcgacaatagctcactgcctacttgctgcagggagatgaaaggctttgcagaaagctttgagctctgtgggggaacacactagagaaccaaaaatgtgattatatggtgatataaaaatccctttcctctgtgtttaccaccacctgtcttcctgtagacttttgttctgtccctggggtgtgtgaattcctaccccgaactggaagccgggagtggcagacagaatcactatttcaagttaaaggatctctttgagaatgtgttcttctggctgcaaaggtctgagttattacgctacatgacaacgtttcgacatttcaccggcaacaccaagagggtttttagtggcttgggtctccccagtgggggataagtcttttgtcatcaaggaggcaaattgtctccccaagacagctcaaaatatccacacctcggcaacagtctaagatgagagcctgtgacaggtggcagcgcccccaggtggggtactggcatcagagcctggtgcgcccctaggggagcctcccactggagtgcccggccaggtctccaagccccaaatgagtccttgtgaaccacaactgatccccccaggtgggtgcttgtggactgcctcggacccagccacgctgctccccgcaatgctgatggggctgtgcattgaggacccctgcttcctggttctcagtcccaccccaaaacctggcacccagaacagttggaagtgtggaaaggaggtttatcggccttcccttggagagggcctggcttcaacattgggccagtaggcatcttagcttggcaggtgtcgggggaatgggccagatggacctgctagatttggaagggcaccgagggagttttctgggtgtagagagaatggaggggaccaaaaagagtccttcctggggtgtgggaggcttcccagcttggtcctcagtgggttgttgaggccagagtatcgccctgggatgtggtggggagctgggccaggagagggactgactgtgaccctctgctggccggtcttgtgtgcgccccatgggacccccagtgttcttgcctgtgacctcttattgcgacatgcaggtggtgttttttttttttttaaactctgagctattttatcaataaaggatattttgtaataagaaaaaaaaaaaaa

SEQ ID NO: 803 - DNA, 3887 bp, Homo sapiens
gactgcgcaggcgtgctcacctggcgtgctccacccgactgggcgtccgcaggctcctcccccgggtgtggcctccgggcggcatggctgcttcccaggtgatgccggcttcagctagtggggtctagttgaccgttccgcagccgccagggccagcggaaagccggtcagggggaaccgcggcggggctggtgtcatgagcctgaggtgaacttgagggtgcctcctcagcggtctcccgccctgccctgaggggcgccgggaccccaaagagcggaggaagagcgccaccccgacggccaccgcttcggagccagcacgcggggtaccctacggggagcgcggatgcccccgtgttcgggcggggacggctccacccctcctgggccctcccttcgggacagggactgtcccgcccagagtgctgaatacccgcgcgaccgtctggatccccgcccaggaagcccctctgaagcctcctcgccgccgtttctgagaagcagggcacctgttaactggtaccaagaaaaggcccaagtgtttctctggcatctgatggtgtctggatccaccactctactctgtctctggaaacagcccttccacgtctctgcattccctgtcaccgcgtcactggccttcagacagagccaaggtgcagggcaacacctctacaaggatctgcagccatttatattgcttaggctactgatgcctgaggaaacccagacccaagaccaaccgatggaggaggaggaggttgagacgttcgcctttcaggcagaaattgcccagttgatgtcattgatcatcaatactttctactcgaacaaagagatctttctgagagagctcatttcaaattcatcagatgcattggacaaaatccggtatgaaagcttgacagatcccagtaaattagactctgggaaagagctgcatattaaccttataccgaacaaacaagatcgaactctcactattgtggatactggaattggaatgaccaaggctgacttgatcaataaccttggtactatcgccaagtctgggaccaaagcgttcatggaagctttgcaggctggtgcagatatctctatgattggccagttcggtgttggtttttattctgcttatttggttgctgagaaagtaactgtgatcaccaaacataacgatgatgagcagtacgcttgggagtcctcagcagggggatcattcacagtgaggacagacacaggtgaacctatgggtcgtggaacaaaagttatcctacacctgaaagaagaccaaactgagtacttggaggaacgaagaataaaggagattgtgaagaaacattctcagtttattggatatcccattactctttttgtggagaaggaacgtgataaagaagtaagcgatgatgaggctgaagaaaaggaagacaaagaagaagaaaaagaaaaagaagagaaagagtcggaagacaaacctgaaattgaagatgttggttctgatgaggaagaagaaaagaaggatggtgacaagaagaagaagaagaagattaaggaaaagtacatcgatcaagaagagctcaacaaaacaaagcccatctggaccagaaatcccgacgatattactaatgaggagtacggagaattctataagagcttgaccaatgactgggaagatcacttggcagtgaagcatttttcagttgaaggacagttggaattcagagcccttctatttgtcccacgacgtgctccttttgatctgtttgaaaacagaaagaaaaagaacaacatcaaattgtatgtacgcagagttttcatcatggataactgtgaggagctaatccctgaatatctgaacttcattagaggggtggtagactcggaggatctccctctaaacatatcccgtgagatgttgcaacaaagcaaaattttgaaagttatcaggaagaatttggtcaaaaaatgcttagaactctttactgaactggcggaagataaagagaactacaagaaattctatgagcagttctctaaaaacataaagcttggaatacacgaagactctcaaaatcggaagaagctttcagagctgttaaggtactacacatctgcctctggtgatgagatggtttctctcaaggactactgcaccagaatgaaggagaaccagaaacatatctattatatcacaggtgagaccaaggaccaggtagctaactcagcctttgtggaacgtcttcggaaacatggcttagaagtgatctatatgattgagcccattgatgagtactgtgtccaacagctgaaggaatttgaggggaagactttagtgtcagtcaccaaagaaggcctggaacttccagaggatgaagaagagaaaaagaagcaggaagagaaaaaaacaaagtttgagaacctctgcaaaatcatgaaagacatattggagaaaaaagttgaaaaggtggttgtgtcaaaccgattggtgacatctccatgctgtattgtcacaagcacatatggctggacagcaaacatggagagaatcatgaaagctcaagccctaagagacaactcaacaatgggttacatggcagcaaagaaacacctggagataaaccctgaccattccattattgagaccttaaggcaaaaggcagaggctgataagaacgacaagtctgtgaaggatctggtcatcttgctttatgaaactgcgctcctgtcttctggcttcagtctggaagatccccagacacatgctaacaggatctacaggatgatcaaacttggtctgggtattgatgaagatgaccctactgctgatgataccagtgctgctgtaactgaagaaatgccaccccttgaaggagatgacgacacatcacgcatggaagaagtagactaatctctggctgagggatgacttacctgttcagtactctacaattcctctgataatatattttcaaggatgtttttctttatttttgttaatattaaaaagtctgtatggcatgacaactactttaaggggaagataagatttctgtctactaagtgatgctgtgataccttaggcactaaagcagagctagtaatgctttttgagtttcatgttggtttattttcacagattggggtaacgtgcactgtaagacgtatgtaacatgatgttaactttgtggtctaaagtgtttagctgtcaagccggatgcctaagtagaccaaatcttgttattgaagtgttctgagctgtatcttgatgtttagaaaagtattcgttacatcttgtaggatctactttttgaacttttcattccctgtagttgacaattctgcatgtactagtcctctagaaataggttaaactgaagcaacttgatggaaggatctctccacagggcttgttttccaaagaaaagtattgtttggaggagcaaagttaaaagcctacctaagcatatcgtaaagctgttcaaaaataactcagacccagtcttgtggatggaaatgtagtgctcgagtcacattctgcttaaagttgtaacaaatacagatgagttaaaagatattgtgtgacagtgtcttatttagggggaaaggggagtatctggatgacagttagtgccaaaatgtaaaacatgaggcgctagcaggagatggttaaacactagctgctccaagggttgacatggtcttcccagcatgtactcagcaggtgtggggtggagcacacgtaggcacagaaaacaggaatgcagacaacatgcatcccctgcgtccatgagttacatgtgttctcttagtgtccacgttgttttgatgttattcatggaataccttctgtgttaaatacagtcacttaattccttggccttaaaa

SEQ ID NO: 804 - DNA, 1268 bp, Homo sapiens
ctgactctctgaggctcattttgcagttgttgaaattgtccccgcagttttcaatcatgtctgaaccaatcagagtccttgtgactggagcagctggtcaaattgcatattcactgctgtacagtattggaaatggatctgtctttggtaaagatcagcctataattcttgtgctgttggatatcacccccatgatgggtgtcctggacggtgtcctaatggaactgcaagactgtgcccttcccctcctgaaagatgtcatcgcaacagataaagaagacgttgccttcaaagacctggatgtggccattcttgtgggctccatgccaagaagggaaggcatggagagaaaagatttactgaaagcaaatgtgaaaatcttcaaatcccagggtgcagccttagataaatacgccaagaagtcagttaaggttattgttgtgggtaatccagccaataccaactgcctgactgcttccaagtcagctccatccatccccaaggagaacttcagttgcttgactcgtttggatcacaaccgagctaaagctcaaattgctcttaaacttggtgtgactgctaatgatgtaaagaatgtcattatctggggaaaccattcctcgactcagtatccagatgtcaaccatgccaaggtgaaattgcaaggaaaggaagttggtgtttatgaagctctgaaagatgacagctggctcaagggagaatttgtcacgactgtgcagcagcgtggcgctgctgtcatcaaggctcgaaaactatccagtgccatgtctgctgcaaaagccatctgtgaccacgtcagggacatctggtttggaaccccagagggagagtttgtgtccatgggtgttatctctgatggcaactcctatggtgttcctgatgatctgctctactcattccctgttgtaatcaagaataagacctggaagtttgttgaaggtctccctattaatgatttctcacgtgagaagatggatcttactgcaaaggaactgacagaagaaaaagaaagtgcttttgaatttctttcctctgcctgactagacaatgatgttactaaatgcttcaaagctgaagaatctaaatgtcgtctttgactcaagtaccaaataataataatgctatacttaaattacttgtgaaaaacaacacattttaaagattacgtgcttcttggtacaggtttgtgaatgacagtttatcgtcatgctgttagtgtgcattctaaataaatatatattcaaatg

SEQ ID NO: 805 - DNA, 3227 bp, Homo sapiens
cttgaggctcggctgaggatgccgggaagggctggtggtcgggggcctagagcggcggttgcacttagttgcggctgctgtcaccatgtcccgcgttttggtgccttgccatgtgaaaggctccgtagccctccaggtgggcgacgtgcggacctcccaaggccggcctggcgtgctggtcatcgatgtcaccttccccagcgtcgctcccttcgagttgcaggaaatcacgtttaagaattactacacagcttttttgagcatccgtgtccgtcagtacacctcagcacacacacctgccaagtgggtgacctgcctgcgggactactgcctaatgcctgacccacacagtgaggagggagcccaggagtatgtatcgctgttcaagcatcagatgctgtgtgacatggctagaatatcggagctacgcctgattctgcggcagccatcaccactgtggctgtctttcacagtggaggagctgcagatctatcagcagggaccaaagagcccctccgtgacctttcccaagtggctctcccacccagtgccctgtgagcaacctgcactcctccgtgagggtctcccagaccccagcagggtatcctccgaggtgcagcagatgtgggcactgacagagatgatccgggccagtcacacctccgcaaggatcggccgctttgatgtggatggctgttatgacctgaacttgctctcctacacttgaatggttgctcctagccaagatgttggcctttctgtgcccacccagacttggtttgggccaccagaggctgaagtgtatttcctgtgcattccaagtgttgcctgcatgcctgttctgtctgggccacattcacagattcaggattctcaggggcttaccgtgttacttcagcatgagctcctggcatgggggtgctctgtcttcgcctggctgcaactcaattcttccttctacccaaaaacactccagtcagttgtacttactgagaatccctgagtgccctctgccccttctggcaacatgcacattcctgtcttctgcctgctccctcatgtcagtgcagttgggctgggctgacctactaaaacctgctccatgtatggacctggaaggccattgctgccatggcacttgggacacttgaggaagaaacagaaaccttatttcttcctgtgtgtcccctagtggttttctttccatttgtgttatgccacagagagaaatttcctgtctgaactcttctgctgcctgcctaggaaggaaacctgaagatttgggcagcctgagtctcttggtttctgagctggctcctgaatatatgttcaagtgggtgtgcccatagggcctgggcacgtgtctctagcaaaaccagggcctgagcataagaactgggacccttctaggcagggtgcagtggctcacgcctgtaatcccagcactttgggaggcccaggcaggcggatcacctgaggtcaggagttcaagaccagcctgaccaacctggagaaaccccgtctctactaaaaatacaaaaaattagctgggcgtggtggtaggcacctgtaatcccagctacttgggaggctgaggcaggagaatctcttgaacccgggaagtggaggttgcggacctgagatcatgccattgcactccagcctgggcaagaagagcgaaactccatcttaaacaaacaaacaaaaaaaaaagaactgggacccttctgccatctgacatagcccaaagcacatctctatcctttctcccagttgcccctctccttttttgttgttttttttgaggttgagttttgctcttgttgcccaggctggagtgcaatagtgcaatcttggctaactgcaacctccgcctcccaggttcaagcaattctcctgcctcagtctcccgagtagctgggattacagtcatgcatcaccatgcctggctaattttgtatttgtagtagagatggggtttctccatgttggtcaggctggtctcaaacacctgacctcaggtgatctgcctgccttggccttccaaagtgctgggattacaggcatgagccaccgcgcccgccctgcccctttccaagagatatgctcagcataatgagagatcaaccgtggtggggagtgggtccaagtaagggttctcattgttgccttttaagaggcctaagtcctgcattaactcagtccaaccattaagtgatgcaggctgctcttccctcatgtgagaaaaacctgtttccctctggttcttcctggctttgcacctggtggctattacaaagcagtactgcagtatgtcttggacctggaaagttggacatgtgtgtggctcaacagttttctcgggggagttcagtgaccttttggtggccaccctctgttctcacctgtgagttcttgcaggtggcgacttcatctgcaaggtcacttacatagccccactcagctgcttcggaaagcgtgacgaagcagtagtcctcagtgtgtgtgtaagtgaagaggaccttgtggtagcagggaccatgcttcattcgtggctgtgtccccatctgagggcctggtatgcagtaagatcaataaatacttgtggaatgcatgactgctggctgcctgtgtctgcctggtgggagagctgtggaactaggggtccacatgaggacagactactgtggtgctgcctacctgccaggctggcccaccttccccacccccacttgaccttactctcttgaggtcctaaaggtatgattcagacctttcagccctttccagaactttgaccctctggagacagggcggttctgcagggggcggtctagcccctagctttgttctgggcagcccaatcagctctggattgcccgagctgccctgaagagtcagccgaaagagctggaggcttcttccctgtggttgcgggttcctgcattctctgctctaaatcccagcctgcccttggggctgcccacgcccccttcagatcctttgctccggagagagacctgtccgagcagaggcctggactacatctcccggcgtgcctggcagtgtggtggcctctgtgcgccgtctgcactcgttgcaggcgacgatgcagagggctgtaagtgtggtggcccgtctgggctttcgcctgcaggcattccccccggccttgtgtcgtccacttagttgcgcacaggtgggatagagggtgctgatcttggagg

SEQ ID NO: 806 - DNA, 6462 bp, Homo sapiens
ggcctttctcgtcttttaagggtttttacttccatggggaactatgtgttggatgagaaaagtatccggggaaggggacagaggttcagaaagctctgcgagtcctggacgctggtctgccttcttggctcaccctggaaggtggacgctggccccacacatcccctcttaaagacgcaggccgatagccagcagatcctggggcttgctggccccaagtgagttgtcagggtttcagaggacaccagtcatggcaaccccagctccatggctgccacacaggcctgggcttcccaggactgcctccttcttgttcgcttatgtagatgaaaaatgaggtaacggcactcccctgccccaccctcctcccagaagtgcccagggtgtaaacgcaatagcttgtgtgaagtccactggaacccaggctcaccaagtcagtcttaaccaacacaggccccagcacccgcagagcagacactgcgatgacaacggacgacacagaagtgcccgctatgactctagcaccgggccacgccgctctggaaactcaaacgctgagcgctgagacctcttctagggcctcaaccccagccggccccattccagaagcagagaccaggggagccaagagaatttcccctgcaagagagaccaggagtttcacaaaaacatctcccaacttcatggtgctgatcgccacctccgtggagacatcagccgccagtggcagccccgagggagctggaatgaccacagttcagaccatcacaggcagtgatcccagggaagccatctttgacaccctttgcaccgatgacagctctgaagaggcaaagacactcacaatggacatattgacattggctcacacctccacagaagctaagggcctgtcctcagagagcagcgcctcttccgacagcccccatccagtcatcaccccgtcacgggcctcagagagcagcgcctcttccgacggcccccatccagtcatcaccccgtcacgggcctcagagagcagcgcctcttccgacggcccccatccagtcatcaccccgtcatggtccccgggatctgacgtcactctcctcgctgaagccctggtgactgtcacaaacatcgaggttattaattgcagcatcacagaaatagaaacaacgacttccagcatccctggggcctcagacacagatctcatccccacggaaggggtgaaggcctcgtccacctccgatccaccagctctgcctgactccactgaagcaaaaccacacatcactgaggtcacagcctctgccgagaccctgtccacagccggcaccacagagtcagctgcacctgatgccacggttgggaccccactccccactaacagcgccacagaaagagaagtgacagcacccggggccacgaccctcagtggagctctggtcacagttagcaggaatccccttgaagaaacctcagccctctctgttgagacaccaagttacgtcaaagtctcaggagcagctccggtctccatagaggctgggtcagcagtgggcaaaacaacttcctttgctgggagctctgcttcctcctacagcccctcggaagccgccctcaagaacttcaccccttcagagacaccgaccatggacatcgcaaccaaggggcccttccccaccagcagggaccctcttccttctgtccctccgactacaaccaacagcagccgagggacgaacagcaccttagccaagatcacaacctcagcgaagaccacgatgaagcccccaacagccacgcccacgactgcccggacgaggccgaccacagacgtgagtgcaggtgaaaatggaggtttcctcctcctgcggctgagtgtggcttccccggaagacctcactgaccccagagtggcagaaaggctgatgcagcagctccaccgggaactccacgcccacgcgcctcacttccaggtctccttactgcgtgtcaggagaggctaacggacatcagctgcagccaggcatgtcccgtatgccaaaagagggtgctgcccctagcctgggcccccaccgacagactgcagctgcgttactgtgctgagaggtacccagaaggttcccatgaagggcagcatgtccaagcccctgaccccagatgtggcaacaggaccctcgctcacatccaccggagtgtatgtgtggggaggggcttcacctgttcccagaggtgtccttggactcaccttggcacatgttctgtgtttcagtaaagagagacctgatcacccatctgtgtgcttccatcctgcattaaaattcactcagtgtggcccagaggctgtctattgatctgcatgctttcgccatttttatagtacagggattgtgtatagtctcactgctacctcctccttctactcccccaggtcttggtttggactttgatgatagcatttactgagacgggcctggagcctgtcgaacagcccgctgcagcagggcagggaccacctttgttcatctcagtatcccctgaactagcagagtgtctggcctgcagtgggatcgcagagaatgtggaattgacctaaatttaaatttcaagttctggacacaagcctcaattattcctcttatatgttataacttacatgctattatttttttaaaaaattaatatggtttactttttattataaaagtaaaacttggccaggctcagtggctcacgcctgtaatcccagcactttgggaggccgaggccggtggatcacgaggtcaggagtttgagactagcctggccaacatggtgaaaccccgtctctactaaaaacacgaaaattagctgggtgtggtggcaggtgcctgtaatcccagctacccaggaggctgagacgggagaatcacttgaacccgggaggcagaggttgcagtgacccaagatcctaccactgcaccccagcctgggcaaaagggcaagactctgtctcataaataaataaatttaaaataaaagtaaaacttgtttatgatttcaaaattttgaaatattccaaagaccaagcaaagtaagaagtgggaagaggagaaagaaaaacttttctataatcccacctcttagatacaacgatttattttttaaaattgagacagggtctcactctcacccaaactgcagtgcagtggtgcgaccatggctcactgcagcctccacctcccagctccagtgatcctcccacctcagcctcctgaggagctgggaccacagctggctaatttttgtactttgttttgtaaaaaaggggctttaccatgttgagcaggttggtctcgatcttctgagctcaagcagtcctcctgcctcagactcgcaaagtgctgggattacagacatgagccactgtgcccagccttatatacagctattattattaatgtatactgtgtattcatttcaattcttaatctctccacttggatgttgatgaaatacatacctcacattcaacatttctttctttttttttttctttttgagatggaaaggagcctggctctgtcacccaggctggagtgcagtggcgtgatctcagctcactgcaagctccacctcttgggttcacgtgattctcctgcctcagcctcctgagtatctgggactacaggtgccaccaccatgctcggctaattttttgaatttttagtagagacggagtttcaccgtgtcagccagcctggtctcaaactcctgacctcaagtgatccacccacctcggcctcccaaagtgctgggattccagttaatgagcactgctcctggcctccacatttctaaaatcgaagttctgatcttttcctctggacctgccccacctgcatcttccccatctcagttaacgtcagttgcatccttcaggtgctcaggccgaaatcctcggcaccgtctttattcccctctcacattttgcaccaggaaattctgctggctctaaggccatcaaactgtgcccagaatgtggcccctcctcagcatctccagtgctaccaccgagatggtccacgatgccatcatctctcacctgcactactacaggtctccctgtttccagctcagcccccaccccagtctagtcccagtgtgtcagccagggctgtctttttacaacataaggcagaccacaccacttctttgctccaatcctcccatttcactcagaagaaaagctccgacaacagctgcaaagccgtgcacgacctgcgcccctcccctgcctccttaatttgctgactgcaccgcagccacacggacgtctttcttgtcccttgaatgcgctgggcctgctcttgccttgggacctttctgtgcattgcttagtctgctcagaagccttctcctctacatatccacttgtctaaaccctctacctccaccttcatgccccttctcagcgaggtctaccatgaccatgctgcctacaaattcagtctccccttctgtactttgacgtactttatagtgctgatcacaattgaacgtcatacatattttgttttctttattatctgagtcctccaactagaatgaaagattttgcccattatggtttccctagtgccaagaacagtacctggcacataccaggggctcagtaaacatttgttagatgaatgaaggaaacaaggagacaatgttgatgctgctgtgagcaaggggagtctgaacgtttgacagatcccttccatttctggagtggggcagaatgagtttcataaagtagctcggacaaaaataattcgctcatcttggcatatatgttgggcagctgccgcagaagagagactgagctatgtgccgtggaggattcaaatctgtctcttctcccagggattgaagttagacacgtacagcaataataagttgaaagaacttatttacaccgcatatagcaacaacaggatgcccttaatatatagagaactcttacagcgcaagaaaataaaaaggcaaacataccagtagaaaaatgggtaaatggcaacaggtaattcacaaaagaagaaatacaaatgtcctctcctcccgccaccaccccccatgaaaaagaacgtgtgacttcagtagcaaaaacaggtccattaatacagtgagatattgcttattgtatgtctgtactgatctatactgggtgctgggcaaacgggcattcttaaacactcctagtagggaagaaattggtacaacctttccggaggacaatttaactgatttatttaaagcccgaaaaatgtacatacctttaactcagcagtttcgttactgatttatcttaaggaagtaatttagaatctgtgcctaactgtttacaataactcatagatgaaaaaggcaaaacaaaacacaagtaacctcaaatctccccatgtaacagtttgcttaaacactatagcgttattttacgcaagctacagaagcattgttgaaacatatatttattaggacagaaaaaaattcatgaaatgttattttatcttcttttttcttaaaatggaacttaaaaaaaatttttttaactccaacctaccttttacaccatctgcagagctttcctctcccaaatcaaagctactcctgttcctacctccaggatggaatccccaccttcgtatgcaagggtcttcatgatatggcctcagccaactatcttagctccaggtcacggccccatcttccatatcctatgctgcttgcacaggaagcagctcgctaaccccaggcacacctgctttcatctggagcgtctgcccatcatgattcctccccctggtcccttcacctggaaaactcctattcattcctcaaagcccagttcagatggcacctctccatgacttcatcagattccctacagaggtgctgattttctggtctcttgtgtttctgttgtaacacttaacatgctgtattataatgtgcttattttatttacaagtttgttacattgtacgtgctcgaggacaagcagccggtagtattcacctctgtcatcacagaagctggcgtggagccctccacatgagggcactgatgtgtttgctgagtgactgggacaatggtgggccacgtgagccccgaaactttcagtgggctctgaaagttaagaaaagggcattcagtactgaaatcacacaaaacgtaaatttaatgatataattgttccgaagctgctctataatttggcatgaatggagagcagtttacaaaaatgacaacaccactgttatataaacccaattcttaaataggttttcttctcttgctttgtatttcctcaagtgggtgatacttaatacagtggctcatgtaatcttaattactacatatgaggacacggacatgtacatatgatgctgattactgttatttttggaagtaaaaaaattgtaaaatttgaaaaaaaaaaaaaaaaaa

SEQ ID NO: 807 - DNA, 1430 bp, Homo sapiens
aggcgggaggcgacgcctgcgcagtgcggtcgcggggctgtcgttgtcccgcgagccgccgaccaggcctcgaacgggatggcagaggaggtgagcaccctgatgaaggccacggtcctgatgcggcagcctgggcgggtgcaggagatcgtgggcgccctccgcaagggcggcggagaccggttacaggtgatttctgattttgacatgaccttgagcaggtttgcatataatggaaagcgatgcccttcttcttacaatattctggataatagcaagatcatcagtgaggagtgtcggaaagagctcacagcgctccttcaccactattacccaattgagatcgacccacaccggaccgtcaaggagaagctacctcatatggtggaatggtggaccaaagcacacaatctcctatgtcagcagaagattcagaagtttcagatagcccaggtggttagagagtccaatgcaatgctcagggagggatataagaccttcttcaacacactctaccataacaacattccccttttcatcttttctgcgggcattggtgatatcctggaagaaattatccgacagatgaaagtgttccaccccaacatccacatcgtgtctaactacatggattttaatgaagatggttttctccagggatttaagggccagctcatacacacatacaacaagaacagctctgcgtgtgagaactctggttacttccagcaacttgagggcaaaaccaatgtcatcctgctgggagactctatcggggacctcaccatggccgatggggttcctggtgtgcagaacattctcaaaattggcttcctgaatgacaaggtggaggagcggcgggagcgctacatggactcctatgacatcgtgctggagaaggacgagactctggatgtggtcaacgggctactgcagcacatcctgtgccagggggtccagctggagatgcaaggcccctgaaggcgcaggctccagcccggcctgcaggccgtggtgaggaggggcgcctccccagagtctgctcccccgtgaacacagagcagaggccagggtggccagcagtggctgggtccttccgcgcccctccgtcctcctttccctgagcaccttcatcaccagaggcttgaaggaaccccgccatgtggcagggcacaggcactgttcctggtgaaccttggaccacagcatgtcagtgctctagggattgtctactccagggattttcttcaaaatttttaaacatgggaagttcaaacaaatataatgtgtgaaacagatcaaaatttttaaaatgaaaaaaaagctgctctgattcaggggatgtgggtgggggtagaacctggacctcttggccctgggggcacatgggatgcttctaggaacacagtttgagaaccaccaaaaaaaaa

SEQ ID NO: 808 - DNA, 4607 bp, Homo sapiens
gtcagctgatgggctgcctgccgaggaggccgcagcagtcgccgcgcgaacatggcggccgaaatccactccaggccgcagagcagccgcccggtgctgctgagcaagatcgaggggcaccaggacgccgtcacggccgcgctgctcatccccaaggaggacggcgtgatcacggccagcgaggacagaaccatccgggtatggctgaaaagagacagtggtcaatactggcccagcatttaccacacaatggcctctccttgctctgctatggcttaccatcatgacagcagacggatatttgtgggccaggataatggagctgtaatggaatttcacgtttctgaagattttaataaaatgaactttatcaagacctacccagctcatcagaaccgggtgtctgcgattatcttcagcttggccacagagtgggtgatcagtaccggccacgacaagtgtgtgagctggatgtgcacgcggagcgggaacatgctcgggaggcacttcttcacgtcctgggcttcgtgtctgcaatatgactttgacactcagtatgctttcgttggtgattattctgggcagatcaccctgctgaagcttgaacagaacacgtgttcagtcatcacaaccctcaaaggacatgaaggtagtgtcgcctgcctctggtgggaccctattcagcggttactcttctcaggagcatctgacaacagcatcatcatgtgggacatcggaggaaggaaaggccggacgctgttacttcagggccatcatgacaaggtgcagtcgctgtgctaccttcagctcaccaggcagctcgtctcctgttcctcggacggcggaattgcagtgtggaacatggatgttagcagagaagaggctcctcagtggttggaaagtgattcttgtcagaaatgtgagcagccatttttctggaacataaagcagatgtgggacaccaagacgctggggctaagacaacatcactgcaggaaatgcgggcaggctgtctgcgggaagtgcagcagcaagcgctcaagttacccagtcatgggcttcgagttccaagtccgggtttgtgattcttgttacgactccatcaaagatgaagatcggacttctctagcgacctttcatgaaggaaaacataacatttcccacatgtccatggacattgccaggggactgatggtgacctgtgggaccgaccgcattgtaaagatctgggacatgacacctgtggtgggctgcagtctggcgactgggttttctccgcactgatctgagagctgggcggcgtccacacctaagaacagcagctccaccaaatgaagtccctctcacgcagctccacagcgctgtctcgtgaatggacagtagccacttacaaacaaatcaacatttttaaaaagaaaatgtaaaggtgtgttttggggcatttgtggaacttacccatggggactaatatggaaaaggtctgtccatagtggttccctgaagactggaattacttcagcaaaacttccccatgaacagctaatgtgtagtgaaagaatgagctagcaaatgagttttagcggggacaaaaaatcaaacaaaaaagtgaatgcttagaaccttctcaaagcagtcacaagtacagacacttcacttagcctagggggccttccagggttcttgtggctgttgtcagagcaggagctgggggagggaagacttgttctctctttcttgaggggtggcattaggaacttacgaaaccagagacctttccctatgacttggcagtatgtgaatatcctctacacttagttattgataaacttcttaaagagatctgttattttcaggtagtgccataatctgcacttagcattggcttgcttcagttgtttctcttcccagccagtatgccacaggtgaactttcggggttgtcattaagtaagttgtgaaatttctgtaataacaaaggcagtccgcattcttccctttcccccaaattcctagggcaaaacttttttatggtgctgttaacatgggagtcacacaagccgcctgactttttctcattgccattagtaatgactgatggaaaacccagccaccactgtgatgcgaaatgatcagtctgttgcctgaaacagcccagtcctcttaactgaaacagcattctacttcttgttccaagatgagcctctgcaatattctggcaatttaatataccccctacaaaagcactccacagcttttacactattttgactttgagttataactagtattattcatgttttcataaaaagaagttagtgacccagagctataatcatccatcaagtcttccacaataattcccaactcataaattgctttcctaacaactagcaaaagctattgttcataatggcatttctaaagcttttgggcactgtgtaccaggatgaggaagagaagaaatgaggagcctgtcttttaatattccagtatttgtgtgtttgattttttttgacaacagtacatatatctatttctctagggatatggaagtaagtggagaagggcctacctttttaaaggacaaatataaaaatagcaacagtatctttgctaatcttactaatagatattgattaaaaaaaaaaaacctcagtactgcatcactgtgttgggatcgtaccaggacaatagggtcattccatatgataaaactaaaggactaaatttgttttataatgatgtcttagagggactgaaaagtttaaggaggcgatcaaactaaaatgtcttaatggctgtgtgacacacgtaaggaaaggaaagggggtcacgcacatcatgtactggaatgatctgcattaaacattgacttgtcttcagaaataagactgaagggttttgttgttccttagagttttcgtgttacatcacctaaagagatttcttttaaaaactttctagactctttgcaaaatgtatattactaacatagtttggaagaaaaattgagtagtggtaagttttgttcaagcacaatgttgaatgttaagcttcctgtattaattttagttcagttaatggttcagcccatacaaaggtgctatcctagggattttatgaattcctgaaaggaaaatagaatatgatcaattccttgccctgtggaagagtgcagaactgtggttttgttttcctttgacttctgtaaaatgtgaccgtttgacatctgtggtagattgaacggaatatcacagctgctgagtttactccatagctttcaaaccttttttattttaagaaattcttgaaaaaccctatgttccatgggaacataaagttattatagtgcctcctaaggggttaatataaatcaaggaggaagtttatatttaaggaagaattggagtgacgtatcttagaaaaggaaaggctgatgtttccatatagcttgctctccaccaggcctatcatttttctttttagagacaaacgtgacaggctagtcttgtctctctcatatgctaggtagcaaatggggtgatatttttatagaagtgggcaaaaattattttctcaattttactgagtaggcacagaagaaaagtacagataggctgatggttattgccttattttgactgcatttctcttaaatggatcatttaaattagttcttcaagtaacagtttactggttgttccattcctgaatatgcaggctaatttgtacagatagggattaaggaatacagactattagagaagatccttatatttacatctagtatatatgtggtaaggaaatgccgattcttcattataaacaagttttaaaattgttctttcttagttcaaatgatagcaatacccctatagcattaggtagaaacaaattattcattacatcgtaaatctctttactatgtcctagctctgtcctgctacctaaaggatataaagaaatactattgctctagaatgtattactttgttctcccatgaaagaattcagtttgttagtacctatatttttaaactggtgaaactgacccaaatatgtaataaataccatagtagctcagacccaaggagatatttttctaaaatcagttttcgttaaagtacttctacttccgttattggatatggtatctcctaaagtgtaaaaaaaatctgttactatatagtgataaaccatctgctcatcgtaagtgtaaggcttaacaaataagtaatacatgctatatttattcaagtgtctattgcttaattgttaattgtgagcagatttattgaatgcctattctattttctgcagtttacaatacaataactctttgagtaagttgaagtttaattgtgcaacaaatttgtattagagtacaatttaaagtgtttttctctatagccttttttgactggggaagcaaggggtaatgttaattagtacactttgttcttgtactagctatgtttctataagatatggtgccctgtgtatcccagagatgctagaaaactgttctttgctcctatttgtgggttctgtttttgtgggtttttttttttgagaaaatgtacacaataaaacattccttgcttgtta

SEQ ID NO: 809 - DNA, 2684 bp, Homo sapiens
acgccgtagggggcgggccgttcgggcttggtttcctgggcgaccaccgctggctagtccgttagaggcgtgcgggcttcggaggcgtgcgggcttcgggtgccatggggactcctcccggcctgcagaccgactgcgaggcgctgctcagccgcttccaggagacggacagtgtacgcttcgaggacttcacggagctctggagaaacatgaagttcgggactatcttctgtggcagaatgagaaatttagaaaagaacatgtttacaaaagaagctttagctttggcttggcgatattttttacctccatacaccttccagatcagagttggtgctttgtatctgctatatggattatataatacccaactgtgtcaaccaaaacaaaagatcagagttgccctgaaggattgggatgaagttttaaaatttcagcaagatttagtaaatgcacagcattttgatgcagcttatatttttaggaagctacgactagacagagcatttcactttacagcaatgcccaaattgctgtcatataggatgaagaaaaaaattcaccgagctgaagttacagaagaatttaaggacccaagtgatcgtgtgatgaaacttatcacttctgatgtattagaggaaatgctgaatgttcatgatcattatcagaacatgaaacatgtaatttcagttgataagtccaagccagataaagccctcagcttgataaaggatgatttttttgacaatattaagaacatagttttggagcatcagcagtggcacaaagacagaaagaatccatccttaaagtcaaaaactaatgatggagaagaaaaaatggaaggaaattcacaagaaacggagagatgtgaaagggcagaatcattagcgaaaataaaatcaaaggccttttcagttgtcatacaggcatccaaatcaagaaggcatcgtcaagtcaaactcgactcttctgactctgattctgcatctggtcaagggcaagtcaaagcaactaggaaaaaagagaagaaagaaagattgaaaccagcaggaaggaagatgtctctcagaaacaaaggcaatgtgcagaatatacacaaggaagataaacctttaagtctgagtatgcctgtaattacagaagaagaagagaatgaaagtttgagtggaacagagttcactgcatccaagaagaggagaaaacactgaacaaagagcctggtgtagtttttaattttgagttttctgacagaagaaaagattgatattttgtgtattgaacaggaagactgccagtattaaaaaaatccttctgggaatctgtaggttatttcttggaaattgcaatacgtagttctagaataaaagtacaaaaaattagaataagaattctttaacattttctttaatgatttgcataaatggagataaaacttgtatttagtatgtaatagaaaaaattctgttattcgcagattgttactatttcctataaggttttgtgatactatactgtcctaatacagtctggtaatactattctattttatttaaaatattttttattgaaatattaatgtttattacatgcaaataactattttgtatctacagtcggataatggattttttattttgtatatttattctattttgtatattgttaagtgcaataaagtttttgccttgctttattttttaatacataaaacttacattctcataacgtgattgataacttaggaagttcacaatgtattttctacttctgcaattaaatattctttagtgcttgtttattattactaaatactaattaagtactaacaagtacttaaatactaatgtattaagtatttaagtactttctaataaaatctttaacaataataatgtaaatttcagaatgtgtctctggtacagaatagttgatattaacagaaaaaaaaaaatctgtagcttcatgaatatgccactctgttaatttcttgttccagacattttaatagagattgcttgagccatgttgtttgaattgctgccaatagcagaccatatccctatcatgttgttggctcaactgttttttttttttccctaatagagatggagtatcgctatgttgctcaggctggtcttgaactcctgggctcaagctatcctcctgcctcagcctcccaaagtactgggattataggtgtgagctactgtacccagccttaacctgtttcacagttgattatacttcatgctgttttccagcatggtattattaagggatttaaagtttgggttgcatgcctgtaatcccagcattttgggaggccgaggtgggcggatcacgaggtcaggagatcgagaccatcgtgactaacacagtgaaaccccgtctctaataaaaatacgaaaaattagccaggcgtggtggcgggcgcctgtaatcccagctactcgggaagctgaggcaggagaatggtgtgaacccagtgagccgagatcgtgccactgcactccagcctgggcaacagagtgagacttcgtctcaaaaaaaaaaaaaagtttgggttgaagatcaaattcgtgatatctctatatctaatctttaaaaatcagaatgctaatgctgacgcaaataaaattttcatttattagcaaaaaaaaaaaaaaaaaaaaaaaaaaaaa

SEQ ID NO: 810 - DNA, 655 bp, Homo sapiens
gcagccattttaattcatatttgagtgggcggtggcgattggtgttggcggtctggctcagctgggcagggggtaactttactgatttgggggtggtttttagtttaatttttcttttctagcttcccatcgacggtcagtgcgcacgttgtaatcagctgaggccatgtcaggagacggagccacggagcaggcagctgagtatgtcccagagaaggtgaagaaagcggaaaagaaattagaagagaatccatatgaccttgatgcttggagcattctcattcgagaggcacagaatcaacctatagacaaagcacggaagacttatgaacgccttgttgcccagttccccagttctggcagattctggaaactgtacattgaagcagaggttactattttattttattttttcttatatcagtattgcagcattcactgtagtgatagaaaacaagttaggaacatagccaattaggacaaggaggatttaaatgtgtcttacctttattttgtaaaataggtataaaggagtaattaaaatgaatttttgaaatttgggtcttttacaagctgatgattgttgcattttggagttgcaacaacattaaaacagtttcaatggtaaaaaaaaaaaaaaaaaaaaaaaaaaaaa

SEQ ID NO: 811 - DNA, 3453 bp, Homo sapiens
ctgtgagtacccaggaagctgcaccgtgtggcctggagctgtctatctgtccttccagccacctgtctgtccagccacccttccacagactgaggcttgacaccggagcatctgtacagagcaaggagaagacaagaacatgctctaaagcccttcacagcaagacccaggaagccgcgggcaaactcagactcgaagccctcccgcctcctgcccacaatggcctctgctgacaagaatggcgggagcgtgtcctctgtgtccagcagccgcctgcagagccggaagccacccaacctctccatcaccatcccgccacccgagaaagagacccaggcccctggcgagcaggacagcatgctgcctgagaggaagaacccagcctacttgaagagcgtcagcctccaggagccacgcagccgatggcaggagagttcagagaagcgccctggcttccgccgccaggcctcactgtcccagagcatccgcaagggcgcagcccagtggtttggagtcagcggcgactgggaggggcagcggcagcagtggcagcgccgcagcctgcaccactgcagcatgcgctacggccgcctgaaggcctcgtgccagcgtgacctggagctccccagccaggaggcaccgtccttccagggcactgagtccccaaagccctgcaagatgcccaagattgtggatccgctggcccggggccgggccttccgccacccggaggagatggacaggccccacgccccgcacccaccgctgacccccggagtcctgtccctcacctccttcaccagtgtccgttctggctactcccacctgccacgccgcaagagaatgtctgtggcccacatgagcttgcaagctgccgctgccctcctcaaggggcgctcggtgctggatgccaccggacagcggtgccgggtggtcaagcgcagctttgccttcccgagcttcctggaggaggatgtggtcgatggggcagacacgtttgactcctccttttttagtaaggaagaaatgagctccatgcctgatgatgtctttgagtcccccccactctctgccagctacttccgagggatcccacactcagcctcccctgtctcccccgatggggtgcaaatccctctgaaggagtatggccgagccccagtccccgggccccggcgcggcaagcgcatcgcctccaaggtgaagcactttgcctttgatcggaagaagcggcactacggcctcggcgtggtgggcaactggctgaaccgcagctaccgccgcagcatcagcagcactgtgcagcggcagctggagagcttcgacagccaccggccctacttcacctactggctgaccttcgtccatgtcatcatcacgctgctggtgatttgcacgtatggcatcgcacccgtgggctttgcccagcacgtcaccacccagctggtgctgcggaacaaaggtgtgtacgagagcgtgaagtacatccagcaggagaacttctgggttggccccagctcgattgacctgatccacctgggggccaagttctcaccctgcatccggaaggacgggcagatcgagcagctggtgctgcgcgagcgagacctggagcgggactcaggctgctgtgtccagaatgaccactccggatgcatccagacccagcggaaggactgctcggagactttggccacttttgtcaagtggcaggatgacactgggccccccatggacaagtctgatctgggccagaagcggacttcgggggctgtctgccaccaggaccccaggacctgcgaggagccagcctccagcggtgcccacatctggcccgatgacatcactaagtggccgatctgcacagagcaggccaggagcaaccacacaggcttcctgcacatggactgcgagatcaagggccgcccctgctgcatcggcaccaagggcagctgtgagatcaccacccgggaatactgtgagttcatgcacggctatttccatgaggaagcaacactctgctcccaggtgcactgcttggacaaggtgtgtgggctgctgcccttcctcaaccctgaggtcccagatcagttctacaggctctggctgtctctcttcctacatgctggcgtggtgcactgcctcgtgtctgtggtctttcaaatgaccatcctgagggacctggagaagctggccggctggcaccgtatcgccatcatcttcatcctcagtggcatcacaggcaacctcgccagtgccatctttctcccataccgggcagaggtgggcccggccggctcacagttcggcctcctcgcctgcctcttcgtggagctcttccagagctggccgctgctggagaggccctggaaggccttcctcaacctctcggccatcgtgctcttcctgttcatctgtggcctcctgccctggatcgacaacatcgcccacatcttcggcttcctcagtggcctgctgctggccttcgccttcctgccctacatcaccttcggcaccagcgacaagtaccgcaagcgggcactcatcctggtgtcactgctggcctttgccggcctcttcgccgccctcgtgctgtggctgtacatctaccccattaactggccctggatcgagcacctcacctgcttccccttcaccagccgcttctgcgagaagtatgagctggaccaggtgctgcactgaccgctgggccacacggctgcccctcagccctgctggaacagggtctgcctgcgagggctgccctctgcagagcgctctctgtgtgccagagagccagagacccaagacagggcccgggctctggacctgggtgcccccctgccaggcgaggctgactccgcgtgagatggttggttaaggcggggtttttctggggcgtgaggcctgtgagatcctgacccaagctcaggcacacccaaggcacctgcctctctgagtcttgggtctcagttcctaatatcccgctccttgctgagaccatctcctggggcagggtccttttcttcccaggtcctcagcgctgcctctgctggtgccttctcccccactactactggagcgtgcccttgctggggacgtggctgtgccctcagttgcccccagggctgggtgcccaccatgccccttcctctttctcctcctacctctgccctgtgagcccatccataaggctctcagatgggacattgtgggaaaggctttggccatggtctgggggcagagaacaaggggggagacacaagtagacctcaggtagaacgacactgggcggagccaccccagggcctgctcccagggagtgctcgaggcgcatcaggcccgttttttaccagtttatatcacggtcttcatttttaaaagtaacgctaactttgtacggacgatgtctcatggattaaataatattctttatggcagtaaaaaaaaaaa

SEQ ID NO: 812 - DNA, 1135 bp, Homo sapiens
ttcctcctccgagagcggacagatctctgggtgctgggcggtcatggcgctactagatgtatgcggagccccccgagggcagcggccggaatcggctctcccggttgcgggaagcgggcgtcgctcggacccaggacactacagtttctctatgcgatctccagagctcgctttaccccggggaatgcagcccacagaattcttccagtccctgggtggggacggagaaaggaacgttcagattgagatggcccatggcaccaccacgctcgccttcaagttccagcatggagtgattgcagcagtggattctcgggcctcagctgggtcctacattagtgccttacgggtgaacaaggtgattgagattaacccttacctgcttggcaccatgtctggctgtgcagcagactgtcagtactgggagcgcctgctggccaaggaatgcaggctgtactatctgcgaaatggagaacgtatttcagtgtcggcagcctccaagctgctgtccaacatgatgtgccagtaccggggcatgggcctctctatgggcagtatgatctgtggctgggataagaagggtcctggactctactacgtggatgaacatgggactcggctctcaggaaatatgttctccacgggtagtgggaacacttatgcctacggggtcatggacagtggctatcggcctaatcttagccctgaagaggcctatgaccttggccgcagggctattgcttatgccactcacagagacagctattctggaggcgttgtcaatatgtaccacatgaaggaagatggttgggtgaaagtagaaagtacagatgtcagtgacctgctgcaccagtaccgggaagccaatcaataatggtggtggtggcagctgggcaggtctcctctgggaggtcttggccgactcagggacctaagccacgttaagtccaaggagaagaagaggcctagcctgagccaaagagagagtacgggctcagcagccagaggaggccggtgaagtgcatcttctgcgtgttctctatttgaacaagcatttcccccagggaagtttctgggtgccccactaagtagaataaagaaaaacggttataaataaaaaaaaaaaaaaaaaaaa

SEQ ID NO: 813 - DNA, 4358 bp, Homo sapiens
gacgctcgaggggcgctcggctagtcccgccagagcgcgagccgccagcccgtaacggtcgccagtgtgaggggcgggagggaaagaagaggggtttaaattagattttttaaaacacagagcaagcgccagaggcgtcggcatcccaggtgtcgccgcttcctgctgcacagggctcggcgtacaggtccctccctcctcaagccccctccccttctcccgccctaccctctggggctctgcggcgcttaagaggcggccgcagcggcggatccggcggctgctgcagcccgggcggctgccgagaaggagggaggggaaacacaaagccggctacgcgctgcgagataacaagagtaatccacagacttaaaacatgagctcagatgccagccaaggcgtgattaccactcctcctcctcccagcatgcctcacaaagagagatattttgaccgcatcaatgaaaatgacccagaatacattagggagaggaacatgtctcctgatctacgacaagacttcaacatgatggagcagaggaaacgagttactcagatcctgcaaagtcctgcctttcgggaagacttggaatgccttattcaagaacagatgaagaaaggccacaacccaactggattactagcattacagcagattgcagattacatcatggccaattctttctcgggtttttcttcacctcctctcagtcttggcatggtcacacctatcaatgaccttcctggtgcagatacatcctcatatgtgaagggagaaaaacttactcgctgtaaacttgccagcctgtacagacttgtagacttgtttggatgggcacacctggcaaatacctatatctcagtaagaataagtaaggagcaagaccacattataataattcccagaggcctatctttttctgaagctacagcctccaatttggtgaaagtcaatataataggagaagtggttgaccagggaagtaccaatttgaaaattgaccatacaggattcagtccccatgctgcaatctattcaacacgtcctgatgttaagtgtgtgatacacatccatacccttgcaacagcagctgtatcctccatgaaatgtgggatccttccaatttctcaagagtctcttcttctgggagatgttgcctattatgactaccaagggtcacttgaagaacaggaggagagaattcaactgcagaaggttctgggaccaagttgtaaggtgctggtactcaggaatcatggtgtggttgcacttggagaaacattagaggaggcttttcattatatttttaatgtgcaactagcctgtgagattcaggtgcaggccctagcaggtgcaggtggagtagacaatctccatgtactggactttcagaagtataaagctttcacttacactgtagcagcgtctggtggaggaggtgtgaatatgggttcccatcaaaaatggaaggttggcgaaattgagtttgaagggcttatgaggactctggacaacttggggtatagaacaggctatgcttacaggcatcctctcattcgagagaagcctaggcacaagagtgatgtggaaatcccagcaactgtgactgctttttcctttgaagacgatacagtgccactctctcctctcaaatacatggcacagaggcaacagcgtgaaaaaacaagatggctgaactcaccaaatacttacatgaaagtgaatgtgcctgaggagtctcggaacggagaaaccagtccccgaaccaaaatcacgtggatgaaagcagaagactcatctaaagttagtggtggaacacctatcaaaattgaagatccaaatcagtttgttcctttaaacacaaacccgaatgaggtactagaaaagagaaataagattcgggaacaaaatcgatatgacttgaaaacagcaggaccacaatctcagttgcttgctggaattgttgtggataagccaccttctactatgcaatttgaagatgatgatcatggcccaccagctcctcctaacccatttagtcatctcacagaaggagaacttgaagagtataagaggacaatcgaacgtaaacaacaaggcctagaagaaaaccatgagctgttttccaagagcttcatctccatggaagtgcctgtcatggtagtaaatggcaaggatgatatgcatgatgttgaagatgagcttgctaagcgagtgagtaggttaagcacaagtacaaccatagaaaacatcgagattactattaagtctccagagaaaatcgaagaagtcctgtcacctgaaggctccccttcaaaatcgccatccaagaaaaagaagaaattccgcactccttcttttctgaaaaagaacaaaaaaaaggagaaagttgaggcctaaataaagtctttttataattattattataacaatgtgacattgcacatctaaataccacatttaagttgatcattaatatgcaatggtagatcagattgggggatgtagcaaactggactttaagaactggaaagaggttttacaaaagaaaaactttcagattcatctctcattttatatgtccagaaatggctttgaattttaagcaattactagttttaattagctctgccctcatgaagtattattataattcaccataaacagctatctgtctgaattacttcaggccttctccataatatctgttagaaagaaattgccagtgagcaagtgagaatttttatttctcaatacctgcttcacttgataatcatattataattttttatcatgattattgactatatttttggagtcccattgtttcagtgggcattaacagaatgctttaaaaacttctaagacaagaatctatagcattagtatacactggcacataattttttaaaaagttttaagaaaagattcatttggaattttattcacagtataaaatttcctcacctgaagtaactttgtttgccaaaaaagttgttttaataaactataatttttgaaaacttccttttttattagtttagaaagccccttatttttcaacaaaggggattttgtacacataacatgggttatttagtttaactctggcaaaaaaaaaaaaaaaaattttgtatgttgatgtttgtataccgttcagtataaaagtgtcctaagcatattagccaatcttttcacagtagagcatacttaaggctgcttggtactgagtatacttaaatataactccagaatccagggacttggtgttaaaacaggattagagcatgtaaaggtacatctagattcatatttgaatcttaaactgtatttttctcttagtattgctaatgagtaaagaaaagtctcataaggtagccaaatgaaaaagaatgaaagggaaagtgaaaaattaaggggacaaaagatgggatgtgaaaagaagaattctagtttgatggtgactcatattcacgataggatacaaagtgtgatttgttggaaacatgtcccaaatttctaaaattctgcttctctgccaaaagcaatgtctttcttggttgatatttgagttttaaaagggtcaaatctttctaattttttgtatctttagagggcagcactagaagaaatcagcaggtctaatcccaccagtaagaaaactaccacttcttgatttttacagatttaaaaaaatcttttcagtgacctttctttttaatgtaaatacaaatttaaacctaggcttaatataggcgtttcccctttcacccaagtgatgtcacagttcgatgcaaaatcaatgatccagaatgatcgtgggtaaaaataactcaaagtgtttcttaagggtgagttggcatgcaaaaaattacattgattacagtgtgttttggagctggctctgtttgtgtgcatatgataatgcagagttgagccagagcctggaaatgtcattctagatctcactaactactggaatcagtgttttaatctcttggtggaaactttcagttgcttaactctctattggaagatttttttaatgttctacatcatttatgttgtattacaatgtatgtagaaatagtaacctgtgaactatgcttttccataactttttaaaaatatatatatctaaatgaatgcaatgtgcataaatattttttaaacataacagtgaactattgcaccttttgctaatgcctctatttacttgctttggcataaagaatgagccaatgaacctctgtgtcctgtggaaaaatgtataaatgttatctgatattgctcttagatgtaatgctaattaatgttaaatcacaaataaacagtattttaaatataaaaaaaaaaa

SEQ ID NO: 814 - DNA, 1038 bp, Homo sapiens
aagacgcaccgccccctctcagtcactcccaagatggcggacctactgggctccatcctgagctccatggagaagccacccagcctcggtgaccaggagactcggcgcaaggcccgagaacaggccgcccgcctgaagaaactacaagagcaagagaaacaacagaaagtggagtttcgtaaaaggatggagaaggaggtgtcagatttcattcaagacagtgggcagatcaagaaaaagtttcagccaatgaacaagatcgagaggagcatactacatgatgtggtggaagtggctggcctgacatccttctcctttggggaagatgatgactgtcgctatgtcatgatcttcaaaaaggagtttgcaccctcagatgaagagctagactcttaccgtcgtggagaggaatgggacccccagaaggctgaggagaagcggaagctgaaggagctggcccagaggcaagaggaggaggcagcccagcaggggcctgtggtggtgagccctgccagcgactacaaggacaagtacagccacctcatcggcaagggagcagccaaagacgcagcccacatgctacaggccaataagacctacggctgtgtgcccgtggccaataagagggacacacgctccattgaagaggctatgaatgagatcagagccaagaagcgtctgcggcagagtggggaagagttgccgccaacctcctaggcgccccgcccagctccctttgacccctggggcagggcagggggcagggagagacaaggctgctgctattagagcccatcctggagccccacctctgaaccacctcctaccagctgtccctcaggctgggggaaaacaggtgtttgatttgtcaccgttggagcttggatatgtgcgtggcatgtgtgtgtgtgtgtgagagtgtgaatgcacaggtgggtatttaatctgtattattccccgttcttggaattttcttccccatggggctggggtactttacattcaataaatactgtttaacccaaaaaaaaaaaaaaa

SEQ ID NO: 815 - DNA, 10724 bp, Homo sapiens
ctttccaatatccgtcttcggagcgcacgggaatccgccgagctctgcgtgcaggcccttttttcttttgaggttcacattttttgaaattttacgccagggcttttgtaatttcctcccccgcccgctgacggtcctggagtcgctcggggctttaggccggttatgcaacgtgtaccgctcggggctgccggctgcacctccgccgcgcctcgccgctcactgcgctagacccggcgccccgcgtctcgcttcgcgggcagtcagggggccggcgctctgtcgaggtctccagctagagcagggagcccgagcccgagggagtccccggagccgacgaagggcttattagaccctgactcttttctgaggcgcgcagattttgtctttgatcactccctctccgcgggtctacggccgcgcgctttcggcgccggcgatggggagaagacggaggctgtgtctccagctctacttcctgtggctgggctgtgtggtgctctgggcgcagggcacggccggccagcctcagcctcctccgcccaagccgccccggccccagccgccgccgcaacaggttcggtccgctacagcaggctctgaaggcgggtttctagcgcccgagtatcgcgaggagggtgccgcagtggccagccgcgtccgccggcgaggacagcaggacgtgctccgagggcccaacgtgtgcggctccagattccactcctactgctgccctggatggaagacgctccctggaggaaaccagtgcattgtcccgatttgtagaaatagttgtggagatggattttgttcccgtcctaacatgtgtacttgttccagtgggcaaatatcatcaacctgtggatcaaaatcaattcagcagtgcagtgtgagatgcatgaatggtgggacctgtgcagatgaccactgccagtgccagaaaggatatattggaacttattgtggacaacctgtctgtgaaaatggatgtcagaatggtggacgttgcatcggacccaaccgctgtgcttgtgtttatgggttcactggtccacagtgtgaaagagattacaggacaggcccgtgtttcactcaggtcaacaaccagatgtgccaagggcagctgacaggcattgtctgcacgaagactctgtgctgtgccaccattggacgggcgtggggccatccctgtgagatgtgtccagcccagcctcagccctgccgacggggtttcatccccaacatccgcactggagcttgccaagatgttgatgaatgccaggctatcccagggatatgccaaggaggaaactgtatcaatacagtgggctcttttgaatgcagatgccctgctggtcacaaacagagtgaaactactcagaaatgtgaagacattgatgagtgcagcatcattcctgggatatgtgaaactggtgaatgttccaacaccgtgggaagctatttttgtgtttgtccacgtggatatgtaacctcaacagatggctctcgatgcatcgatcagagaacaggcatgtgtttctcgggcctggtgaatggccgctgtgcacaagagctcccggggagaatgacgaaaatgcagtgctgctgtgagcctggccgctgctggggcatcggaaccattcctgaagcctgtcctgtcagaggttctgaggaatatcgcagactttgcatggatggacttccaatgggaggaattccagggagtgctggttccagacctggaggcactgggggaaatggctttgccccaagtggcaatggcaatggctatggcccaggagggacaggcttcatccccatccctggaggcaatggcttttctcctggcgttgggggagccggtgtgggggccgggggacagggacctatcatcactggactaacaattctgaaccagacaatagatatctgtaagcatcatgctaacctttgtttaaatggacgctgtataccaactgtctcaagctaccgatgtgaatgcaacatgggttataagcaggatgcaaatggagattgtatagatgttgatgaatgcacatcaaatccctgcactaatggagattgtgttaacacacctggttcctattattgtaaatgtcatgctggattccagaggactcctaccaagcaagcatgcattgatattgatgagtgcatccagaatggggttctttgtaaaaacggtcgatgcgtgaacacagatggaagtttccagtgcatttgcaatgccggctttgaattaactacagatggaaaaaactgtgttgatcatgatgaatgtacaactaccaacatgtgtttgaatggaatgtgcatcaatgaagatggcagcttcaagtgcatctgcaaaccaggatttgtcttggctccaaatgggcgttactgtactgatgttgatgaatgccagaccccaggaatctgcatgaatgggcactgcatcaacagtgaagggtccttccgctgtgactgtcccccaggcctggctgtgggcatggatggacgtgtgtgtgttgatactcacatgcgcagtacctgctatggaggaatcaagaaaggagtgtgtgtgcgtcctttccccggtgcagtgaccaagtccgaatgctgctgtgccaatccagactatggttttggagaaccctgccagccatgccctgcaaaaaattcagctgaattccacggcctttgtagtagtggagtaggtatcactgtggatggaagagatatcaatgaatgtgctttggatcctgatatatgtgccaatgggatttgtgaaaacttacgtggtagttaccgttgtaattgcaacagtggctatgaaccagatgcctctggaagaaactgtattgacattgatgaatgtttagtaaacagactgctttgtgataacggattgtgccgaaacacgccaggaagttacagctgtacgtgcccaccagggtatgtgttcaggactgagacagagacctgtgaagatataaatgaatgtgaaagcaacccatgtgtcaatggggcctgcagaaacaaccttggatctttcaattgtgaatgttcgcccggcagcaaactcagctccacaggattgatctgtattgacagcctgaaggggacctgttggctcaacatccaggacagccgctgtgaggtgaatattaatggagccactctgaaatctgaatgctgtgccaccctcggagccgcctgggggagcccctgtgagcggtgtgaactagatacagcttgcccaagagggcttgccaggattaaaggtgttacgtgtgaagatgttaatgagtgtgaggtgttccctggcgtttgtccaaatggacgctgtgtcaacagtaagggatcttttcattgcgagtgccctgaaggccttacgttggatgggactggccgtgtatgtttggatattcgcatggagcagtgttacttgaagtgggatgaagatgaatgcatccaccccgttcctggaaagttccgcatggatgcctgctgctgtgctgtcggggcggcttggggcaccgagtgtgaggagtgccccaaacctggcaccaaggaatacgagacgctgtgcccccgcggggctggctttgctaaccgaggggatgttcttactgggcggccattttacaaagacatcaatgaatgcaaagcatttcctgggatgtgcacttatgggaagtgcagaaatacaatcggaagcttcaaatgccgttgcaatagtggctttgctctagacatggaggaaagaaactgcacggacatcgacgagtgcaggatttctcctgacctctgtggcagtggaatctgcgtcaatacaccgggcagctttgagtgcgagtgcttcgaaggctatgaaagtggcttcatgatgatgaagaactgcatggacattgacgaatgtgaacgtaaccctctcctttgtaggggtggcacctgtgtgaacactgagggcagctttcagtgtgactgcccactgggacacgagctgtcaccatcccgtgaggactgtgtggatattaatgaatgctccctgagtgacaatctctgcagaaatggaaaatgtgtgaacatgattggaacctatcagtgctcttgcaatcctggatatcaggctacgccagaccgccagggctgtacagatattgatgaatgtatgataatgaacggaggctgtgacacccagtgcacaaattcagagggaagctacgaatgcagctgcagtgagggttatgccctgatgccagatgggagatcgtgtgcagacattgatgaatgtgaaaacaatcctgatatctgtgatggcggccagtgtaccaacattcctggagagtatcgctgcctctgctatgatggcttcatggcttccatggacatgaaaacatgcattgatgtcaatgaatgtgacctaaattcaaatatctgcatgtttggggaatgtgagaacacaaagggatccttcatttgccactgtcagctgggttactcagtgaagaaggggaccacaggatgtacagatgtggatgagtgtgaaattggtgctcataactgcgacatgcatgcctcatgtctgaatatcccaggaagcttcaagtgtagctgcagagaaggctggattggaaacggcatcaagtgtattgatctggacgaatgttctaatggaacccaccagtgtagcatcaatgctcagtgtgtaaataccccgggctcataccgctgtgcctgctccgaaggtttcactggtgatggctttacctgctcagatgttgatgagtgtgcagaaaacataaacctctgtgagaacggacagtgccttaatgtcccgggtgcatatcgctgcgagtgtgagatgggcttcactccagcctcagacagcagatcctgccaagatattgatgaatgctccttccaaaacatttgtgtctttggaacatgtaataacctgcctggaatgtttcattgcatctgcgatgatggttatgaattggacagaacaggagggaactgtacagatattgatgagtgtgcagatcctataaactgtgtcaatggcctatgtgtcaacacgcctggtcgctatgagtgtaactgcccacccgattttcagttgaacccaactggtgtgggttgtgttgacaaccgtgtgggcaactgctacctgaagtttggacctcgaggagatgggagtctgtcttgcaacaccgagatcggggtgggcgtcagtcgctcttcatgctgctgctctctgggaaaggcctggggaaacccctgtgagacatgcccccctgtcaatagcactgaatattacaccctgtgtcccggaggtgaaggcttcagacctaaccccatcacaatcattttagaagacattgacgaatgccaggagttaccaggtctctgccagggtggaaactgcatcaacacttttgggagcttccagtgtgagtgcccacaaggctactacctcagcgaggatacccgcatctgtgaagatattgatgagtgttttgcacatcctggtgtgtgtgggcctgggacctgctataacaccctgggaaattacacctgcatttgcccacctgagtacatgcaggtcaatggaggccacaactgcatggacatgagaaaaagcttttgctaccgaagctataatggaaccacttgtgagaatgagttgcctttcaatgtgacaaaaaggatgtgctgctgcacatataatgtgggcaaagcctggaacaaaccttgtgaaccatgcccaactccaggaacagctgactttaaaaccatatgtggaaatattcctggattcacctttgacattcacacaggaaaagctgttgacattgatgaatgtaaagagattccaggcatttgtgcaaatggtgtgtgcattaaccagattggcagtttccgctgtgaatgccctacaggattcagttacaatgacctgctgttggtttgtgaagatatagatgagtgcagcaatggtgataatctctgccagcggaatgcagactgcatcaatagtcctggtagttaccgctgtgaatgtgccgcgggtttcaaactttcacccaatggggcctgtgtagatcgcaatgaatgtttagaaattcctaacgtttgcagtcatggcttgtgtgttgatctgcaaggaagttaccagtgcatctgccacaatggctttaaggcttctcaggaccagaccatgtgcatggatgttgatgagtgcgagcggcatccatgtggaaatggaacttgtaaaaacaccgttggatcctataactgtctgtgctacccagggtttgaactcactcataataatgattgcctggacatagatgagtgcagttccttttttggtcaggtgtgcagaaatggacgttgttttaatgaaattggttctttcaagtgtctatgtaacgaaggttatgaacttaccccagatggcaaaaactgtatagacactaatgagtgtgtcgcccttcccggctcttgctctcctggtacctgtcagaatttggagggatccttcagatgcatctgtcccccagggtatgaagtaaaaagcgagaactgcattgatataaatgaatgtgatgaagatcccaacatttgtctttttggttcctgtactaatactccagggggcttccagtgcctctgcccccctggctttgtactatctgataatggacggagatgctttgatactcgccagagcttctgcttcacaaattttgaaaatggaaagtgttctgtacccaaagctttcaacaccacaaaagcaaaatgctgctgtagtaagatgccaggagagggctggggggacccctgtgagctgtgccccaaagacgatgaagttgcatttcaggatttgtgtccatatggccatggaactgtccctagtcttcatgatacacgtgaagatgtcaatgagtgtcttgagagcccaggcatttgttcaaatggtcaatgtatcaacaccgacggatcttttcgctgtgaatgtccaatgggctacaaccttgactacactggagtacgctgtgtggatactgatgagtgttcaatcggcaatccgtgtggaaatggtacatgcaccaatgttattgggagttttgaatgcaattgcaatgaaggctttgagccagggcccatgatgaattgtgaagatatcaacgaatgtgcccagaacccactgctgtgtgctttccgctgcatgaacacttttgggtcctatgaatgcacgtgcccgattggctatgccctcagggaagatcaaaagatgtgcaaagatctggatgaatgtgctgaagggttacacgactgtgaatctaggggcatgatgtgtaagaatctaatcggcaccttcatgtgcatctgccctcctggaatggcccgaaggcccgatggagaaggctgtgtagatgaaaatgaatgcaggaccaagccaggaatctgtgaaaatggacgttgtgttaacattattggaagctatagatgtgagtgtaatgaaggattccagtcaagttcttcaggcactgaatgccttgacaatcgacagggtctctgctttgcagaggtactgcagacaatatgtcaaatggcatccagtagtcgcaatctcgtcactaagtcagaatgctgctgtgatggtgggcgaggctggggccaccagtgcgagctttgcccacttcctggaactgcccagtacaaaaagatatgtcctcatggcccaggatatacaactgatggaagagatattgatgaatgtaaggtaatgccaaacctctgcaccaatggtcagtgcatcaataccatgggctcattccgatgcttctgcaaggttggctacaccacagacatcagtggaacctcttgtatagaccttgatgaatgctcccagtccccgaaaccatgcaactacatctgcaagaacactgaggggagttatcagtgttcatgtccgagggggtatgtcctgcaagaggatggaaagacatgcaaagaccttgatgaatgtcaaacaaagcagcataactgccagttcctctgtgtcaacaccctgggggggtttacctgtaaatgtccacctggtttcacacagcatcacactgcttgtatcgacaacaacgaatgtgggtctcaaccttcgctttgtggagcaaagggaatctgtcaaaacactccaggcagtttcagctgtgaatgccaaagagggttctctcttgatgccaccggactgaactgtgaagatgttgatgaatgtgatgggaaccacaggtgccaacacggctgccagaacatcctgggtggctacagatgtggctgcccccaaggctacatccagcactaccagtggaatcagtgtgtcgatgagaatgaatgctccaatcccaatgcctgtggctctgcttcctgctacaacaccctggggagttacaagtgcgcctgcccctcggggttctccttcgaccagttctccagtgcctgccacgacgtgaatgagtgctcgtcctccaagaacccctgcaattacggctgctctaacacggaggggggctacctctgtggctgcccccctgggtattacagagtgggacaaggccactgtgtctcaggaatgggatttaacaaggggcagtacctgtcactggatacagaggtcgatgaggaaaatgctctgtccccagaagcatgctacgagtgcaaaatcaacggctattctaagaaagacagcaggcagaagagaagtattcatgaacctgatcccactgctgttgaacagatcagcctagagagtgtcgacatggacagccccgtcaacatgaagttcaacctctcccacctcggctctaaggagcacatcctggaactaaggcccgccatccagcccctcaacaaccacatccgttatgtcatctctcaagggaacgatgacagcgtcttccgcatccaccaaaggaatgggctcagctacttgcacacggccaagaagaagctcatgcccggcacatacacactggaaatcactagcatccctctctacaagaagaaggagcttaagaaactggaagagagcaatgaggatgactacctcctaggggagcttggggaggctctcagaatgaggctgcagattcagctctattaacccttcacagacttgggcccaggctcaaatcctagcacagccagtctgcagaagcatttgaaaagtcaaggactaattttaaagaggaaaaataataataactcttgtttctttcctccctgtcttagactttgaatgttgaccctcacagggagggataatttagactctggtatggccaaagatttgagcacaaaggcaaccgtggttactgtattttttatataacttcattttaaaatatattaaaagaaacctaaatgttcaagatatcagcatatggcactaaatgcacaaaaataatgtgagctttttttttttttcctgttagcagtctgtaacactttgggtattttgctatagttgctaattaaaaaaatatagatgtttatttatttttaatgcagtaatatatggagaaatgaacaaactatgtaaacaaaaagggaaactcacttgtttttctttagatttataaatttgagctattttttttagaggtgctttttaaaaatccaatagatacaagagatgtttcctttggttttctgccagtcatccagctgatacacacctgatgattttaaagaaagccacacagagctgaatgggcagtgtaatcaataatttaaaaaacatgaatgtcattagatcctttataacgtagatcgaagccaaagcagctcatttgtgacaacatttcatatcaccagacacaccaggcaacagaagttgaagcacaaccactgtagcaaaataccttgactgcttgtgagaccattagcattgcaggccaaaccgtactgtatttccttctcataacctcaaggaaccatatgtgctacccacaacacctcattcttacccagggtgcgctgcgtcctcatggtactgtaggcagctgaagaaccgccgttcccttgaaagggaacacctggcattctgtggtgtttcgtgctgtcttaaataatggtgcatttattatgttcaagttatttcaggattgccatatgtgcaaacaaatcatgcaatgcagccaaggaatatatgttgttgttgttgttttaaacccattttttttttagaattttcattaatactgtagttatacaccatatgcctcattttatcatagcctattgtgtatgaaagatgtttgtacaatgaattgatgtttagtttgctttagtcatttaaaaagatattgtaccaggatgtgctattaagagcacgtatccattattcttctcaacccaagaacctgtttcctggaccagtgaccaaacctcatatgtgaaatggccaaagcacatgcaggctcctggttgttcctctcaaacctgtgctgaccaaagattagtaaccagttatacccagtattttgaggttttattgtttttttaataactaaaaagaaaaaaggaacagtgtaaatttgtaatcaagagtttgtgaggaaaaacttatggtttttggttttgtttgtttttgtaggtctgtgtatcaaatatgacacttttcttgcaataaagcttattttggggta

SEQ ID NO: 816 - DNA, 2895 bp, Homo sapiens
gcgcggcgctgctgggttctccgaggcgacctggccgccggccgctcctccgcgcgctgttccgcacttgctgccctcgcccggcccggagcgccgctgccatgcggctggcgctgctctgggccctggggctcctgggcgcgggcagccctctgccttcctggccgctcccaaatataggtggcactgaggagcagcaggcagagtcagagaaggccccgagggagcccttggagccccaggtccttcaggacgatctcccaattagcctcaaaaaggtgcttcagaccagtctgcctgagcccctgaggatcaagttggagctggacggtgacagtcatatcctggagctgctacagaatagggagttggtcccaggccgcccaaccctggtgtggtaccagcccgatggcactcgggtggtcagtgagggacacactttggagaactgctgctaccagggaagagtgcggggatatgcaggctcctgggtgtccatctgcacctgctctgggctcagaggcttggtggtcctgaccccagagagaagctataccctggagcaggggcctggggaccttcagggtcctcccattatttcgcgaatccaagatctccacctgccaggccacacctgtgccctgagctggcgggaatctgtacacactcagaagccaccagagcaccccctgggacagcgccacattcgccggaggcgggatgtggtaacagagaccaagactgtggagttggtgattgtggctgatcactcggaggcccagaaataccgggacttccagcacctgctaaaccgcacactggaagtggccctcttgctggacacattcttccggcccctgaatgtacgagtggcactagtgggcctggaggcctggacccagcgtgacctggtggagatcagcccaaacccagctgtcaccctcgaaaacttcctccactggcgcagggcacatttgctgcctcgattgccccatgacagtgcccagctggtgactggtacttcattctctgggcctacggtgggcatggccattcagaactccatctgttctcctgacttctcaggaggtgtgaacatggaccactccaccagcatcctgggagtcgcctcctccatagcccatgagttgggccacagcctgggcctggaccatgatttgcctgggaatagctgcccctgtccaggtccagccccagccaagacctgcatcatggaggcctccacagacttcctaccaggcctgaacttcagcaactgcagccgacgggccctggagaaagccctcctggatggaatgggcagctgcctcttcgaacggctgcctagcctaccccctatggctgctttctgcggaaatatgtttgtggagccgggcgagcagtgtgactgtggcttcctggatgactgcgtcgatccctgctgtgattctttgacctgccagctgaggccaggtgcacagtgtgcatctgacggaccctgttgtcaaaattgccagctgcgcccgtctggctggcagtgtcgtcctaccagaggggattgtgacttgcctgaattctgcccaggagacagctcccagtgtccccctgatgtcagcctaggggatggcgagccctgcgctggcgggcaagctgtgtgcatgcacgggcgttgtgcctcctatgcccagcagtgccagtcactttggggacctggagcccagcccgctgcgccactttgcctccagacagctaatactcggggaaatgcttttgggagctgtgggcgcaaccccagtggcagttatgtgtcctgcacccctagagatgccatttgtgggcagctccagtgccagacaggtaggacccagcctctgctgggctccatccgggatctactctgggagacaatagatgtgaatgggactgagctgaactgcagctgggtgcacctggacctgggcagtgatgtggcccagcccctcctgactctgcctggcacagcctgtggccctggcctggtgtgtatagaccatcgatgccagcgtgtggatctcctgggggcacaggaatgtcgaagcaaatgccatggacatggggtctgtgacagcaacaggcactgctactgtgaggagggctgggcaccccctgactgcaccactcagctcaaagcaaccagctccctgaccacagggctgctcctcagcctcctggtcttattggtcctggtgatgcttggtgccagctactggtaccgtgcccgcctgcaccagcgactctgccagctcaagggacccacctgccagtacagggcagcccaatctggtccctctgaacggccaggacctccgcagagggccctgctggcacgaggcactaaggctgagctggctgaccgacccaatccccctacccgccctctgcccgctgacccggtggtgagaagcccgaagtctcaggggccagccaagcccccacccccaaggaagccactgcctgccgacccccagggccggtgcccatcgggtgacctgcccggcccaggggctggaatcccgcccctagtggtaccctccagaccagcgccaccgcctccgacagtgtcctcgctctacctctgacctctccggaggttccgctgcctccaagccggacttagggcttcaagaggcgggcgtgccctctggagtcccctaccatgactgaaggcgccagagactggcggtgtcttaagactccgggcaccgccacgcgctgtcaagcaacactctgcggacctgccggcgtagttgcagcgggggcttggggaggggctgggggttggacgggattgaggaaggtccgcacagcctgtctctgctcagttgcaataaacgtgacatcttgggagcgttcaaa

SEQ ID NO: 817 - DNA, 4185 bp, Homo sapiens
atgacaatggaatcggtacctggtgtccaagcctggtcctcgcacgaggtagatactccctgagatgctggggaagagccatggtagggccactcatggccctcttcctttggcggaccttggaatccaccttccctgcgttaaagtgctccaccaggtgacgccggaagagaagccagcagtaagtacatgtgaaatccagtagctgaccacagacacgcgagcgataagaaaaagctcgctgcttcttttctcaacactccgccagctgcgtcagaggcccttgacccgcactcaaaatggcggcggcggcgtcagcatcagcggcctcctgcccgtatctatcgtggcggcgacgggacccgcctccctgggcgccggagtcatgtgacccacacaatggctgagtggctactctcggcttcctggcaacgccgagcgaaagctatgactgcggccgcgggttcggcgggccgcgccgcggtgcccttgctgctgtgtgcgctgctggcgcccggcggcgcgtacgtgctcgacgactccgacgggctgggccgggagttcgacggcatcggcgcggtcagcggcggcggggcaacctcccgacttctagtaaattacccagagccctatcgttctcagatattggattatctctttaagccgaattttggtgcctctttgcatattttaaaagtggaaataggtggtgatgggcagacaacagacggcactgagccctcccacatgcattatgcactagatgagaattatttccgaggatacgagtggtggttgatgaaagaagctaagaagaggaatcccaatattacactcattgggttgccatggtcattccctggatggctgggaaaaggtttcgactggccttatgtcaatcttcagctgactgcctattatgtcgtgacctggattgtgggcgccaagcgttaccatgatttggacattgattatattggaatttggaatgagaggtcatataatgccaattatattaagatattaagaaaaatgctgaattatcaaggtctccagcgagtgaaaatcatagcaagtgataatctctgggagtccatctctgcatccatgctccttgatgccgaactcttcaaggtggttgatgttataggggctcattatcctggaacccattcagcaaaagatgcaaagttgactgggaagaagctttggtcttctgaagactttagcactttaaatagtgacatgggtgcaggctgctggggtcgcattttaaatcagaattatatcaatggctatatgacttccacaatcgcatggaatttagtggctagttactatgaacagttgccttatgggagatgcgggttgatgacggcccaggagccatggagtgggcactacgtggtagaatctcctgtctgggtatcagctcataccactcagtttactcaacctggctggtattacctgaagacagttggccatttagagaaaggaggaagctacgtagctctgactgatggcttagggaacctcaccatcatcattgaaaccatgagtcataaacattctaagtgcatacggccatttcttccttatttcaatgtgtcacaacaatttgccacctttgttcttaagggatcttttagtgaaataccagagctacaggtatggtataccaaacttggaaaaacatccgaaagatttctttttaagcagctggattctctatggctccttgacagcgatggcagtttcacactgagcctgcatgaagatgagctgttcacactcaccactctcaccactggtcgcaaaggcagctacccgcttcctccaaaatcccagcccttcccaagtacctataaggatgatttcaatgttgattacccattttttagtgaagctccaaactttgctgatcaaactggtgtatttgaatattttacaaatattgaagaccctggcgagcatcacttcacgctacgccaagttctcaaccagagacccattacgtgggctgccgatgcatccaacacaatcagtattataggagactacaactggaccaatctgactataaagtgtgatgtatacatagagacccctgacacaggaggtgtgttcattgcaggaagagtaaataaaggtggtattttgattagaagtgccagaggaattttcttctggatttttgcaaatggatcttacagggttacaggtgatttagctggatggattatatatgctttaggacgtgttgaagttacagcaaaaaaatggtatacactcacgttaactattaagggtcatttcacctctggcatgctgaatgacaagtctctgtggacagacatccctgtgaattttccaaagaatggctgggctgcaattggaactcactcctttgaatttgcacagtttgacaactttcttgtggaagccacacgctaatacttaacagggcatcatagaatactctggattttcttcccttctttttggttttggttcagagccaattcttgtttcattggaacagtatatgaggcttttgagactaaaaataatgaagagtaaaaggggagagaaatttatttttaatttaccctgtggaagattttattagaattaattccaaggggaaaactggtgaatctttaacattacctggtgtgttccctaacattcaaactgtgcattggccatacccttaggagtggtttgagtagtacagacctcgaagccttgctgctaacactgaggtagctctcttcatcttatttgcaagcggtcctgtagatggcagtaacttgatcatcactgagatgtatttatgcatgctgaccgtgtgtccaagtgagccagtgtcttcatcacaagatgatgctgccataatagaaagctgaagaacactagaagtagctttttgaaaaccacttcaacctgttatgctttatgctctaaaaagtatttttttattttcctttttaagatgatacttttgaaatgcaggatatgatgagtgggatgattttaaaaatgcctctttaataaactacctctaacactatttctgcagtaatagatattagcagattaattgggttatttgcattatttaatttttttgattccaagttttggtcttgtaaccactataactctctgtgaacgtttttccaggtggctggaagaaggaagaaaacctgatatagccaatgctgttgtagtcgtttcctcagcctcatctcactgtgctgtggtctgtcctcacatgtgcactggtaacagactcacacagctgatgaatgcttttctctccttatgtgtggaaggaggggagcacttagacatttgctaactcccagaattggatcatctcctaagatgtacttactttttaaagtccaaatatgtttatatttaaatatacgtgagcgtgttcatcatgttgtatgatttatactaagcattaatgtggctctatgtagcaaatcagttattcatgtaggtaaagtaaatctagaattatttataagaattactcattgaactaattctactatttaggaatttgtaagagtctaacataggcttagctacagtgaagttttgcattgcttttgaagacaagaagataagtgctagaataaataagattacagagaaaattttttgttaaaaccaagtgatttccagctgatgtatctaatattttttaaaacgaacattatagaggtgtaatttatttacaataaaatgttcctactttaaatatacaattcagtgagttttgataaattgatatacccatgtaaccaacactccagtcaagcttcagaatatttccatcaccccagaaggttctcttgtatacctgctcagtcagttcctttcactcccaattgttggcagccattgataggaattctatcactataggttagttttctttgttccagaacatcatgaaagcggcgtcatgtactgtgtattcttatgaatggtttctttccatcagcataatgatttgagatttgtccatgttgtgtgattcagtggtttgttccttcttatttctgaagagttttccattgtatgaatataccacaatttgtttcctccccaccagtttctgatactacaattaaaactgtctacatttacaaaaaaaaaaaa

SEQ ID NO: 818 - DNA, 626 bp, Homo sapiens
acatttgcttctgacacaactgtgttcactagcaacctcaaacagacaccatggtgcatctgactcctgaggagaagtctgccgttactgccctgtggggcaaggtgaacgtggatgaagttggtggtgaggccctgggcaggctgctggtggtctacccttggacccagaggttctttgagtcctttggggatctgtccactcctgatgctgttatgggcaaccctaaggtgaaggctcatggcaagaaagtgctcggtgcctttagtgatggcctggctcacctggacaacctcaagggcacctttgccacactgagtgagctgcactgtgacaagctgcacgtggatcctgagaacttcaggctcctgggcaacgtgctggtctgtgtgctggcccatcactttggcaaagaattcaccccaccagtgcaggctgcctatcagaaagtggtggctggtgtggctaatgccctggcccacaagtatcactaagctcgctttcttgctgtccaatttctattaaaggttcctttgttccctaagtccaactactaaactgggggatattatgaagggccttgagcatctggattctgcctaataaaaaacatttattttcattgc

SEQ ID NO: 819 - DNA, 919 bp, Homo sapiens
ccccagccagctgtcccgagtctggactttccctctgcccctccccactctcaggctggtggggtggggaaagcagcccattcctgggctcagagactcccaccccagctcagagggagcaggggcccagccagggacggaccctcattcctcccagggaccccagacctctgtctctctcgggccttggctccttgaacttttggccgccatgtgcttcccgaaggtcctctctgatgacatgaagaagctgaaggcccgaatgcaccaggccatagaaagattttatgataaaatgcaaaatgcagaatcaggacgtggacaggtgatgtcgagcctggcagagctggaggacgacttcaaagagggctacctggagacagtggcggcttattatgaggagcagcacccagagctcactcctctacttgaaaaagaaagagatggattacggtgccgaggcaacagatcccctgtcccggatgttgaggatcccgcaaccgaggagcctggggagagcttttgtgacaagtcctacggagccccacggggggacaaggaggagctgacaccccagaagtgctctgaaccccaatcctcaaaatgaagatactgacaccacctttgccctccccgtcaccgcgcacccaccctgacccctccctcagctgtcctgtgccccgccctctcccgcacactcagtccccctgcctggcgttcctgccgcagctctgacctggtgctgtcgccctggcatcttaataaaacctgcttatacttccctggcaggggagataccatgatcgcggaggtgggtttcccagggcaaggctgatctgttgccgtattagtccgttttcacacagctataaagaatgcctgagactgggtgatgtataaagaaaagaagtttaactga

SEQ ID NO: 820 - DNA, 1924 bp, Homo sapiens
cgtagctatttcaaggcgcgcgcctcgtggtggactcaccgctagcccgcagcgctcggcttcctggtaattcttcacctcttttctcagctccctgcagcatgggtgctgggccctccttgctgctcgccgccctcctgctgcttctctccggcgacggcgccgtgcgctgcgacacacctgccaactgcacctatcttgacctgctgggcacctgggtcttccaggtgggctccagcggttcccagcgcgatgtcaactgctcggttatgggaccacaagaaaaaaaagtagtggtgtaccttcagaagctggatacagcatatgatgaccttggcaattctggccatttcaccatcatttacaaccaaggctttgagattgtgttgaatgactacaagtggtttgccttttttaagtataaagaagagggcagcaaggtgaccacttactgcaacgagacaatgactgggtgggtgcatgatgtgttgggccggaactgggcttgtttcaccggaaagaaggtgggaactgcctctgagaatgtgtatgtcaacacagcacaccttaagaattctcaggaaaagtattctaataggctctacaagtatgatcacaactttgtgaaagctatcaatgccattcagaagtcttggactgcaactacatacatggaatatgagactcttaccctgggagatatgattaggagaagtggtggccacagtcgaaaaatcccaaggcccaaacctgcaccactgactgctgaaatacagcaaaagattttgcatttgccaacatcttgggactggagaaatgttcatggtatcaattttgtcagtcctgttcgaaaccaagcatcctgtggcagctgctactcatttgcttctatgggtatgctagaagcgagaatccgtatactaaccaacaattctcagaccccaatcctaagccctcaggaggttgtgtcttgtagccagtatgctcaaggctgtgaaggcggcttcccataccttattgcaggaaagtacgcccaagattttgggctggtggaagaagcttgcttcccctacacaggcactgattctccatgcaaaatgaaggaagactgctttcgttattactcctctgagtaccactatgtaggaggtttctatggaggctgcaatgaagccctgatgaagcttgagttggtccatcatgggcccatggcagttgcttttgaagtatatgatgacttcctccactacaaaaaggggatctaccaccacactggtctaagagaccctttcaacccctttgagctgactaatcatgctgttctgcttgtgggctatggcactgactcagcctctgggatggattactggattgttaaaaacagctggggcaccggctggggtgagaatggctacttccggatccgcagaggaactgatgagtgtgcaattgagagcatagcagtggcagccacaccaattcctaaattgtagggtatgccttccagtatttcataatgatctgcatcagttgtaaaggggaattggtatattcacagactgtagactttcagcagcaatctcagaagcttacaaatagatttccatgaagatatttgtcttcagaattaaaactgcccttaattttaatatacctttcaatcggccactggccatttttttctaagtattcaattaagtgggaattttctggaagatggtcagctatgaagtaatagagtttgcttaatcatttgtaattcaaacatgctatattttttaaaatcaatgtgaaaacatagacttatttttaaattgtaccaatcacaagaaaataatggcaataattatcaaaacttttaaaatagatgctcatatttttaaaataaagttttaaaaataactgcaaaaaaaaaaaaaaaaaa

SEQ ID NO: 821 - DNA, 983 bp, Homo sapiens
gggcgtgcacgcgggcgcggctgcgtgagaggcgcgcggcggcgcagtaaacagtctccttccacaaaaccatggcgtcgctcaaatgtagcaccgtcgtctgcgtgatctgcttggagaagcccaaataccgctgtccagcctgccgcgtgccctactgctcggtagtctgcttccggaagcacaaagaacagtgcaaccctgaaactcgtcctgttgagaaaaaaataagatcagctcttcctaccaaaaccgtaaagcctgtggaaaacaaagatgatgatgactctatagctgattttctcaatagtgatgaggaagaagacagagtttctttgcagaatttaaagaatttaggggaatctgcaacattaagaagcttattgctcaatccacacctcaggcagttgatggtcaacctcgatcagggagaagacaaagcaaagctcatgagagcttacatgcaagagcctttgtttgtggagtttgcagactgctgtttaggaattgtggagccatcccagaatgaggagtcttaagatggattattgtgctgcttgctcaagcgtgtgcttgactcctggaacctgcctgctccctctcccagaccagctagtttggggctggggagctcaggcaaaagaggtttccaggatgcagattaggtcatgcaggcctttaccggcattgatgtggctcatgtttcaggcagacttggggtccttaaggtggcaagtcctttatggagagaaaacttgacattcagatgattgtttttaaatgttttacttttggtacagttgatagacatcataaacgatatcaagcttacacttcatatggagttaaacttggtcagtgttaataaaatcaaaacgtgattctactgtacattgcattattcataatttaattgtttgaaattacattaaataaatcaactaattaaatacgaaaaaaaaaaaaaaaaaaaaaaaaaaaaa

SEQ ID NO: 822 - DNA, 1627 bp, Homo sapiens
ggggacccgggccgcgtgggcgccgggatggagggcgccaaggggcggggagcgggcgtgcgtgtgtgtgcgagtgcgaatgcgagggaggccggccttgagtgaaaccggagctacaaagaaggggagagtccgggagcgggagggcgcgagggaggagcggcggctccggggcagctccgacgccctcccgcggggaaggagcccccgcggtgccgccgaggccccgacgcggggccgcccctcggctcgccgccccgcgcccgcgcccgctgggaatgatgaagaagaacaattccgccaagcggggacctcaggatggaaaccagcagcctgcaccgcccgagaaggtcggctgggtccggaaattctgcgggaaagggattttcagggagatttggaaaaaccgctatgtggtgctgaaaggggaccagctctacatctctgagaaggaggtaaaagatgagaaaaatattcaagaggtatttgacctgagtgactatgagaagtgtgaagagctccggaagtccaagagcaggagcaagaaaaatcatagcaagtttactcttgcccactccaaacagcccggtaacacggcacccaacctgatcttcctggcagtgagtccagaagagaaggaatcgtggatcaatgccctcaactctgccatcacccgagccaagaaccgtatcttggatgaggtcaccgttgaggaggacagctatcttgcccatcccactcgagacagggcaaaaatccagcactcccgccgccccccaacaaggggacacctaatggctgtggcttccacctctacctcggatgggatgctgaccttggacttgatccaagaggaagacccttcccctgaggaaccaacctcttgtgctgagagctttcgggttgacctggacaagtctgtggcccagctggcagggagccggcggagagcggactcagaccgcatccagccctccgcagaccgggcaagcagtctctcccgaccttgggaaaaaacagacaaaggggccacctacaccccccaggcacccaagaagttgacgcccacagagaaaggccgctgcgcctccctggaggagatcctatctcagcgggatgctgcctctgcccgcaccctccagctgcgggctgaggaacccccaacccctgccctccccaacccggggcagctgtcccggatccaggacctggtagcaaggaaactggaggagactcaggagcttctggcagaggttcagggactgggagatgggaagcgaaaggccaaggacccccctcggtctccgccggattctgagtcagagcagctgctgctggagacggaacggctgctgggagaggcatcatcgaattggagccaggcaaagagggtgctgcaggaggtcagggagctgagagacctgtacagacagatggacctgcagaccccggactcccacctcagacagaccaccccgcacagtcagtaccggaagagcctgatgtgagggcagggtggggtctggaacttgtcgggttggacagactcttatctccgtgttgctggataaagcttttttatttacctcaatcaaaaaaagaaaacaaaaatgaaaaaaaaaaaaaa

SEQ ID NO: 823 - DNA, 1605 bp, Homo sapiens
cagcgccggggcggagggtacgatggagaatttcacggcactgtttggggctcaggctgacccaccaccgcccccaaccgcactcggcttcggaccaggaaagcctccacccccgccaccgcctcctgcgggcgggggacccggcacggccccgcctcccaccgcggccacggctcctcctggcgcggacaagtcaggagctggctgtggccctttttacctcatgagggaactgccaggtagcacagagctgacaggcagcacgaatctgatcacacactacaacttggaacaagcctataataaattctgtgggaagaaggtgaaggagaagctaagtaacttcctgcctgacctgccagggatgattgatctgcctggttcccatgataacagcagcctccgctctctcattgagaagccccctattctcagtagctctttcaatcctatcacagggaccatgctggccggcttccgcctccacactggcccgttgccggagcagtgtcgtctgatgcatattcagcctcccaagaagaagaataagcacaagcacaaacagagccgtacccaggatcctgtccccccaggtaaacccagttaagttccgtatggagctctggactcctaaattcccctgaagaagaaaccaatgtactgtggtctcttgggacttgggacagggactctagcagcacctctgtatcctttctggccatttggacaaaagcagttgccccgacttgggattttcctgtagtcttcagtggttcataacagtagaggattttgagctttacaggtgataggtacctaatgtctcctacagaaacaccatctgattcagatcacaagaagaagaaaaagaaaaaagaagaggatcctgaacggaaaaggaagaagaaagagaagaagaaaaagaaggtagagtagaggcctattgccacaacccagtgagtttccccagatctcacccctgtcctaaataccctagagttctttgcctcaagttggacccaagattgaaaacccaaggcaggttgcaggtttctcctgtacagcctgatcaaagccaaggctagttcctagttgttcttaccctgcttctttctcccccagaatcgacatagtccagaccacccaggtatgggcagctcccaggccagcagcagcagcagcctacgctaataggaccactggactctttgccaggatggcttttcctgctgtactgaacctgctgataaaagctgccttccaggctcttggacactgccttgggagcatcctgcagctgggacagaggccagctcctgttgggctcagttgagactaagtaaattaggagagagagggacatgcttttgtaggctcatcccagttggttttctcatggacatctcttcctctcccaggaagcttacaattttcttctctctcttttgtgcaatttgtctgatttaggacttgttctgtgttttctttaaaaaaaaaaaaattacatttatcaaaaaaaaaaaaaaaaaaaaaaaaaaaaaaaaaaaaaaaaaaaaaaaaaaaaaaaaaaaaaaaaaaaaaaaaaaaaaaaaaaaaaaaaaaaaa

SEQ ID NO: 824 - DNA, 1786 bp, Homo sapiens
agaggaggagcagctgggactgagtcatggcaggaagctgaggagggcgggagatcacaccagacaattataaaagaagagctggtcctgaagctcacaaccgtaacagccaccagacaagcttcagtggccggcccttcacatccagacttgcctgagaggacccacctctgagtgtccagtggtcagttgccccaggatggggaccacagccagagcagccttggtcttgacctatttggctgttgcttctgctgcctctgagggaggcttcacggctacaggacagaggcagctgaggccagagcactttcaagaagttggctacgcagctcccccctccccacccctatcccgaagcctccccatggatcaccctgactcctctcagcatggccctccctttgagggacagagtcaagtgcagccccctccctctcaggaggccacccctctccaacaggaaaagctgctacctgcccaactccctgctgaaaaggaagtgggtccccctctccctcaggaagctgtccccctccaaaaagagctgccctctctccagcaccccaatgaacagaaggaaggaacgccagctccatttggggaccagagccatccagaacctgagtcctggaatgcagcccagcactgccaacaggaccggtcccaagggggctggggccaccggctggatggcttcccccctgggcggccttctccagacaatctgaaccaaatctgccttcctaaccgtcagcatgtggtatatggtccctggaacctaccacagtccagctactcccacctcactcgccagggtgagaccctcaatttcctggagattggatattcccgctgctgccactgccgcagccacacaaaccgcctagagtgtgccaaacttgtgtgggaggatacccttgacaaatactgtgaccgggagtatgctgtgaagacccaccaccacttgtgttgccgccaccctcccagccctactcgggatgagtgctttgcccgtcgggctccttaccccaactatgaccgggacatcttgaccattgacatcggtcgagtcacccccaacctcatgggccacctctgtggaaaccaaagagttctcaccaagcataaacatattcctgggctgatccacaacatgactgcccgctgctgtgacctgccatttccagaacaggcctgctgtgcagaggaggagaaattaaccttcatcaatgatctgtgtggtccccgacgtaacatctggcgagaccctgccctctgctgttacctgagtcctggggatgaacaggtcaactgcttcaacatcaattatctgaggaacgtggctctagtgtctggagacactgagaacgccaagggccagggggagcagggctcaactggaggaacaaatatcagctccacctctgagcccaaggaagaatgagtcaccccagagccctagagggtcagatggggggaaccccaccctgccccacccatctgaacactcattacactaaacacctcttggatttggtgtcctcattgtctatctaatgtctcacccgcagtgttttaagtggatcttggtgccctggcccaggagggcactggcgttttcagacacaccacagacaaacacaccctcctaagcctgcttgtatttccttcagtgcctggcccctgaggcccacggccctgcccccttcactgagcagatgttcacaggctgtgggatgcgaccataactaaacagcttgacgtcaaaaaaaaaaaaaaaaaa

SEQ ID NO: 825 - DNA, 3528 bp, Homo sapiens; identical to SEQ ID NO: 93

SEQ ID NO: 826 - DNA, 2191 bp, Homo sapiens
gttcatttttcactcctccctcctaggtcacacttttcagaaaaagaatctgcatcctggaaaccagaagaaaaatatgagacggggaatcatcgtgtgatgtgtgtgctgcctttggctgagtgtgtggagtcctgctcaggtgttaggtacagtgtgtttgatcgtggtggcttgaggggaacccgctgttcagagctgtgactgcggctgcactcagagaagctgcccttggctgctcgtagcgccgggccttctctcctcgtcatcatccagagcagccagtgtccgggaggcagaagatgccccactccagcctgcatccatccatcccgtgtcccaggggtcacggggcccagaaggcagccttggttctgctgagtgcctgcctggtgaccctttgggggctaggagagccaccagagcacactctccggtacctggtgctccacctagcctccctgcagctgggactgctgttaaacggggtctgcagcctggctgaggagctgcgccacatccactccaggtaccggggcagctactggaggactgtgcgggcctgcctgggctgccccctccgccgtggggccctgttgctgctgtccatctatttctactactccctcccaaatgcggtcggcccgcccttcacttggatgcttgccctcctgggcctctcgcaggcactgaacatcctcctgggcctcaagggcctggccccagctgagatctctgcagtgtgtgaaaaagggaatttcaacgtggcccatgggctggcatggtcatattacatcggatatctgcggctgatcctgccagagctccaggcccggattcgaacttacaatcagcattacaacaacctgctacggggtgcagtgagccagcggctgtatattctcctcccattggactgtggggtgcctgataacctgagtatggctgaccccaacattcgcttcctggataaactgccccagcagaccggtgaccatgctggcatcaaggatcgggtttacagcaacagcatctatgagcttctggagaacgggcagcgggcgggcacctgtgtcctggagtacgccacccccttgcagactttgtttgccatgtcacaatacagtcaagctggctttagccgggaggataggcttgagcaggccaaactcttctgccggacacttgaggacatcctggcagatgcccctgagtctcagaacaactgccgcctcattgcctaccaggaacctgcagatgacagcagcttctcgctgtcccaggaggttctccggcacctgcggcaggaggaaaaggaagaggttactgtgggcagcttgaagacctcagcggtgcccagtacctccacgatgtcccaagagcctgagctcctcatcagtggaatggaaaagcccctccctctccgcacggatttctcttgagacccagggtcaccaggccagagcctccagtggtctccaagcctctggactgggggctctcttcagtggctgaatgtccagcagagctatttccttccacagggggccttgcagggaagggtccaggacttgacatcttaagatgcgtcttgtccccttgggccagtcatttcccctctctgagcctcggtgtcttcaacctgtgaaatgggatcataatcactgccttacctccctcacggttgttgtgaggactgagtgtgtggaagtttttcataaactttggatgctagtgtacttagggggtgtgccaggtgtctttcatggggccttccagacccactccccacccttctccccttcctttgcccggggacgccgaactctctcaatggtatcaacaggctccttcgccctctggctcctggtcatgttccattattggggagccccagcagaagaatggagaggaggaggaggctgagtttggggtattgaatcccccggctcccaccctgcagcatcaaggttgctatggactctcctgccgggcaactcttgcgtaatcatgactatctctaggattctggcaccacttccttccctggccccttaagcctagctgtgtatcggcacccccaccccactagagtactccctctcacttgcggtttccttatactccacccctttctcaacggtccttttttaaagcacatctcagattacccaaaaaaaaaaaaaaaaaa

SEQ ID NO: 827 - DNA, 3407 bp, Homo sapiens
actgcgcaggcgcaggagccgcgctctgggcctctgctcaggctctgccgcggacgacctcgaggcccttagttgactgggaccggaagtggcgtgtgctcggcctttctgtgttcctggcccgcggccgtcgggtgtgagctgcgccgaccgctctgagggttcgtggcccaccgctccttcgcggtccctgccgccaccgtccacgctcagcgttgtagagaagatggtgggtcggaacagcgccatcgccgccggtgtatgcggggcccttttcattgggtactgcatctacttcgaccgcaaaagacgaagtgaccccaacttcaagaacaggcttcgagaacgaagaaagaaacagaagcttgccaaggagagagctgggctttccaagttacctgaccttaaagatgctgaagctgttcagaagttcttccttgaagaaatacagcttggtgaagagttactagctcaaggtgaatatgagaagggcgtagaccatctgacaaatgcaattgctgtgtgtggacagccacagcagttactgcaggtcttacagcaaactcttccaccaccagtgttccagatgcttctgactaagctcccaacaattagtcagagaattgtaagtgctcagagcttggctgaagatgatgtggaatgagaaacaaatgtcaacataataaaatctcagttaaaaatattttaaaaattcttggtagttgagcagctctgggggaataagggcaaatatgcttgttatgaactacactgaaatctaccaaagttaatgtttactttgtgtagatccatttgtctattttatttatttttcccagtgaaaagtgtattttgatagagaacttttcattctataaatacactatgagttactaaaatatcatggattttgtttattcctgaaacatagttacatagttaaactgtacatatgacatggcttatgttaaaaatacccagtgctcagttttgaaagataggcaaaaaaaaaaaagtataggagaaactgaagaatgtacacttttttagagggcacattttgctgtaaatctggaaatttgatagacttgactgtgtttgtgaaaactgagcattaaaggttttgattgatcctttctttccatttaatctctgagacgtaaatatgtgaggtgtgctgctgtgctgggttaacagcttccttccctttctgtgtagcagtcttgaaatgttctgtttaaatcagtaggcttaatgtgttctgggtatttatctccttgtattttaaatatatgtagttgcaaatagcaccaggaattagatttctgtacacccctaatctagccttgtgagcttcgctagttaatgtgtgctcactttccctccatttgttacgtgagagaatgcgtctgctgatcactgaagtgtcccttttagcttctgattcattgggttctgttgggcatctttaaatccaccttaacctgaggaatgtatgtgggcaaccaggccctgcatttttttatattctgaattttgcatgcttgcctgacttagtatttctgaattgatgttttttttaatggtataactatcttgattttcactgaaattatatggttctgtcactactctgtaaattaatccgaaacttttaaggtaactgggatgatctgcttgtaaaaatgcttgttgccttttgctttatcttcagtgtacctccttaatcctgcttcaacttgattatcttgtgaaacgatgagagtaagttgcaaccttgtgactgaaaacttgaaaagagtggagcaggtgggacctcttattctcaaatagtgacatattctccgtagtcacagtttcagaactgagtaaggatccttggtacttggtggcatctgttgaactgaggagcatttctcattgtaaagattgcctttgttctgtctaaaagtctggagaaatcccaaagacttttcctatgtactaggcattttattttgattgacttacaaactcttcttaatcattatcaatctcggtttttttgtggtgcagtggaaggagaaataggtctagtttctgcctctgattagccgcacagccttgaacaaatcacatttcatctttgaacttacctctactgttagactaggcgactcacatttgaggacttttctcgggtatcttgagggtttgtgatcctgaacccttaaacagtgcttttttgttacacaggagggcttttttggggggatgaccagtacagacatgccagttagttttactagtgggatcccaaatccaaagcagtgtagtggtgattggtcagtgactaaccaggcagctaagaagtcttaggcagcagcccagacatgtatagaggggcagttagagggagaacaggggtgggaaagggagcaaggggcagatagctcagcaaggaaagaatgggctcagaaaaaggagggctggctggaggagtgaggggcagcttaagtttggggagggtagaaacgccgtttccttgggaactggagtgcagtatgagctgggtgtcacttggctctgaacatactggctttgctgtaatgcttgaaaaggcgttggtatcttcattttacagttcattaacccaagtacgttttcttatttaaatgacaactttggtgctttaaaatgaggtaccactttttaaagctagctgtgtcgagttaaagaaaaaatcagcagttttttctcccagaaatgtaattgccaaacactattcatccccatcttaagttttacaaggtgatgtaatcagcttgttgtagtgatgctggccaaatggtgctcagcaggtgagaacaaaaaaaccccagatctcagtgaactaatacacagcttgagcgtttccatgtgctaatgttgcacacttactaaaaaactttggaaatggaaaataatgtattagtgcaacagttgatgtgcttctttgggcaaagatatagttttgttccacaatttgtacttaaaagcgaaagaacattgaaaacatagacttactggctgtagcaatgctggcctgttaactgataactagaacttaggttcacgtttatgtaaagtgtgtaaaacctagtagagcttgcatagtcggcactcagtaaatgtttggttccttttgccccttggtaagtttattttaccatcctcccacctgccattctgactttattaaatcaacatgtggaccagagtgttaatgagatgttattgcagaagagattgagaaaattggtatatcatgcagataacatacaaaatctttttgtaacgtaaaaaatgcagttttattattgcttgtgcctcaactgtttaagtgaatattaaagggcttggagaaaaaaaaaaaaaaaaaaaaaaaa

SEQ ID NO: 828 - DNA, 2701 bp, Homo sapiens
tggctgcagagagactaccggccaccgccgccgccgccgccgcgagctgtccctgcggcgcgtctgccttggcggagccgaccgcagtgcgctcaggcgtccggtgcgtccccagcctccgccccggcgcgggggcgacggactcgcgcgtgcgcagcgccggaggggcgcgggctgggaccccctagccagcgcgtgcgccgatcgagcgcagggcgatgggtgggcgccgggcgccgggcgccaggcagtgatgggccttcccgcgctgcggccccactgaggaggaggctcggggacagcaggagcacgggctgcccgcgcggtgcggaccatggcgttcctggccgggccgcgcctgctggactgggccagctcgccgccgcacctgcagttcaataagttcgtgctgaccgggtaccggcccgccagcagcggctcgggctgcctgcgcagcctcttctacctgcacaacgaactgggcaacatctacacgcacgggctggccctgctgggcttcctggtgctggtgccaatgaccatgccctggggtcagctgggcaaggatggctggctgggaggcacacattgcgtggcctgccttgcaccccctgcaggctccgtgctctatcacctctttatgtgccaccaagggggcagcgctgtgtacgcccggctcctcgccctggacatgtgtggggtctgccttgtcaacacccttggggccctgcccatcatccactgcaccctggcctgcaggccctggctgcgcccggctgccctggtgggctacactgtgttgtcgggtgtggccggctggcgtgctctcaccgccccctccaccagtgctcggctccgggcatttggatggcaggctgctgcccgcctactggtatttggggcccggggagtgggtctgggttcaggggctccaggctccctgccctgctacctgcgcatggacgcactggcgctgcttgggggactggtaaatgtagcccgtctgcccgagcgctggggacctggccgctttgactactggggcaactcccaccagatcatgcacctgctgagcgtgggctccatcctgcagctgcacgccggcgtcgtgcccgacctgctctgggctgcccaccacgcctgtccccgggactgagctgccatgccagcctgcccacagcagcctcctagagttagcaacaccaggtgttcctcccaactcgtctgcaaggggctggctccttggatgcttccagctcatgagatgtctcagcaggagccctgttcacccgttcttccctgtggactgacctcttccacccacgccgtggcgctccaacttccttccctgccttttccctccaagctcctattttactgtgtcagctggaaggaaacctttccctcttgggacctctttaccctctgtgacctgtggggttagaccagagagggactctggggtcacgtcttgctctgagagttcaagtcctgccaggccgccagcccagagcctcctcaccctatcctgttcctcccaccaggcctgtggccagtcttcctgatctccatctttctgccctgcataccagccctcccagcagccacaagcttgcccgccctggctccctctgcccagagactatggagtaaggcattcaggacaaaaggaccaagggggcgtggacccgtcttgtaccagctggccacaggcacaagggctgcagctgcttcttccaggaaactgacacagggagctcagcggcctcagatcctgggacccctgggccgtgcctgccctccaccttgagtgccatactcccaacagctccaggtacccaccgggggatgtgcctgctcaggaaacctctttgctccacacagcatggggcttcagctgctggcccaaggccaggagcgctgggttctgcagcagggctcagcctcaggggcgttaagaccctggatgacatcaataaagggacaggaagggccatgttgccacatgagcaagcttgggtgctcccaaggttcaaatactttttattagacacggccaggcagagaagaccatgggagttcccgaggggccccagctttcaagggcgacgggagagacacaggataaaaggttaaaagtgcagaggcagagtctggggctcaggttgggtctagggtgtcctcaaacaggctgaggaggttccgaggctcaaaggaggggaaggagccccgaggaggctctgagttgatgtcacttaggtccagggcatccctgggaggagagagtagtgacactcaggatccaaaagctagccctgcccaccccagcccctggacctgcttacctgggtgtgcacctgctccggggggtggaggtgctccccacagtccgggccaggacagcctcaggggagagtgaaggcctgcaggagggcaggcgagacaaggagggtgtccagggctagggagtgccggatgaaaccagctctgtccctgtgcaggctccaggctcccgcctgacaaacaggcagggagccacagtcagggacaataaaaacttggtgcactctgaaagcagcacttggacagccttcaaagtccttccatctggctgcactccaaggccccctctgtccttttcagaacacatggacttggaggcagatttgaaataaacttttagtaaatgtaaaaaaaaaaa

SEQ ID NO: 829 - DNA, 2151 bp, Homo sapiens
ggcagagcccgcgaggaggtgacgcggctgcggaggtgacgcgggaggtcgcgcgccccttccggcgcggggagggcgctgaagatcggggccgctcggccgcaggccgcctccagcgccgcgggatgtagcgcgggggaccgcggcccccagcagagcccgcctgcccggcttgtctaccatcagagggagatctctgccccctggggctgagagaccccaacctttccccaagctgaagctgcagggtattgaggtaccagccagatgtcttcccacaaaggatctgtggtggcacaggggaatggggctcctgccagtaacagggaagctgacacggtggaactggctgaactgggacccctgctagaagagaagggcaaacgggtaatcgccaacccacccaaagctgaagaagagcaaacatgcccagtgccccaggaagaagaggaggaggtgcgggtactgacacttcccctgcaagcccaccacgccatggagaagatggaagagtttgtgtacaaggtctgggagggacgttggagggtcatcccatatgatgtgctccctgactggctaaaggacaacgactatctgctacatggtcatagacctcccatgccctcctttcgggcttgcttcaagagcatcttccgcattcatacagaaactggcaacatctggacccatctgcttggtttcgtgctgtttctctttttgggaatcttgaccatgctcagaccaaatatgtacttcatggcccctctacaggagaaggtggtttttgggatgttctttttgggtgcagtgctctgcctcagcttctcctggctctttcacaccgtctattgtcattcagagaaagtctctcggactttttccaaactggactattcagggattgctcttctaattatggggagctttgtcccctggctctattattccttctactgctccccacagccacggctcatctacctctccatcgtctgtgtcctgggcatttctgccatcattgtggcgcagtgggaccggtttgccactcctaagcaccggcagacaagagcaggcgtgttcctgggacttggcttgagtggcgtcgtgcccaccatgcactttactatcgctgagggctttgtcaaggccaccacagtgggccagatgggctggttcttcctcatggctgtgatgtacatcactggagctggcctttatgctgctcgaattcctgagcgcttctttcctggaaaatttgacatatggttccagtctcatcagattttccatgtcctggtggtggcagcagcctttgtccacttctatggagtctccaaccttcaggaattccgttacggcctagaaggcggctgtactgatgacacccttctctgagccttcccacctgcggggtggaggaggaacttcccaagtgcttttaaaaataacttctttgctgaagtgagaggaagagtctgagttgtctgtttctagaagaaacctcttagagaattcagtaccaaccaagcttcagcccactttcacacccactgggcaataaactttccatttccattctcctagctggggatggggcatggtcaaacttagccatcccctcctcagcaaggcatctaccggcccctcacagagacagtactttgaaactcatgttgagattttaccctctcctccaaccattttgggaaaattatggactgggactcttcagaaattctgtcttttcttctggaagaaaatgtccctcccttacccccatccttaactttgtatcctggcttataacaggccatccatttttgtagcacacttttcaaaaacaattatataccctggtcccatctttctagggcctggatctgcttatagagcaggaagaataaagccaccaacttttacctagcccggctaatcatggaagtgtgtccaggcttcaagtaacttgagttttaattttttttttttcttggcagagtaatgtaaaatttaaatggggaaagatatttaatatttaatactaagctttaaaaagaaacctgctatcattgctatgtatcttgatgcaaagactatgatgttaataaaagaaagtacagaagacacttggcattcaaaaaaaaaaaaaaaaaa

SEQ ID NO: 830 - DNA, 4214 bp, Homo sapiens
gcgcctcgggcggcttctcgccgctcccaggtctggctggctggaggagtctcagctctcagccgctcgcccgcccccgctccgggccctcccctagtcgccgctgtggggcagcgcctggcgggcggcccgcgggcgggtcgcctcccctcctgtagcccacacccttcttaaagcggcggcgggaagatgaggcttcgggagccgctcctgagcggcagcgccgcgatgccaggcgcgtccctacagcgggcctgccgcctgctcgtggccgtctgcgctctgcaccttggcgtcaccctcgtttactacctggctggccgcgacctgagccgcctgccccaactggtcggagtctccacaccgctgcagggcggctcgaacagtgccgccgccatcgggcagtcctccggggagctccggaccggaggggcccggccgccgcctcctctaggcgcctcctcccagccgcgcccgggtggcgactccagcccagtcgtggattctggccctggccccgctagcaacttgacctcggtcccagtgccccacaccaccgcactgtcgctgcccgcctgccctgaggagtccccgctgcttgtgggccccatgctgattgagtttaacatgcctgtggacctggagctcgtggcaaagcagaacccaaatgtgaagatgggcggccgctatgcccccagggactgcgtctctcctcacaaggtggccatcatcattccattccgcaaccggcaggagcacctcaagtactggctatattatttgcacccagtcctgcagcgccagcagctggactatggcatctatgttatcaaccaggcgggagacactatattcaatcgtgctaagctcctcaatgttggctttcaagaagccttgaaggactatgactacacctgctttgtgtttagtgacgtggacctcattccaatgaatgaccataatgcgtacaggtgtttttcacagccacggcacatttccgttgcaatggataagtttggattcagcctaccttatgttcagtattttggaggtgtctctgctctaagtaaacaacagtttctaaccatcaatggatttcctaataattattggggctggggaggagaagatgatgacatttttaacagattagtttttagaggcatgtctatatctcgcccaaatgctgtggtcgggaggtgtcgcatgatccgccactcaagagacaagaaaaatgaacccaatcctcagaggtttgaccgaattgcacacacaaaggagacaatgctctctgatggtttgaactcactcacctaccaggtgctggatgtacagagatacccattgtatacccaaatcacagtggacatcgggacaccgagctagcgttttggtacacggataagagacctgaaattagccagggacctctgctgtgtgtctctgccaatctgctgggctggtccctctcatttttaccagtctgagtgacaggtccccttcgctcatcattcagatggctttccagatgaccaggacgagtgggatattttgcccccaacttggctcggcatgtgaattcttagctctgcaaggtgtttatgcctttgcgggtttcttgatgtgttcgcagtgtcaccccagagtcagaactgtacacatcccaaaatttggtggccgtggaacacattcccggtgatagaattgctaaattgtcgtgaaataggttagaatttttctttaaattatggttttcttattcgtgaaaattcggagagtgctgctaaaattggattggtgtgatctttttggtagttgtaatttaacagaaaaacacaaaatttcaaccattcttaatgttacgtcctccccccacccccttctttcagtggtatgcaaccactgcaatcactgtgcatatgtcttttcttagcaaaaggattttaaaacttgagccctggaccttttgtcctatgtgtgtggattccagggcaactctagcatcagagcaaaagccttgggtttctcgcattcagtggcctatctccagattgtctgatttctgaatgtaaagttgttgtgtttttttttaaatagtagtttgtagtattttaaagaaagaacagatcgagttctaattatgatctagcttgattttgtgttgatccaaatttgcatagctgtttaatgttaagtcatgacaatttatttttcttggcatgctatgtaaacttgaatttcctatgtatttttattgtggtgttttaaatatggggaggggtattgagcattttttagggagaaaaataaatatatgctgtagtggccacaaataggcctatgatttagctggcaggccaggttttctcaagagcaaaatcaccctctggccccttggcaggtaaggcctcccggtcagcattatcctgccagacctcggggaggatacctgggagacagaagcctctgcacctactgtgcagaactctccacttccccaaccctccccaggtgggcagggcggagggagcctcagcctccttagactgacccctcaggcccctaggctggggggttgtaaataacagcagtcaggttgtttaccagccctttgcacctccccaggcagagggagcctctgttctggtgggggccacctccctcagaggctctgctagccacactccgtggcccaccctttgttaccagttcttcctccttcctcttttcccctgcctttctcattccttccttcgtctccctttttgttcctttgcctcttgcctgtcccctaaaacttgactgtggcactcagggtcaaacagactatccattccccagcatgaatgtgccttttaattagtgatctagaaagaagttcagccgaacccacaccccaactccctcccaagaacttcggtgcctaaagcctcctgttccacctcaggttttcacaggtgctcccaccccagttgaggctcccacccacagggctgtctgtcacaaacccacctctgttgggagctattgagccacctgggatgagatgacacaaggcactcctaccactgagcgcctttgccaggtccagcctgggctcaggttccaagactcagctgcctaatcccagggttgagccttgtgctcgtggcggaccccaaaccactgccctcctgggtaccagccctcagtgtggaggctgagctggtgcctggccccagtcttatctgtgcctttactgctttgcgcatctcagatgctaacttggttctttttccagaagcctttgtattggttaaaaattattttccattgcagaagcagctggactatgcaaaaagtatttctctgtcagttccccactctataccaaggatattattaaaactagaaatgactgcattgagagggagttgtgggaaataagaagaatgaaagcctctctttctgtccgcagatcctgacttttccaaagtgccttaaaagaaatcagacaaatgccctgagtggtaacttctgtgttattttactcttaaaaccaaactctaccttttcttgttgttttttttttttttttttttttttttttggttaccttctcattcatgtcaagtatgtggttcattcttagaaccaagggaaatactgctccccccatttgctgacgtagtgctctcatgggctcacctgggcccaaggcacagccagggcacagttaggcctggatgtttgcctggtccgtgagatgccgcgggtcctgtttccttactggggatttcagggctgggggttcagggagcatttccttttcctgggagttatgaccgcgaagttgtcatgtgccgtgcccttttctgtttctgtgtatcctattgctggtgactctgtgtgaactggcctttgggaaagatcagagagggcagaggtggcacaggacagtaaaggagatgctgtgctggccttcagcctggacagggtctctgctgactgccaggggcgggggctctgcatagccaggatgacggctttcatgtcccagagacctgttgtgctgtgtattttgatttcctgtgtatgcaaatgtgtgtatttaccattgtgtagggggctgtgtctgatcttggtgttcaaaacagaactgtatttttgcctttaaaattaaataatataacgtgaataaatgaccctatctttgtaacaaaaaaaaaaaaaaa

SEQ ID NO: 831 - DNA, 2679 bp, Homo sapiens
ggcagaggagcgagtgcagcggccagcagcacatccccgctccacagtcgccgcagtcgccgcagccgccgccgccgccccgcgcgcccaaccgccgcggccccctgccccgccggcctgccagtgagagagcggcgagggggcgcccggccggactctgagcctagtcctctcgcgctgcggccgcccgcgcctcctcggccgcctgtcgggcatgaaaaccaaattctgcaccgggggcgaggcggagccctcgccgctcgggctgctgctgagctgcggtagcggcagcgcggccccggcgcccggcgtggggcagcagcgcgacgccgccagcgacctcgagtccaagcagctgggcggccaacagccgccgctcgcgctgccccctccgccgccgctgccgctgccgctgccgctgccccagcccccgccgccgcagccgcccgcagacgagcagccggagccccggacgcggcgcagggcctatctgtggtgcaaggagttcctgcccggcgcctggcggggcctccgcgaggacgagttccacatcagtgtcatcagaggcggccttagcaacatgctgttccagtgctccctacctgacaccacagccacccttggtgatgagcctcggaaagtgctcctgcggctgtatggagcgattttgcagatgggggctgaggccatggttctggagagcgttatgtttgccattctcgcagagaggtcacttgggccaaaactctatggcatctttccccaaggccgactggagcagttcatcccgagccggcgattagatactgaagaattaagtttgccagatatttctgcagaaatcgccgagaaaatggctacatttcatggtatgaaaatgccattcaataaggaaccaaaatggctttttggcacaatggaaaagtatctaaaggaagtgctgagaattaaatttactgaggaatccagaattaaaaagctccacaaattgctcagttacaatctgcccttggaactggaaaacctgagatcattgcttgaatctactccatctccagttgtattttgtcataatgactgtcaagaaggtaatatcttgttgctggaaggccgagagaattctgaaaaacagaaactgatgctcattgatttcgaatacagcagttacaattacaggggattcgacattggaaatcacttctgtgagtggatgtatgattatagctatgaaaaatacccttttttcagagcaaacatccggaagtatcccaccaagaaacaacagctccattttatttccagttacttgcctgcattccaaaatgactttgaaaacctcagtactgaagaaaaatccattataaaagaagaaatgttgcttgaagttaataggtttgcccttgcatctcatttcctctggggactgtggtccattgtacaagccaagatttcatctattgaatttgggtacatggactacgcccaagcaaggtttgatgcctatttccaccagaagaggaagcttggggtgtgactgtggggaggactccatccacctcatcactggactgcatggggaggcagcagagcggggtcccctctgtgcttcgactactgctcctgtggcaggaggctttgggtggctcactactgaacacatgtgtatgatactaaagacggtattaaaatggagcgacgtttatttcatctcttgtttacgatttcactaggactcagaaacgagatcgggaagcagaaatatagtgcaatagtgcaacatctctgaatccttttaatctagagaaggcatttcatatttgggggctaaggtttccagtcagatgaggcaaacagcaagagtaagcagtgttacttgcaggtactttggttaatgttgatttaaattttcatgaatgtgctggtgaacactgtgaccaggcttttgtagatggcgatgtgttatagacggtgctcactcccaagggacagcaagtgagcagagatgtactgcaaagtcgccagtcactgctgcaaggtggcctctgcctggggcctccagaagctgctcctttaccctcttggtcccatggctgaagctggagcagcggattgctctggagcagccaaggccgccagcgtgtggagcagagctctcccctcctgctgggcgtgtgtgacactgatgagtttcactgtactgcatgtgacttctcccctgcccttcctcctgatggagtgtgcagacagccatgcgtggccacgggggcagtgtgaggacctccctgtctcccggctcccctcccaggggagccagctgcttgacctagctctttgggcctctcctgccctctgctctgcctggagtgtcggatcctgtgagtaggctgggcctcccctgggcagggttctccaagggcccggtttcccggcccttacctttcctgatgcccctgacatcatcattcttgtgggagacagcagcctgtatgtggtgtggggcgtggatcgagtgtagctgtgaaatccatatatatgaaatgtcctgcgggatacagtcttagctgacttttttttactctgaactcttatttgaattgttttttgtgcatatatttctgctaccacagagattgtactatacaaataaaaaaataaaaacccaaaaaaaaaaaaaaaaaa

SEQ ID NO: 832 - DNA, 658 bp, Homo sapiens
gccggacggacgctcgtcttcgcccgccatggccgagagcgactgggacacggtgacggtgctgcgcaagaagggccctacggccgcccaggccaaatccaagcaggctatcttagcggcacagagacgaggagaagatgtggagacttccaagaaatgggctgctggccagaacaaacaacattctattaccaagaacacggccaagctggaccgggagacagaggagctgcaccatgacagggtgaccctggaggtgggcaaggtgatccagcaaggtcggcagagcaaggggcttacgcagaaggacctggccacgaaaatcaatgagaagccacaggtgatcgcggactatgagagcggacgggccatacccaataaccaggtgcttggcaaaatcgagcgggccattggcctcaagctccggggaaaggacattggaaagcccatcgagaaggggcctagggcgaaatgaacacaaagcctcgaaatcagtgcgctccagctgatctcgttccgccggttccccttggccgccagttccgttctcctcacgggccgaacggaacaaggggtccagcttgcgggggaccctccccagcccattcctgctgtcaaacaaacaaaaccttgcaaagcgaaaaaaaaaaaaaaaaaa

SEQ ID NO: 833 - DNA, 11264 bp, Homo sapiens
ccgggagtccgggcagcgttcggcgcgccgggccggggtggcgggcggccccgggaccccggcagctggagaaggagccggagcccggccgggatgagaaggtgacgccgccgggggcgccactcgctttgtgggggaagatgctcgcctactgcgtgcaggatgccaccgtggtggacgtggagaagcggaggaacccctccaagcactacgtatacataatcaatgtgacctggtctgactccacctcccagactatctaccggaggtacagcaagttctttgacctgcagatgcagcttttggataagtttcccattgaaggtggccagaaggaccccaagcaaaggatcatccccttcctcccaggcaagatcctcttccgcagaagccacatccgggacgtagctgtgaagagactgaagcccatcgatgaatactgccgggcacttgtccggctgcccccccacatctcacagtgtgacgaagtcttccggttcttcgaggctcgacccgaggatgtcaaccctccaaaagaggactatggcagttccaagaggaaatcagtgtggctgtccagctgggctgagtcgcccaagaaggacgtgacaggtgccgacgccaccgccgagcccatgatcctggaacagtacgtggtggtgtccaactataagaagcaggagaactcggagctgagcctccaggccggggaggtggtggatgtcatcgagaagaacgagagcggctggtggttcgtgagcacttctgaggagcagggctgggtccctgccacctacctggaggcccagaatggtactcgggatgactccgacatcaacacctctaagactggagaagaggagaagtatgtcaccgtgcagccttacaccagccaaagcaaggacgagattggctttgagaagggcgtcacagtggaggtgatccggaagaatctggaaggctggtggtatatcagatacctgggcaaagagggctgggcgccagcatcctacctgaagaaggccaaggatgacctgccaacccggaagaagaacctggccggcccagtggagatcattgggaacatcatggagatcagcaacctgctgaacaagaaggcgtctggggacaaggaaactccaccagccgaaggcgagggccatgaggcccccattgccaagaaggagatcagcctgcccatcctctgcaatgcctccaatggcagtgccgtgggcgttcctgacaggactgtctccaggctggcccagggctctccagctgtggccaggattgcccctcagcgggcccagatcagctccccgaacctacggacaagacctccaccacgcagagaatccagcctggggttccaactgccaaagccaccagagcccccttctgttgaggtggagtactacaccattgccgaattccagtcgtgcatttccgatggcatcagctttcggggtggacagaaggcagaggtcattgataagaactcaggtggctggtggtacgtgcagatcggtgagaaggagggctgggcccccgcatcatacatcgataagcgcaagaagcccaacctgagccgccgcacaagcacgctgacccggcccaaggtgcccccgccagcaccccccagcaagcccaaggaggccgaggagggccctacgggggccagtgagagccaggactccccgcggaagctcaagtatgaggagcctgagtatgacatccctgcattcggctttgactcagagcctgagctgagcgaggagcccgtggaggacagagcctcaggggagaggcggcctgcccagccccaccggccctcgccggcctcttctctgcagcgggcccgcttcaaggtgggtgagtcttcagaggatgtggccctggaagaggagaccatctatgagaatgagggcttccggccatatgcagaggacaccctgtcagccagaggctcctccggggacagcgactccccaggcagctcctcgctgtccctgaccaggaaaaactcccccaaatcaggctcccccaagtcatcatcactcctaaagctcaaggcagagaagaatgcccaggcagaaatggggaagaaccactcctcagcctccttttcctcatccatcaccatcaacaccacttgctgctcctcctcttcctcctcctcctcttccttgtccaaaaccagtggcgacctgaagccccgctctgcttcggacgcaggcatccgcggcactcccaaggtcagggcaaagaaggatgctgatgcgaacgctgggctgacctcctgtccccgggccaagccatcggtccggcccaagccattcctaaaccgagcagagtcgcagagccaagagaagatggacatcagcactttacggcgccagctgagacccacaggccagctccgtggagggctcaagggctccaagagtgaggattcggagctgcccccgcagacggcctccgaggctcccagtgaggggtctaggagaagctcatccgacctcatcaccctcccagccaccactcccccatgtcccaccaagaaggaatgggaagggccagccacctcgtacatgacatgcagcgcctaccagaaggtccaggactcggagatcagcttccccgcgggcgtggaggtgcaggtgctggagaagcaggagagcgggtggtggtatgtgaggtttggggagctggagggctgggccccttcccactatttggtgctggatgagaacgagcaacctgacccctctggcaaagagctggacacagtgcccgccaagggcaggcagaacgaaggcaaatcagacagcctggagaagatcgagaggcgcgtccaagcactgaacaccgtcaaccagagcaagaaggccacgccccccatcccctccaaacctcccgggggcttcggcaagacctcaggcactccagcggtgaagatgaggaacggagtgcggcaggtggcggtcaggccccagtcggtgtttgtgtccccgccacccaaggacaacaacctgtcctgcgccctgcggaggaatgagtcactcacggccactgatggcctccgaggcgtccgacggaactcctcctttagcactgctcgctccgctgccgccgaggccaagggccgcctggccgaacgggctgccagccagggttcagactcacccctactgcccgcccagcgcaacagcatacccgtgtcccctgtgcgccccaagcccatcgagaagtctcagttcatccacaataacctcaaagatgtgtacgtctctatcgcagactacgagggggatgaggagacagcaggcttccaggagggggtgtccatggaggttctggagaggaaccctaatggctggtggtactgccagatcctggatggtgtgaagcccttcaaaggctgggtgccttccaactaccttgagaaaaagaactagcagagggcctgggctcttccagcctcagtgtgcctctctggccgcccactggatgagcggtgagacgaacaaaagggaaaggaaaaaatgggggtggggggtggggggtggacaacattcaacactgcagaatgggtgacctcaaagatgccccctgtccaagccatcccacagctggaaggtaggggatgggggtgcccacactgagtgaggaagggaatggaccagggagtcccaggcctgggacccagagccaagaaagctgagatatcctgtgcaccatagggacttcaccaatggattacatgccatctgggacaggccatgtgggagaccccagttgtgcctttgctacagatctggaaaagacaaggtcatgggggcctccagtgtcctgcccctgcttggcccagttttgattgctggcatcttgccaccccaggtatccctggtattgtcctaagctgtatttgtgaattgtgctggtttcctgggcattgccacgcctaccacaggtgggtacattagaagccaccactggctttcaggcttgggggtgtcttctgagctcaagcctgcttctgggccaggccattgtcactgttagttgaagaaaaagcagttcccaggtgccagcaaagaccatctttcataactgtcactgtcttggccttgagaagagagcccgctctccgtggggcaccccatggaggacacagtaccagagtttacagagagggtgggcgaagccaccggtctcttcctaatctgcacagactattttgggtatttctgggcgggcagttcctttgcatgtttcgggagaggtttgttgatttggggcttatatgtcaggcctttggtttgcgtcttattttaggggttgtttgggggcctgggtggtcggcctcacatgggaaggggatgggtagtggatggggtttctgttgtatcttgtgggcgggtgattttgcttttgtttttgtttcacattcttccccctccacaagccaaagtcgtttcatttggtttccactgtgtggactgtgctggagcttggcgcctgccagaaaaatttggggctaggcaagccccaggttgcagacatggtgaagcagagaaactgttcttctggttcctgcacaacctcagaggggcaaaaaccctccccaggaaggaggagggtgttcaggagccagacttttggagagaaggcagctcccagcctgctgggtgaccgccattctgcgtgtgttccccagctgggcagggctggaagccttacgtatgaagcatggagaagcagccattgtccccactatgggcagaggggggacccggctggccccttgggtcagactggagccaacaccgccagccaccccctctggcctgctggcaatgccacaggtgcccaagaagatggaggatccctgtgccaggagccaacctggtcttcccgagggtcagtgccccagtgaagacagaagcgagagaataaagttccctgtaggtcctctgtcacctttgggttgtgtttttcaattgttgacatttcagaggggaccctccagaagcccagccggcttcccccaaggactcccccttcgctgggagtggatttccacacgtgcctttgatttcggacagattgggcctcacagccaccgattcagctgccagggtccctggactgggggttggtgttttctatagaggaggaaaggccctccctcaccctgctccccacccaggcagggcagcatgggacccagtgtctcagtgccttcaaaacccacccccacccctaccctaccccaccacaccccatcccagaggccttgcctgggcaaccctaagcccctgtccctcgccatacactgatgcctggcagctagagcaaatggctcgtgttctttgtcgaaggcctgtggtgagattgttttgtttccttttgttttgtgagtttgtttaaaattgaaattagttattttcttctgctggacagtattaaatagagcaggatgttgagttaatctgctagattgcagtactaatggtagtggtttagtgtcttcatgttaatattatttgtacttatttgaacaataatgataaagaagtggttcattattttttaattaatgcactttaaataaggtagaatggaaaaaacccagagagcaaagtgcattacttaaagatgcagtatatacttttctcatttttaaacagcacatatttattaagagaaaaaaagtaatttatgactatttaaaataaaatttaaaagtagagtgactgtcaggtaaagaaccttcaatgtagctatcttccagggggagggccctgcagcctcgctcctcagatgtctgcactgagccagttcagtcactagtgcgccagccaggccaggagggagtgcagagcatgtctgccaagcacagagcatctcagttggactggaccacagtgctcccgagagcctgcctttcctgcccttccccaccacctgcactgccccccacattctcccagccccccccaaggaccccctctccttgacccccagtgctgtaagtaatagagtcattaaaatgcaggactgaaagagacctcagaggtctctatcccatcccttcctgttactgcggcccaaggacaggaaacaacttttccaaaatcccacagctagttaatgacagatctccccactacattaatcccgtgctcctcctcactgccattatagtttattgtgtggtcatgtttacattgtgacatccagccccaaggatggctgggagttgctcaggcatccaggaaaagtggggaatgctgccatctggtgacagcatgtagatttgggcagtgaacagggattgccatgccccagtcttcgcacctcgccccctcaccccctaactcacagcacaaaccctgcaaacccaaagagaatattaatacttgaagcaagaagggtgcatgccagtccttctccgacatggccagggggtaccaggccttgtgcgcctggcctcctagccctagccagggcgagagggcctttcccttgagctactgagctgctttgtgatgctgaaggatactgccggcagcaggcagaggagggagggggcctagggctctgacccatctggaggaaaaccagatcggactaaaaaaggaaaaagaaaaacaaaatctccgcagtgtccaaacctagtttcccatgagttgcgactgaaaatgtgaaacgacactgtattgctgtatactgcaactttaaccataatgagcccttctgaggtcattattgaggttcatataatgcccgaagatgcagcatttggtgctttgttttcctttccgtttcaagacctttttcttttattgcaaggggaaaaaaatgtcatctccccccacctcatccctctttgtgacagcagacctggctgtgttgcccctctcctcctcactattctcaccaggccatgggactttgggggcagtgagagagagctggaaaggggcaaccctgagcagcaggtgtgccccatgccctgtgggtttcccctatgtccaatgactgtagacgggctgtcttgccaggcctcagccccgtctaccctaagcctggccccaaaggtttctctttcttcctccttgattttccatcttgacgaaggcattatatagaatcattttaatcactttcagatgttagagcagcgtattttacaggcatttatatccattgctttcctcagcaaggcatgttactacttttatcatctaaggaaaaaagacaagggaattccagtcaggcattattttcctattactagtgtttgcagaataggtgtaggactatttaagtttagaccttggtttggtagttcttgtttttaataaggggaaaaagataaaataacccctatttttcctgttattgtatttaactaatatattatttctttaaggttactcacttcccctacccctccaaataccttgcattctcaatcaaaaatggaaacaatctgagagacaggaaaagtgcaatattaccaagatggatgccagggctcattggggacaatggagggaataccagtggcgctcagagagcaagaggcagggagcggggtgctgaaggaatcctagctgtggaacaggtgggtgggttggtggagtttgatcttgtggcgttctcctctcccccttctttgggaagatgataggggtccctgccagatccacccagaagaaagggattcaggcatggggcccttgacctctaggccccagtccctggagcagaggcaggccctcgggagctgttccttgttttgatttctgttgtggtgcagccagctgctcagagagacctggcctaaaaatgactcccagcagccctctctcaccccagtgtcctgatatttgggctgtgatccttctggtgtatgtttgaatctttctaaaactgggtgccctcagttcagtttctaggcaggaagcctagaagtcaccagatctttttgggggatgtgagaaccttgagccgcgcacaccctggtgagacaccaattcccacaagcctgcagcagggcctggggctgagcctgggctgcccattcatctcagcgacttcagcctgagaagtgagccctgcctgggctccacacccagagagtccatacaaattctgctccgggaagagtcggggggtctattcaagtttctctgcagacaaaacttcccacaacaggtaccaatctggcctccttcctcagcaccggtagagaaagcaacagaatgggaagtttcctctgggttggagcctcagagctctgcccctcaaggtgacagggacgtccctgtggcttgttccctccacctccagtactgtatgcttgctacttcaaccccctatttggtgaatttctgcacagacacagatctctgtgcctggaatgggactgtgccctgtgcgggtctctcccttggcgtatatccatctagatatttagtctttgagaatctcaaagcagagctctctgggaagagaactgtccacattgctaaataattaagattccctcacttttttgagggccatgtgttgtgagagagagagagagagagagagtgtgtgtgtgtgtgtgtgtgtgtgtgtgtctgtgtatgcaagtgttggtaacttcccacttgaactaaataacatggggttagagaaaaaaaaataccaggcaagctgtctccattgaacaagtccttggcaatgggcaggtcccaagggactcacagcttctggcagcaagtgtgtcattcacacacatcattctggctggagagtgcaatgtgtcatttttttttctttttgtaattattttattaagtatttagttggaaatttcacactggcattaacaggtctagcataagtggcctaggcagtcatcccaggctccaaaatgaagatgtgcaaaagagatgccactgggaatagaaacactgagttggttcagttaggtcatcccctgcagacgtgtcatcgagcaggctgactcccacccctcagccatgccatgggtatgagaagccccttataatgaaagctgccagccctttcgtccttgtttcagagggtgggtcaggtggttggggtgagaacttgctcacggtgcacccaacaagacctgcaggtgcatataagtttagtcccaactgcagggccagaccaaacacttcctgggaagtgtgtggagggctgtgctagaccttcctgagtttctggctaaatcatcagccctgtttggtgcagtctcatgtctctgtggttcccaagctgcatgatcagagccagtgagaagacaggatcagtgacccacagctttggggaaaaacagccccactgttaacttccctcctgcaaacctgggtccccaggccataaggtgggcacactggtgcttacagactgggtggagagccctaccttccaaggtcttgatcccagcctgcctataaggttgggattagcatgcaatcccccttccccaatcctgtctttttaaaatctcaagtttgcacttaaccttgacaacagcaccctctcctactccagtcctagaactcagtggccttagagaatggggtcccctgcactgaaggtccccgccttgctcccagttccatcctggccaataggctgcgcctcaagaggtgaaagagaaaaaagggagggagggaggaagaattatttagaacaaaaggatggctcgagcacgttagaggcaagtgagaggcacgttggtgagaagagcatgtgcatgtttggggtagctggggcctactgtcccttcattagggaaggaggcttccagaagcggatgtcttctagaaagaaaaattgtgtgaaggctgaaaaggggcttggagttttgtctttgttgattagaaagaaggaagaagtcagctctgagtgtttcaggaagaagagagcaggtagaaagggaatttagtgatttaacacccaagggtccagccatagcaggttggaaaatcctccaaatttggccacagaaactggctaggaaaaaactgccactcattgggccacacgctgggtccccatcagttctcaatgaatggtcattgatttacttagcagagagaagtcaccagccacaaaccaatctttgagtttgcaggccctgattccagaatatatgcatccagctcccgggttctcagctggttttgcccacttccctttgactgtccaatccaaagccagtctctcaagttgtatggctcaaagagcagtgaccacaatgggtcatacagtagggacccacctccacaaattagaaccagagttcagactccattgggcacatctgggaggaaggcaacctcctttgtcgtcttgttggtaccagtcattctcaagtatctctgacacctgtggtggttcagtttgctgagcctgccacctggtatgaattagactgggtgtgatgaacattcatccatggatataccctaccattttgcgttgccttataaccaaggcacactccccataagagtttactgcagagaaagaacagcaaaacagccaccctccttgaatttacaactcattatctgcaacaggttttctttaaatccaagacacaggatgggaaatgggtttccccaccaggtactcagaggtctgcaggaagtgactcccgggcaaggcagacttcagtaatccctgaagcgtgagcatgtggactgcatggctgggtggggactggtggatgtctctggagctccagaaccttggagaattcctcatggaattcccctcccagctcttagtgggctctgtggggtcaggaggagcccttcctccaggttttccttctttcctcctcagcagagaaactggagaaaggacattaaactcagtgcagtcgatttgagtgctgaaatatttccagaatcaatggtggtgctaaactatctccatgtttctagcatttttaatagtggagttggtttgtttttaatctcatcacaaaaatgcagtgcccttggggaagggaccagccccttggcctgccactttccaggtgtcctttatcactttgacgggactctttggtctgcagaaaatgctctgtcttggcatgcttctagactgtaagatttgggttttgttttgtattttatgtttacatgcatcttatatttccctgaaaactaaataaagttttgggcctttttaaccgaaaaaaaaaaaaaaaaaaa

SEQ ID NO: 834 - DNA, 2953 bp, Homo sapiens
agagccatagcaggctgctgtctcacagagcgagaaggtgtcaggagcagcccagttgtgtctctctctctacctctgtgaagggcgcgaatgggcagagcagaacttctagaagggaagatgagcacccaggatccctcagatctgtggagcagatccgatggagaggctgagctgctccaggacttggggtggtatcacggcaacctcacacgccatgctgctgaagctcttctcctctcaaatggatgtgacggcagctaccttctgagggacagcaatgagaccaccgggctgtactctctctctgtgagggccaaagattctgttaaacactttcatgttgaatatactggatattcatttaaatttggctttaatgaattctcatctttgaaggattttgtcaagcattttgcaaatcagcctttgattggaagcgagacaggcactctgatggttctaaaacatccctacccaagaaaagtggaagaaccctccatttatgaatctgtccgggttcacacagcaatgcagacaggaagaacagaagatgaccttgtgcccacagcaccttctctgggcaccaaagaaggttacctcaccaaacagggaggcctggtcaagacctggaaaacaagatggtttactctgcacaggaatgaactgaaatacttcaaagaccagatgtcaccagaaccaattcggatcctagacctaacagaatgttcagctgtacaattcgattattcacaagaaagggtaaactgtttttgtttggtatttccattcaggacattttatctctgtgcaaagaccggagtagaagctgatgagtggatcaagatattacgctggaaattgtcacaaataagaaaacagctcaaccaaggggaaggcacgatccgatctcggtcgttcatctttaaatagatctttcttgccaaggaatgctctggcccaggagcaaggtggaatgtttccctgacgctgtgatctgcagcaggcttcaaatgaaaaccgactaaggattttctttcaaaaacaaatcagaagcagatgctgattgggacccatataccacgttgctgactcacgttgctgcccttccatgatgttgccatctccttgagaacactgaagcaatcaccattctgatagaaagtgcttaaaccaccactcttaggtctgctcactcttagaacacacaatggaagaggaagggtttttgttttcactcattgtggtccccaagcctattgacactagttgcctagagtcccactgtgagtcatggtcagcctgtctgacatccaggttgtgctattaaccaagaaggaaacagatacttggaggcttagatgacttctgcaggatttatattcagatagaaaacatcaaatattttcaggggagaggtttttttttttaatttttccccctttatacaaaaaaaaaagaacatttccaaaactaaaatagaaaatgcttgtggcatttattttctctttttaaaaggttcagaaatttggcaggtcctttgcttctaatgacaaaactgtgagagctagatgtcctatgggcaattaggtagtataataaaggtaaatgaaggtacaatttttaaaccattattttcaccctgttggggtaaatgttttaaagagtgagaaaacataaattgagaaagggtgataaagtaatagataacttttagtttaataataattattgttattatactactaataatagagcacttgtaagcactaagttatctttatccaacatttctccaaatggactgaaagaaacttttcaaggacagtgtattataacaatccctttcccagaattagttgtatagggttggcccaagagatgtaagaaaaatctcgcattgctccctaagcaccctgggccttattaaagagcaacttctatttccagtcgggggagtaacactaaagctacaagaaatatgtaataatgataggtaataatgtgttccaaagctttttcaaactagaataaggaggcaaatagaagaatgagatactgatgtccacagttcattggcagaatctaaccccttctgttatcttttttaatactatttttgtttagatagaagtttcaaagaagataaaaatgcttgaagagcctgagagtaaaaagattatgctgcaaagctatgatataaactgctcttgcagtccaaagggatacctgattaaagaagtttcttatttaaacatctcagacgcaaaaattacattaaatttttgtatatttcaacaacattttaaatgtattttgttatgtttgtattatataggataaagcaaatgtcaagttaaaatgtattgtgttgtttgtaaagtaagaagttactggccaggagcggcggctcatgcctgtaatcccaggactttggtaggccaagacaagcagatcacttgaggtcaggagttcaacatcagcctggccaacatgatgaaaccttgtctttactaaaaatacaaaaattagctgggcatggtggcaggcgcctgtaatcccagctactcaggaggctgaggcaggagaattgcttgaacccgggaggtggaggttgcagtgaaccaagatcgcggcgctgcactctagcctgggtgacagagtcagactccgtcccaaaaaaacaaacaaacaaaacaaaacaaaaaaaaacagaagttacaaatgaatactcacggatatgtatagttttatgtttgttttcttagaaacaaatgtgtttctttgggtgggtaatattgtgttttactatgtttaccttttataaaacataacctgtttatttatattctttggctttgtttattaaaaagcatgattttgctgtgcatgtaccattttgctattaaaatttatttttaatatttgtaacttgaaaaaaaaaaaaaaaaaa

SEQ ID NO: 835 - DNA, 1688 bp, Homo sapiens
gcagttctttgaatttctcaccctaagatctggcctgtacattttcaaggaattcttgagaggttcttggagagattctgggagccaaacactccattgggatcctagctgttttagagaacaacttgtaatggagccttcatctcttgagctgccggctgacacagtgcagcgcattgcggctgaactcaaatgccacccaacggatgagagggtggctctccacctagatgaggaagataagctgaggcacttcagggagtgcttttatattcccaaaatacaggatctgcctccagttgatttatcattagtgaataaagatgaaaatgccatctatttcttgggaaattctcttggccttcaaccaaaaatggttaaaacatatcttgaagaagaactagataagtgggccaaaatagcagcctatggtcatgaagtggggaagcgtccttggattacaggagatgagagtattgtaggccttatgaaggacattgtaggagccaatgagaaagaaatagccctaatgaatgctttgactgtaaatttacatcttctaatgttatcattttttaagcctacgccaaaacgatataaaattcttctagaagccaaagccttcccttctgatcattatgctattgagtcacaactacaacttcacggacttaacattgaagaaagtatgcggatgataaagccaagagagggggaagaaaccttaagaatagaggatatccttgaagtaattgagaaggaaggagactcaattgcagtgatcctgttcagtggggtgcatttttacactggacagcactttaatattcctgccatcacaaaagctggacaagcgaagggttgttatgttggctttgatctagcacatgcagttggaaatgttgaactctacttacatgactggggagttgattttgcctgctggtgttcctacaagtatttaaatgcaggagcaggaggaattgctggtgccttcattcatgaaaagcatgcccatacgattaaacctgcattagtgggatggtttggccatgaactcagcaccagatttaagatggataacaaactgcagttaatccctggggtctgtggattccgaatttcaaatcctcccattttgttggtctgttccttgcatgctagtttagagatctttaagcaagcgacaatgaaggcattgcggaaaaaatctgttttgctaactggctatctggaatacctgatcaagcataactatggcaaagataaagcagcaaccaagaaaccagttgtgaacataattactccgtctcatgtagaggagcgggggtgccagctaacaataacattttctgttccaaacaaagatgttttccaagaactagaaaaaagaggagtggtttgtgacaagcggaatccaaatggcattcgagtggctccagttcctctctataattctttccatgatgtttataaatttaccaatctgctcacttctatacttgactctgcagaaacaaaaaattagcagtgttttctagaacaacttaagcaaattatactgaaagctgctgtggttatttcagtattattcgatttttaattattgaaagtatgtcaccattgaccacatgtaactaacaataaataatataccttacagaaaatctgaaaaaaaaaaaaaaaaa

SEQ ID NO: 836 - DNA, 6498 bp, Homo sapiens
cggggccggggcggggccgagcgcggcgcagcggagcggggcagagcatcctgcgccccggcgcggggccctgcggtagcctcaggcccctcccctggacccgccgcagagccagtgcagaatacagaaactgcagccatgaccacgcacgtcaccctggaagatgccctgtccaacgtggacctgcttgaagagcttcccctccccgaccagcagccatgcatcgagcctccaccttcctccatcatgtaccaggctaactttgacacaaactttgaggacaggaatgcatttgtcacgggcattgcaaggtacattgagcaggctacagtccactccagcatgaatgagatgctggaggaaggacatgagtatgcggtcatgctgtacacctggcgcagctgttcccgggccattccccaggtgaaatgcaacgagcagcccaaccgagtagagatctatgagaagacagtagaggtgctggagccggaggtcaccaagctcatgaagttcatgtattttcagcgcaaggccatcgagcggttctgcagcgaggtgaagcggctgtgccatgccgagcgcaggaaggactttgtctctgaggcctacctcctgacccttggcaagttcatcaacatgtttgctgtcctggatgagctaaagaacatgaagtgcagcgtcaagaatgaccactctgcctacaagagggcagcacagttcctgcggaagatggcagatccccagtctatccaggagtcgcagaacctttccatgttcctggccaaccacaacaggatcacccagtgtctccaccagcaacttgaagtgatcccaggctatgaggagctgctggctgacattgtcaacatctgtgtggattactacgagaacaagatgtacctgactcccagtgagaaacatatgctcctcaaggtgatgggctttggcctctacctaatggatggaaatgtcagtaacatttacaaactggatgccaagaagagaattaatcttagcaaaattgataaattctttaagcagctgcaggtggtgccccttttcggcgacatgcagatagagctggccagatacattaagaccagtgctcactatgaagagaacaagtccaagtggacgtgcacccagagcagcatcagcccccagtacaatatctgcgagcagatggttcagatccgggatgaccacatccgcttcatctccgagctcgctcgctacagcaacagtgaggtggtgacgggctcagggctggacagccagaagtcagacgaggagtatcgcgagctcttcgacctagccctgcggggtctgcagcttctatccaagtggagcgcccacgtcatggaggtgtactcttggaagctggttcatcccacagacaagttctgcaacaaggactgtcctggcaccgcggaggaatatgagagagccacacgctacaattacaccagtgaggaaaaatttgccttcgttgaggtgatcgccatgatcaaaggcctgcaggtgctcatgggcaggatggagagcgtcttcaaccaggccatcaggaacaccatctacgcggcattgcaggacttcgcccaggtgacgctgcgtgagcccctgcggcaggcggtacggaagaagaagaatgtcctcatcagcgtcctacaggcaattcgaaagaccatctgtgactgggagggagggcgagagccccctaatgacccatgcttgagaggggagaaggaccccaaaggtggatttgatatcaaggtgccccggcgtgctgtggggccatccagcacacagctgtacatggtgcggaccatgcttgaatcactcattgcagacaaaagcggctccaagaagaccctgaggagcagcctggatggacccattgtcctcgccatagaggactttcacaaacagtccttcttcttcacacatctgctcaacatcagtgaagccctgcagcagtgttgtgacctctcccagctctggttccgagaattcttcctggagttaaccatgggccgacgaatccagttccccatcgagatgtccatgccctggattctaacggaccatatcctggaaaccaaagaaccttccatgatggagtatgtcctctaccctctggatctgtacaacgacagcgcctactatgctctgaccaagtttaaaaagcagttcctgtacgatgagatagaagctgaggtgaacctgtgttttgatcagtttgtctacaagctggcagaccagatctttgcttactacaaagccatggctggcagtgtcctgttggataaacgttttcgagctgagtgtaagaattatggcgtcatcattccgtatccaccgtccaatcgctatgaaacactgctgaagcagagacacgtccagctgttgggtagatcaattgacttgaacagactcattacccagcgcatctctgccgccatgtataaatccttggaccaagctatcagccgctttgagagtgaggacctgacctccattgtggagctggagtggctgctggagattaaccggctcacgcatcggctgctctgtaagcatatgacgctggacagcttcgatgccatgttccgagaggccaatcacaatgtgtccgccccctatggccgtatcaccctgcatgtcttctgggaactgaactttgactttctccccaactactgctacaatgggtccactaaccgttttgtgcggactgccattcctttcacccaagaaccacaacgagacaaacctgccaacgtccagccttattacctctatggatccaagcctctcaacattgcctacagccacatctacagctcctacaggaatttcgtggggccacctcatttcaagactatctgcagactcctgggttatcagggcatcgctgtggtcatggaggaactgctaaagattgtgaagagcttgctccaaggaaccattctccagtatgtgaaaacactgatagaggtgatgcccaagatatgccgcttgccccgacatgagtatggctccccagggatcctggagttcttccaccaccagctgaaggacatcattgagtacgcagagctcaaaacagacgtgttccagagcctgagggaagtgggcaatgccatcctcttctgcctcctcatagagcaagctctgtctcaggaggaggtctgcgatttgctccatgccgcacccttccaaaacatcttgcctagagtctacatcaaagagggggagcgcctggaggtccggatgaaacgtctggaagccaagtatgccccgctccacctggtccctctgatcgagcggctggggacccctcagcaaatcgccattgctcgcgagggtgacctcctgaccaaggagcggctgtgctgtggcctgtccatgttcgaggtcatcctgacccgcattcggagctacctgcaggaccccatctggcggggcccaccgcccaccaatggcgtcatgcacgtcgatgagtgtgtggagttccaccggctgtggagcgccatgcagttcgtgtactgcatccctgtgggaaccaacgagttcacagctgagcagtgtttcggcgatggcttgaactgggctggttgctccatcattgtcctgctgggccagcagcgtcgctttgacctgttcgacttctgttaccacctgctaaaagtgcagaggcaggacgggaaggatgaaatcattaagaatgtgcccctgaagaagatggccgaccggatcaggaagtatcagatcttgaacaatgaggtttttgccatcctgaacaaatacatgaagtccgtggagacagacagttccactgtggagcatgtgcgctgcttccagccacccatccaccagtccttggccaccacttgctaagcagaagatcctgcagacccttatctggaggaggaagagaagcaggagagagaaagccacagccagcctgccataggatccaactggacaacgtgtgggatggacctggaaacaagcacctccccaaacacatcaccactccctagggcggggcctgtgcatgctctcccatgacatctccatgctggtttctccatagcataaatgaaaaaaaaaaaaaaaaagtaaacagggcagtgtgtgctttttcttttctcccccctcaactatattaagaactcctagtttcaccctttctccatcccatcatcccacctatctgtggttgcttcccaagacctcctcccaagatagacatctcctacccagtgcccttgtgtgaccccaggactcaagtctcagactgtgaacagatgtggccatgcccagagacgccagcctggccagaagggcatgcctcagcttactacttcatctctcctggttccctccctgcagtgccccgggtgtcatcttctcccactctgggtaccagggattctaccacataggcttcccaaagccccattctaactcccctctctcagggaagccctagagagaggtccaaaaagcattcacagctgtatcacactctatgcaggtggggtaggagactgatcaggcctgctgtggggaagcagtatgtatgaacacagccagaaatgtcatagtccaaacaggatgctttcaggccatctcagctgcttgatggtgagatggttcccttattccttcaggaaaggcttagcattgggccacataggggaagcagctttgaacaaatcagtcatagcactgcctatagcattagccagtgaccaaattagggacaacgtcttggcacagaattgcttatcaaggaacatttccacaagaaagaaaatattaaggggttatttccacagaagcccaaaacgtcttggaaacacagaggtgaggaggaggaatagtaattgtcaatgagcttttaataccaagatacaccccctgcccccaaagaagagtcctcttttagggaatcagaaccttcattgtcctagaagctgaaagattcttggaacattttagcttttactctcaacttgctgttctctttacattccttaagttagactttcgggtgtggcttctctcccaggggtaacatttacttccattttctagactgaaccaaaagtcttctgcagaatctcccaccgagtgtggtaagaaggaaggacaaaaggctttaggatataaatttcatgttacagagcatgtcattgtcaaaggaaatctgtggccctgagattttaagaacataaaatgtgacatttgatatttctccagcccagggaagtaagatggttagcaatggttgccttaatcaaatggtcccatttttaaccccaaaggaagtgcccacagcaagaggtttgtgtgatgcacttatgtcctccggtgaggaaagggggccacatatgaaaggccccttaggtcagatcctgagagtagcacatttgagtgcagattcctgggccccacctcaaacctactaattctgaatctctgggaatagggccaggaaatctgccctttctacaaactacccaagttgttctgttgcacatcaatgtttgggaaccactgctgtaagggaatcattctggtcaccttgagctttgagctaccactaagccatgaaagaaaatacatcatacagggaagagagaagggaggaggttccaagtagtaactggcagatcctcctgtctggaggtaccaccttctattctggtttctgacttttccttcttgatgaccatagatgtgttccagaggcaaaagagacacattatcccagatggcagaacatgctttcaaaacatataaaatgtcaaagttccagatccttctacatctttagtcctgtctgaggatggtagctggctctctgtagctgatagatggctagagttccatccaaatccttgaccacgacttcatggagatttgaataatctatttgatgagatttctatttcaataacccacctctctcaccccacattcatatccctaaatttgaccctctgggccgagtcacattaccttcaggagacttgatcccagtagactgaggtcttccctttcagcagaaagatttcatttccctggcttgccagtggcactgatttccgaacacccaatgagtttaatattctttcctccttggcattactgccccagcctctttttattttttttgtgtgtgtctaataaccaggaaaaaaataaagcttaggttttaaaaagttttaaaaataatctgtttcagaaactgtcaaatgtaccatatttgtattaagagttgttgggaatttttgtacaatgaatttacatttatttatggtgacatatttacgcttgtgatcaaataatgatgttaaattcttaaatcatatttgctatgcagctgaagatgatattttgatttgtattttgggggtacctgtgttgagttgataaacatttccatcttcattaaaactgcttccaaactagtaaaaccagcaa

SEQ ID NO: 837 - DNA, 1207 bp, Homo sapiens
aaatggacgagaggtcagggtaggtttttgaagatggcggccctcaaggctctggtgtccggctgtgggcggcttctccgtgggctactagcgggcccggcagcgaccagctggtctcggcttccagctcgcgggttcagggaagtggtggagacccaagaagggaagacaactataattgaaggccgtatcacagcgactcccaaggagagtccaaatcctcctaacccctctggccagtgccccatctgccgttggaacctgaagcacaagtataactatgacgatgttctgctgcttagccagttcatccggcctcatggaggcatgctgccccgaaagatcacaggcctatgccaggaagaacaccgcaagatcgaggagtgtgtgaagatggcccaccgagcaggtctattaccaaatcacaggcctcggcttcctgaaggagttgttccgaagagcaaaccccaactcaaccggtacctgacgcgctgggctcctggctccgtcaagcccatctacaaaaaaggcccccgctggaacagggtgcgcatgcccgtggggtcaccccttctgagggacaatgtctgctactcaagaacaccttggaagctgtatcactgacagagagcagtgcttccagagttcctcctgcacctgtgctggggagtaggaggcccactcacaagcccttggccacaactatactcctgtcccaccccaccacgatggcctggtccctccaacatgcatggacaggggacagtgggactaacttcagtacccttggcctgcacagtagcaatgctgggagctagaggcaggcagggcagttgggtcccttgccagctgctatggggcttaggccatgctcagtgctggggacaggagttttgcccaacgcagtgtcataaactgggttcatgggcttacccattgggtgtgcgctcactgcttgggaagtgcagggggtcctgggcacattgccagctgggtgctgagcattgagtcactgatctcttgtgatggggccaatgagtcaattgaattcatgggccaaacaggtcccatcctcttcatgacagctgtgagctccttactgtgggagagctgcagggagccaaggtgggctgcctgacacacttgccgctctcgtgtgaatccaagaaactgcgttcctcaaaggggcaaaaaaaaaaaaaaaaaa

SEQ ID NO: 838 - DNA, 4917 bp, Homo sapiens
agaagatgtcttcgcggacggtgctggccccgggcaacgatcggaactcggacacgcatggcaccttgggcagtggccgctcctcggacaaaggcccgtcctggtccagccgctcactgggtgcccgttgccggaactccatcgcctcctgtcccgaggagcagccccacgtgggcaactaccgcctgctgaggaccattgggaagggcaactttgccaaagtcaagctggctcggcacatcctcactggtcgggaggttgccatcaagattatcgacaaaacccagctgaatcccagcagcctgcagaagctgttccgagaagtccgcatcatgaagggcctaaaccaccccaacatcgtgaagctctttgaggtgattgagactgagaagacgctgtacctggtgatggagtacgcaagtgctggagaagtgtttgactacctcgtgtcgcatggccgcatgaaggagaaggaagctcgagccaagttccgacagattgtttcggctgtgcactattgtcaccagaaaaatattgtacacagggacctgaaggctgagaacctcttgctggatgccgaggccaacatcaagattgctgactttggcttcagcaacgagttcacgctgggatcgaagctggacacgttctgcgggagccccccatatgccgccccggagctgtttcagggcaagaagtacgacgggccggaggtggacatctggagcctgggagtcatcctgtacaccctcgtcagcggctccctgcccttcgacgggcacaacctcaaggagctgcgggagcgagtactcagagggaagtaccgggtccctttctacatgtcaacagactgtgagagcatcctgcggagatttttggtgctgaacccagctaaacgctgtactctcgagcaaatcatgaaagacaaatggatcaacatcggctatgagggtgaggagttgaagccatacacagagcccgaggaggacttcggggacaccaagagaattgaggtgatggtgggtatgggctacacacgggaagaaatcaaagagtccttgaccagccagaagtacaacgaagtgaccgccacctacctcctgctgggcaggaagactgaggagggtggggaccggggcgccccagggctggccctggcacgggtgcgggcgcccagcgacaccaccaacggaacaagttccagcaaaggcaccagccacagcaaagggcagcggagttcctcttccacctaccaccgccagcgcaggcatagcgatttctgtggcccatcccctgcacccctgcaccccaaacgcagcccgacgagcacgggggaggcggagctgaaggaggagcggctgccaggccggaaggcgagctgcagcaccgcggggagtgggagtcgagggctgcccccctccagccccatggtcagcagcgcccacaaccccaacaaggcagagatcccagagcggcggaaggacagcacgagcacccccaacaacctccctcctagcatgatgacccgcagaaacacctacgtttgcacagaacgcccgggggctgagcgcccgtcactgttgccaaatgggaaagaaaacagctcaggcaccccacgggtgccccctgcctccccctccagtcacagcctggcacccccatcaggggagcggagccgcctggcacgcggttccaccatccgcagcaccttccatggtggccaggtccgggaccggcgggcagggggtgggggtggtgggggtgtgcagaatgggccccctgcctctcccacactggcccatgaggctgcacccctgcccgccgggcggccccgccccaccaccaacctcttcaccaagctgacctccaaactgacccgaagggttaccctcgatccctctaaacggcagaactctaaccgctgtgtttcgggcgcctctctgccccagggatccaagatcaggtcgcagacgaacctgagagaatcgggggacctgaggtcacaagttgccatctaccttgggatcaaacggaaaccgccccccggctgctccgattcccctggagtgtgaagctgaccagctcgcgccctcctgaggccctgatggcagctctgcgccaggccacagcagccgcccgctgccgctgccgccagccacagccgttcctgctggcctgcctgcacgggggtgcgggcgggcccgagcccctgtcccacttcgaagtggaggtctgccagctgccccggccaggcttgcggggagttctcttccgccgtgtggcgggcaccgccctggccttccgcaccctcgtcacccgcatctccaacgacctcgagctctgagccaccacggtcccagggcccttactcttcctctcccttgtcgccttcacttctacaggaggggaaggggccagggaggggattctccctttatcatcacctcagtttccctgaattatatttgggggcaaagattgtcccctctgctgttctctggggccgctcagcacagaagaaggatgagggggctcagcggggggagctggcaccttcctggagcctccagccagtcctgtcctccctcgccctaccaagagggcacctgaggagactttggggacagggcaggggcagggagggaaactgaggaaatcttccattcctcccaacagctcaaaattaggccttgggcaggggcagggagagctgctgagcctaaagactggagaatctgggggactgggagtgggggtcagagaggcagattccttcccctcccgtcccctcacgctcaaacccccacttcctgccccaggctggcgcggggcactttgtacaaatccttgtaaataccccacaccctcccctctgcaaaggtctcttgaggagctgccgctgtcacctacggtttttaagttattacaccccgaccctcctcctgtcagccccctcacctgcagcctgttgcccaataaatttaagagagtccccccctccccaatgctgaccctaggattttccttccctgccctcacctgcaaatgagttaaagaagaggcgtgggaatccaggcagtggtttttcctttcggagcctcggttttctcatctgcagaatgggagcggtgggggtgggaaggtaaggatggtcgtggaagaaggcaggatggaactcggcctcatccccgaggccccagttcctatatcgggccccccattcatccactcacactcccagccaccatgttacactggactctaagccacttcttactccagtagtaaatttattcaataaacaatcattgacccatgcctactccatgccaggcccagtgctggacacagagacatgaagctctgtctgtgggagacagggattctgacacagacaccggacaaaccattgtcttggggagcccagaagagaaagtgggcagggtggggtcattggggaagatgctctagaggaattaatgctggaatggggtgttgaaggatgagtaggagttagttaggcattgagtttgccctgggcaaaagcccagaagtgggagtatgtggtatatcttcagagaactgggtaatttcagtgtggctgctgtgttgggcatggatggagaatcagcaagagaaatgctgtattaggactaataatccatctacgctgcttaagcaaaaaggtatttgttggtttatgttacttaatagtccaggggcacctggcttcaggtaggtttgatccaggcatcaggccattgcatctattttttcagtgtaagttgaattctagtaatttttatcaagtaagggctcctttcctggtggcacagatgacttcagcagttagaagtttctatccctccagctttctgcagcagaaagaccctcattgtcagtttcccagcaaaagtcccagggcagactctcattggcccaaatgggccatgtgattttctctaaaccaatcactgtgactctagagtggccagactcagagctgcacttagtaggggttcctcaaaggaaggtcaagtgtcatgagcaggagaaaaggcatgggagctggacagattatagtggttgaagtctgtgcagtacagaagggcggagcttattcacacagcacctttggggccaaaatgaataagctggactttctccccatggcactggggaaccatggaagttcagggaacttcagggaagaggcttggtcaattcctgagagcatcctctgtgctggggacacagtggtaatcaagacagccccaacactgccctcatagagctcacagtccaatggaggaggcagatgtgtcctcaggcagcgactgggcagggctggtataggggagtccagaggtgatgcctgcctcagccagggagggcttcctggaggagaaggagccagctagacatggataggagtgcgttttaggcacagcaaatggcacatacaagggccagggagcaagagagaggacaggtcctcaacaaatggcatgtgactttgtaagtgtagaattgctgtgaggtatggggctaggggcgtcagtagggccttgaaggttatggacaggggcctgggctttcttccaagggcactgggggagccatggcaaggttgtaggtagggtagagatgggcgggtttgtgctatgtgcagggtggaagggagggaagttgacaggtcagaagatcaggaaagaggtcggggctggacagatggggagagcgcagatagatttaagagagtcctgtgaggcaaagtgggcaggacctggtaacaggtgtctggactgtggctttggctggctcagaaggtccccactggcgtgtgtggtctatgtagcctctgggtgtggagctgggatcttcaactggggacagtacagtaaagaacatcacagc

SEQ ID NO: 839 - DNA, 1581 bp, Homo sapiens
ctcgccgctgccccggctccgccgctcgcagagagattcggaggagcccgggcgggggggaggaggagggggaggagggagcggagatctcggggctcggagccggccgccgctccgctccgatcgctgtggggcttggttttttgggggtgggggggcgggggggctcagatatggaggcaaatgggagccaaggcacctcgggcagcgccaacgactcccagcacgaccccggtaaaatgtttatcggtggactgagctggcagacctcaccagatagccttagagactattttagcaaatttggagaaattagagaatgtatggtcatgagagatcccactacgaaacgctccagaggcttcggtttcgtcacgttcgcagacccagcaagtgtagataaagtattaggtcagccccaccatgagttagattccaagacgattgaccccaaagttgcatttcctcgtcgagcgcaacccaagatggtcacaagaacaaagaaaatatttgtaggcgggttatctgcgaacacagtagtggaagatgtaaagcaatatttcgagcagtttggcaaggtggaagatgcaatgctgatgtttgataaaactaccaacaggcacagagggtttggctttgtcacttttgagaatgaagatgttgtggagaaagtctgtgagattcatttccatgaaatcaataataaaatggtagaatgtaagaaagctcagccgaaagaagtcatgttcccacctgggacaagaggccgggcccggggactgccttacaccatggacgcgttcatgcttggcatggggatgctgggatatcccaacttcgtggcgacctatggccgtggctaccccggatttgctccaagctatggctatcagttcccaggcttcccagcagcggcttatggaccagtggcagcagcggcggtggcggcagcaagaggatcaggctccaacccggcgcggcccggaggcttcccgggggccaacagcccaggacctgtcgccgatctctacggccctgccagccaggactccggagtggggaattacataagtgcggccagcccacagccgggctcgggcttcggccacggcatagctggacctttgattgcaacggcctttacaaatggataccattgagcaggtgctttcgttgccatctcactctgagagcatacctggatgtccaggcaagactgggcgaagtttctgagtggccctttgtttaggtgatgtcctcagacctggacccccaccagcctcactccccatcccaaccagagatggctcacttcggatcgagggttgactacatctcatcatctcacgaatctgctgtaatataagacaacagcttttaaatgtgtatataacccatgatttcggttttgttttgttttgtttttcttgatggtttccctctccctccctctcttcccattctccttttaaatctctttgaatcacatttggtagtgattttgacttagtccagtagtcacatagctttaatatctagttcaaagctaaccatagtataattgttatattaaggagttat

SEQ ID NO: 840 - DNA, 3210 bp, Homo sapiens
cccccgccgctcccgacgccgccgccgcagccgccgcctcccctctgcctcccggtggctcctcgctctccttccatctctctcgccccctctccctccgtcccgtcctcgccgctcccctcaccccgcctctctccccctcccccagcccctcctctcctcaccccacccggcctccctccctccctcgcccgcccggcgctcgcagagccgacaccaggggggctctcgatgtagcaccatgacaggcatcgccgccgcctccttcttctccaatacctgccgattcgggggctgcggactccacttccccaccctggccgacctcatcgagcacatcgaggacaaccacatcgatacagatccacgggttttagaaaaacaagaattacagcagccaacctatgttgccctgagttacataaatagattcatgacagatgctgcccgccgagagcaggagtccctaaagaagaagattcagccgaagctctcgctgactctgtccagctcagtgtctcgagggaatgtgtccactcccccacgccacagcagtggaagccttactccccccgtgaccccacccatcaccccctcctcttcattccgcagcagcactccgacaggcagcgagtatgacgaggaggaggtggactatgaggagtcggacagcgatgagtcctggaccacagagagtgccatcagctccgaagccatcctcagctccatgtgcatgaatggaggggaagagaagccttttgcctgcccagttcctggatgtaaaaagagatacaagaatgtgaatggcataaagtatcacgctaagaatggtcacagaacacagattcgtgtccgcaaaccattcaagtgtcgctgtgggaagagttacaagacagctcagggcctgcggcaccacacaatcaatttccatcccccggtgtcggctgagattatcaggaagatgcagcaataacatgctggtcataactgtgccaagaaatcctcaccagcagttgctgattttgaaaacagccaccttttttcaggggaagcattcagcaaccctttaaagaaaaagaattaaatgcatgctttaaattttttctgtaattttggaatgatgtatctttgtagagttaatgattttgtacatttgcacatgtaatcatcatacccattttcattactttgatataaggtgctaaacaaaaaaagctctaggttcttcagcacatttcccccaaaacaaaataaaattgagggcatgttgcatattgttgaattgtattgcggtggtatcaacctggggggaggaggggctggcactgagatttttttttcaagattgtaatgtgattgaagttttcaacacatcaactcacatatgttcaaaaccaaaataataccttcattatcaaactggttaccatgccttacataatggagttagtatttgtgagtagaaagactttaggtaatggaaatataaataagaaagaatgtttaacataatatgctaaaaatattttcatatttaaataacatacgtaaaggtgtgctttctgtgttttatattatcttgcaaatccttttgccctttaaaaagctgaaaatcttgccatctgacttactagtcattttagtgttataaatggcattttgtacaaaatagtctattcagttcgttcattcatttaacacacattgattgagtgcctgctgggtacaagggattcaatttatgcctattgatatctgcggaccaagatacccatttagtgaaatacttttttccctgaaatctgttagaaaagactttgaaatacttcagtgcaaagtgtgtgtgtgtgaagtttagttatatcttcatcttcagatgaagttttaaagcactttgtagttctctattgccaacaatttaatgtttatgtgttgccaattcttgcaaccactgccctaccaaacctgtgggttgcaaatcagaactaaaattctaagcacgtttcaaagatgaacacttttgttaagacccctattgcctcttcttcatgctcattttttactttttttaaaaggtacttttctcatcacattgtagagaggtctgcattctcattggaaatgtctgtttagctttataaaacaaacactttgctgaaataggaaaatgagccttattgacaattaagtgcttcttgcagcaggtggtcaaagaaaagcatgactaatacgacctattagagtaatctacatctggaccattccttaagtttttcctcaccgacagtaccatcatgccttgagtgttcttttctcccaagtgctattccttaaacacgagagtttaccagttgcctaataatgcaataaaaaatgctttgagatagctaactgcccataaaacaaactcaaattgcttataaagtttcttcccatgttcccatttgatgaaaagtcttacatcacatataactgggaagcaggggtccctcctcaattttcagacattttgaaaggatgacagttctgtttgttagatgagtaaacctctatattcataagttctaaaatccttcattatgagggattcaaagtatttataaaaacactgccctctaaaaatttcctcagatctgaagtatggtcttggtcctgaatatacagtgttatcctatgtttaaaagggtgatccagacatgagacgcaactagttggtgcataagaaggccccacttggctatttcatatctacctacaattgaccaaaaaaaattttttaggccagcaattattatttagcttcgctctttctagtgcaagaaactgcaggctggatcagtagttcaacagctaaacagtcataaaatagtcattgtgcatgttaaatttctttcaatgctttcaaagataaattccaatttctatttacttattcattgtgacagtattactaaacaggtaaggatgggaatattttgttatactgtgtatagtgaatgtattgtactgtgtctgtgaaaactgtgctttaaattatattttcatatgttttgttggggacagagcacattaagtctgaaagcaacagaggtttgttttagaactgaaggcaatttaatcaaaattcctgtcaagaaaagctgcttataaatgtaaatgaaatcacatttaaaataaactgcctctgacccaaaaataaaaaaaaaaaaa

SEQ ID NO: 841 - DNA, 1576 bp, Homo sapiens
ccagccccgccgccctcgcaataaggggcctgagcgcgcgggggagaagcgggagcgggagcgggagcgagctggcggcgccgtcgggcgccgggccgggccatggagctgtggccgtgtctggccgcggcgctgctgttgctgctgctgctggtgcagctgagccgcgcggccgagttctacgccaaggtcgccctgtactgcgcgctgtgcttcacggtgtccgccgtggcctcgctcgtctgcctgctgcgccacggcggccggacggtggagaacatgagcatcatcggctggttcgtgcgaagcttcaagtacttttacgggctccgcttcgaggtgcgggacccgcgcaggctgcaggaggcccgtccctgtgtcatcgtctccaaccaccagagcatcctggacatgatgggcctcatggaggtccttccggagcgctgcgtgcagatcgccaagcgggagctgctcttcctggggcccgtgggcctcatcatgtacctcgggggcgtcttcttcatcaaccggcagcgctctagcactgccatgacagtgatggccgacctgggcgagcgcatggtcagggagaacctcaaagtgtggatctatcccgagggtactcgcaacgacaatggggacctgctgccttttaagaagggcgccttctacctggcagtccaggcacaggtgcccatcgtccccgtggtgtactcttccttctcctccttctacaacaccaagaagaagttcttcacttcaggaacagtcacagtgcaggtgctggaagccatccccaccagcggcctcactgcggcggacgtccctgcgctcgtggacacctgccaccgggccatgaggaccaccttcctccacatctccaagaccccccaggagaacggggccactgcggggtctggcgtgcagccggcccagtagcccagaccacggcagggcatgacctggggagggcaggtggaagccgatggctggaggatgggcagaggggactcctcccggcttccaaataccactctgtccggctcccccagctctcactcagcccgggaagcaggaagccccttctgtcactggcctcagacacaggcccctggtgtcccctgcagggggctcagctggaccctccccgggctcgagggcagggactcgcgcccacggcacctctgggagctgggatgataaagatgaggcttgcggctgtggcccgctggtgggctgagccacaaggcccccgatggcccaggagcagatgggaggaccccgaggccagacgcacactgtccgagccctctgctcagccgcctgggacccaccagggtgcagctgggctccagggtccagcccacaagctgcatcaggctctctgggagaggaggggcctggagggccaggagtcccagactcacgcaccctgggccacagggagccgggaatcggggcctgctgctcctgctggcctggaagactctgtggggtcagcactgtactccgttgctgtttttttataaacacactcttggaagtggcaaaaaaaaaaaaaaaaaaaaaaaaaaaa

SEQ ID NO: 842 - DNA, 2918 bp, Homo sapiens
cgaggttagggcccgcgttgcgacgtggtgcagcgcatattttcacaagtgggtctcccttgtccgggactatggccaccgactcgtgggccctggcggtggacgagcaggaagcggctgtcaagtcgatgaccaatttgcagatcaaggaagagaaagtcaaagcagataccaatggtattatcaaaaccagtaccactgccgagaaaacagatgaagaggagaaagaggacagagctgcccagtccttactcaacaagctgatcagaagcaaccttgttgataacacaaaccaagtggaagtcctgcaacgggatccaaactcccctctgtactcggtgaagtcgtttgaagagcttcggctgaaaccacagcttctccagggagtctatgccatgggcttcaatcgaccctccaagatacaagagaacgcattacccatgatgcttgctgaacccccacagaatctgattgcccagtctcagtctggcactggtaaaacagctgcctttgtcttagccatgctcagccgagtggagccatcagacagatacccccagtgtctgtgcctctccccaacatatgagctggcgcttcaaacaggaaaagtgattgagcagatgggcaaattttacccagaactgaagcttgcctatgccgttcgaggcaataaattggaaagaggccagaagatcagtgagcagattgtcattggcacccctgggaccgtgctggactggtgctccaagctcaagttcattgatcccaagaaaatcaaggtgtttgttctggatgaggctgatgtcatgatagccactcagggccaccaagatcagagcatccgcatccagaggatgctgcccaggaactgccagatgctgcttttctccgccacctttgaagactctgtgtggaagtttgcccagaaagtggtcccagacccaaatgttatcaaactgaagcgtgaggaagagaccctggataccatcaagcagtactatgtcctgtgcagcagcagagacgagaagttccaggccttgtgtaacctctacggggccatcaccattgctcaagccatgatcttctgccatactcgcaaaacagctagttggctggcagcagagctctcaaaagaaggccaccaggtggctctgctgagtggggagatgatggtggagcagagggctgcggtgattgagcgcttccgagagggcaaagagaaggttttggtgaccaccaacgtgtgtgcccgcggcattgatgttgaacaagtgtctgtcgtcatcaactttgatcttcccgtggacaaggacgggaatcctgacaatgagacctacctgcaccggatcgggcgcacgggccgctttggcaagaggggcctggcagtgaacatggtggacagcaagcacagcatgaacatcctgaacagaatccaggagcattttaataagaagatagaaagattggacacagatgatttggacgagattgagaaaatagccaactgagaagctccaccagccactgatgccagccctggcactgcccctgcacaggagacaagtgcatttagggcacaggccccgacatcaccccaaggacaacggcagaagtagagagaaactacctacctcacttcaaattatgtttggacttgacaaaaataggtgcaaatgatggggggcaatagaagaaaaaatttgcattttggaaaattgggtcctttccccacttttttaaagccacattcccccatctttataataatctggtcacagtggtagtcgctggccccaggaccccctcctgattttggctaggcatcgtggaaccagctccagcccctgaagaaacgatagatgtgcaggttgtgcggaagaggctgagtggaaaatggtgtgagccccaccgctgtgcatcgaatgagggaagtggcagcagagaggccagagctgccccctctctgtctcttcaatggacccttcacaagtgtttctcctgcccttggggctgtcttccttctcctgaaatccagagactttcttgctcatcccttctccctttcacttctgttctctgctgcagaaagcagacttgcatatccctgatgagcagctcggctacttttgtaaacttcagatttggagagaaacacgaaagtctgaatcctgaccccttgagagagagtgatctggcgagggccgatgaaggggctgggcctggtcttgccttctcttctctcggttgctccctctgcctaggcccctggtactcagtcacggcagccaggagaccccaggtgagtttctgagcgcatacgtagttggttcttacccccaggtgtcacacggggccgagagctgagcaagaatttggaatggaagttatgaccaagggaattatgctgttcatttataatagtggacattatggagagctctgattcctacataatatgaataaggatggataggccgggcgtggtggctcatgcctataatcccagcacgttgggaggctgaggcgggcggatcggttgagctcaggcgttcgggaccagcctggccaacatgatgaaaccccgtctctaccaaaaatagaaaaaaatatagccgggcctggtggcgcacgcctgtagtcccagctactcgggaggctgaggtaggaggatcgcttgagcctgggtagaggctgctgtgagctgaaatggcgccactgcactccagcctgggtaacagagcgagaccccgactcaataaataaataaggatggataaattgtagcgtatgcaccattcattatgctaagacattttaaagtaattatgagaaacgctctactaatgatttgtttttatttgtatttttctgcttattagacaaatatatactcattttaaaaaaaaaaaaaaaaaaaa

SEQ ID NO: 843 - DNA, 2321 bp, Homo sapiens
gtcctcaaccaagatggcgcggatggcttcaggcgcatcacgacaccggcgcgtcacgcgacccgccctacgggcacctcccgcgcttttcttagcgccgcagacggtggccgagcgggggaccgggaagcatggcccgggggtcggcggttgcctgggcggcgctcgggccgttgttgtggggctgcgcgctggggctgcagggcgggatgctgtacccccaggagagcccgtcgcgggagtgcaaggagctggacggcctctggagcttccgcgccgacttctctgacaaccgacgccggggcttcgaggagcagtggtaccggcggccgctgtgggagtcaggccccaccgtggacatgccagttccctccagcttcaatgacatcagccaggactggcgtctgcggcattttgtcggctgggtgtggtacgaacgggaggtgatcctgccggagcgatggacccaggacctgcgcacaagagtggtgctgaggattggcagtgcccattcctatgccatcgtgtgggtgaatggggtcgacacgctagagcatgaggggggctacctccccttcgaggccgacatcagcaacctggtccaggtggggcccctgccctcccggctccgaatcactatcgccatcaacaacacactcacccccaccaccctgccaccagggaccatccaatacctgactgacacctccaagtatcccaagggttactttgtccagaacacatattttgactttttcaactacgctggactgcagcggtctgtacttctgtacacgacacccaccacctacatcgatgacatcaccgtcaccaccagcgtggagcaagacagtgggctggtgaattaccagatctctgtcaagggcagtaacctgttcaagttggaagtgcgtcttttggatgcagaaaacaaagtcgtggcgaatgggactgggacccagggccaacttaaggtgccaggtgtcagcctctggtggccgtacctgatgcacgaacgccctgcctatctgtattcattggaggtgcagctgactgcacagacgtcactggggcctgtgtctgacttctacacactccctgtggggatccgcactgtggctgtcaccaagagccagttcctcatcaatgggaaacctttctatttccacggtgtcaacaagcatgaggatgcggacatccgagggaagggcttcgactggccgctgctggtgaaggacttcaacctgcttcgctggcttggtgccaacgctttccgtaccagccactacccctatgcagaggaagtgatgcagatgtgtgaccgctatgggattgtggtcatcgatgagtgtcccggcgtgggcctggcgctgccgcagttcttcaacaacgtttctctgcatcaccacatgcaggtgatggaagaagtggtgcgtagggacaagaaccaccccgcggtcgtgatgtggtctgtggccaacgagcctgcgtcccacctagaatctgctggctactacttgaagatggtgatcgctcacaccaaatccttggacccctcccggcctgtgacctttgtgagcaactctaactatgcagcagacaagggggctccgtatgtggatgtgatctgtttgaacagctactactcttggtatcacgactacgggcacctggagttgattcagctgcagctggccacccagtttgagaactggtataagaagtatcagaagcccattattcagagcgagtatggagcagaaacgattgcagggtttcaccaggatccacctctgatgttcactgaagagtaccagaaaagtctgctagagcagtaccatctgggtctggatcaaaaacgcagaaaatacgtggttggagagctcatttggaattttgccgatttcatgactgaacagtcaccgacgagagtgctggggaataaaaaggggatcttcactcggcagagacaaccaaaaagtgcagcgttccttttgcgagagagatactggaagattgccaatgaaaccaggtatccccactcagtagccaagtcacaatgtttggaaaacagcctgtttacttgagcaagactgataccacctgcgtgtcccttcctccccgagtcagggcgacttccacagcagcagaacaagtgcctcctggactgttcacggcagaccagaacgtttctggcctgggttttgtggtcatctattctagcagggaacactaaaggtggaaataaaagattttctattatggaaataaagagttggcatgaaagtggctactgaaaaaaaaaaaaaaaaaaaaaaaaa

SEQ ID NO: 844 - DNA, 2660 bp, Homo sapiens
gttccgtccggacggcgtttccacggacgcccaggagacagccggttgctgagccgggagcgctgactggcccggctgggcaggtcttgactcgtctgctgaacaaatcctctgacctcaggccggctgtgaacgtagttcctgagagatagcaaacatgcccaacagtgagcccgcatctctgctggagctgttcaacagcatcgccacacaaggggagctcgtaaggtccctcaaagcgggaaatgcgtcaaaggatgaaattgattctgcagtaaagatgttggtgtcattaaaaatgagctacaaagctgccgcgggggaggattacaaggctgactgtcctccagggaacccagcacctaccagtaatcatggcccagatgccacagaagctgaagaggattttgtggacccatggacagtacagacaagcagtgcaaaaggcatagactacgataagctcattgttcggtttggaagtagtaaaattgacaaagagctaataaaccgaatagagagagccaccggccaaagaccacaccacttcctgcgcagaggcatcttcttctcacacagagatatgaatcaggttcttgatgcctatgaaaataagaagccattttatctgtacacgggccggggcccctcttctgaagcaatgcatgtaggtcacctcattccatttattttcacaaagtggctccaggatgtatttaacgtgcccttggtcatccagatgacggatgacgagaagtatctgtggaaggacctgaccctggaccaggcctatagctatgctgtggagaatgccaaggacatcatcgcctgtggctttgacatcaacaagactttcatattctctgacctggactacatggggatgagctcaggtttctacaaaaatgtggtgaagattcaaaagcatgttaccttcaaccaagtgaaaggcattttcggcttcactgacagcgactgcattgggaagatcagttttcctgccatccaggctgctccctccttcagcaactcattcccacagatcttccgagacaggacggatatccagtgccttatcccatgtgccattgaccaggatccttactttagaatgacaagggacgtcgcccccaggatcggctatcctaaaccagccctgctgcactccaccttcttcccagccctgcagggcgcccagaccaaaatgagtgccagcgaccccaactcctccatcttcctcaccgacacggccaagcagatcaaaaccaaggtcaataagcatgcgttttctggagggagagacaccatcgaggagcacaggcagtttgggggcaactgtgatgtggacgtgtctttcatgtacctgaccttcttcctcgaggacgacgacaagctcgagcagatcaggaaggattacaccagcggagccatgctcaccggtgagctcaagaaggcactcatagaggttctgcagcccttgatcgcagagcaccaggcccggcgcaaggaggtcacggatgagatagtgaaagagttcatgactccccggaagctgtccttcgactttcagtagcactcgttttacatatgcttataaaagaagtgatgtatcagtaatgtatcaataatcccagcccagtcaaagcaccgccacctgtaggcttctgtctcatggtaattactgggcctggcctctgtaagcctgtgtatgttatcaatactgtttcttcctgtgagttccattatttctatctcttatgggcaaagcattgtgggtaattggtgctggctaacattgcatggtcggatagagaagtccagctgtgagtctctccccaaagcagccccacagtggagcctttggctggaagtccatgggccaccctgttcttgtccatggaggactccgagggttccaagtatactcttaagacccactctgtttaaaaatatatattctatgtatgcgtatatggaattgaaatgtcattattgtaacctagaaagtgctttgaaatattgatgtggggaggtttattgagcacaagatgtatttcagcccatgccccctcccaaaaagaaattgataagtaaaagcttcgttatacatttgactaagaaatcacccagctttaaagctgcttttaacaatgaagattgaacagagttcagcaattttgattaaattaagacttgggggtgaaactttccagtttactgaactccagaccatgcatgtagtccactccagaaatcatgctcgcttcccttggcacaccagtgttctcctgccaaatgaccctagaccctctgtcctgcagagtcagggtggcttttcccctgactgtgtccgatgccaaggagtcctggcctccgcagatgcttcattttgacccttggctgcagtggaagtcagcacagagcagtgccctggctgtgtccctggacgggtggacttagctagggagaaagtcgaggcagcagccctcgaggccctcacagatgtctaggcaggcctcatttcatcacgcagcatgtgcaggcctggaagagcaaagccaaatctcagggaagtccttggttgatgtatctgggtctcctctggagcactctgccctcctgtcacccagtagagtaaataaacttccttggctcctgct

SEQ ID NO: 845 - DNA, 3218 bp, Homo sapiens
cttttagtttctcttctttctaaagaaggctcgcggagcccggctggagaacctcaccctcgccgagcctagaaccgagagggggccaccccaggcggtcaccagcagatttgcccgcgcgttctctttctttccacccagttgcccttgcggccggctgtaaacctgccactaggacccggtcggtgagatctagcctcttgacctgagagccgagagtggatcgctgggctgggctaacggcgacggagagcgcgccctcgctgactccgggcgcgcccagcagtagcaccgcccgcgcccgcccctggacacttgtaagtttcgatttccgatttccgcggaaccgagtcccgcgccgcggcagagccagcacagccagcgcgccatggcggacccggaggtgtgctgcttcatcaccaaaatcctgtgcgcccacgggggccgcatggccctggacgcgctgctccaggagatcgcgctgtctgagccgcagctctgtgaggtgctgcaggtggccgggcccgaccgctttgtggtgttggagaccggcggcgaggccgggatcacccgatcggtggtggccaccactcgagcccgggtctgccgtcgcaagtactgccagagaccctgcgataacctgcatctctgcaaactcaacttgctgggccggtgcaactattcgcagtccgagcggaatttatgcaaatattctcatgaggttctctcagaagagaacttcaaagtcctgaaaaatcacgaactctctggactgaacaaagaggaattagcagtgctcctcctccaaagtgatcctttttttatgcccgagatatgcaaaagttataagggagagggtcggcagcagatttgtaaccagcagccaccgtgttcaagactccacatctgtgaccacttcacccgagggaactgtcgttttcccaactgcctccggtcccataacctgatggacagaaaggtgctggccatcatgagggagcacgggctgaaccccgacgtggtccagaacatccaggacatctgcaacagcaagcacatgcagaagaatcccccagggcccagagctccttcttcacatcgtagaaacatggcatatagggctagaagcaagagtagagatcggttctttcagggcagccaagaatttcttgcgtctgcttcagcgtctgctgagaggtcctgcacacctagtccagatcagatcagccacagggcttccctggaggacgcgcctgtggacgatctcacccgcaagttcacgtatctggggagtcaggatcgcgctcggcctccctcaggctcgtccaaggctactgatcttggaggaacaagtcaggccgggacaagccagaggtttttagagaacggcagtcaagaggacctcttgcatggaaatccaggcagcacttaccttgcttccaattcaacatcagcccccaactggaagagcctcacatcctggacgaatgaccaaggcgccaggagaaagactgtgttttctcccacgctacctgccgcccgctcttctcttggctctctgcaaacacctgaagctgtgaccaccagaaagggcacaggcttgctttcctcagactacaggatcatcaatggcaaaagtggaactcaggacatccagcctggccctctttttaataataatgctgatggagtggccacagatataacttctaccagatccttaaattacaaaagcactagcagcggtcacagagaaatatcatcacctaggattcaggatgctggacctgcttcccgagatgtccaggccactggcagaatcgcagatgatgctgacccaagagtagcacttgttaacgattctttatctgatgtcacaagtaccacatcttctagggtggatgatcatgactcagaggaaatttgtcttgaccatctgtgtaagggttgtccgcttaatggtagctgcagcaaagtccacttccatctgccttaccggtggcagatgcttattggtaaaacctggacggactttgagcacatggagacgatcgagaaaggctactgtaaccccggaatccacctctgttctgtaggaagttatacaatcaattttcgggtaatgagttgtgattcctttcccatccgacgcctctccactccttcttctgtcaccaagccagccaattctgtcttcaccaccaaatggatttggtattggaagaatgaatctggcacatggattcagtatggagaagagaaagacaaacggaaaaattcaaacgtcgactcttcatacctggagtctctctatcaatcctgtccgaggggagttgtgccatttcaggcgggctcacggaactatgagctgagtttccaagggatgattcagacaaacatagcttccaaaactcaaaaggatgtcatcagaagaccaacatttgtgcctcagtggtatgtgcagcagatgaagagagggccagagtaagtgttctgaagcagctgtttgctgacagatgcttgagatgttcatgccctgggctcatcaagtcactcgtgaatctggagcctgttttcctgaaaagttcctgtttgcattactctgcagtttccatttgcattatcgatgagtaagatgcttgttaagcagcatggtgtgactgaaaggatactagatcggaaaatgaattttctttctgaaagggaagtctgagcgagtctcctaaatactctgggctttagcttctccagctgtgaagagctggattgatgcagtacacctaaggaataatcatatatactgggtttttgttttgctgtggattcttttttttttttttttttttagagggggtctcactttgttgcccaggctggtcttgaactcctgagctcaagtgatcctcctacctcagtctcccaaagtgctgggattacaggcatgagccaccgtgcctggctttgctgtggattcttttgggtgtcttttgttttcctacacgatttatagaggatgaggggcggagaaagagatagaaaaaagggatgagctagctgttagagcaagggttttggtgagagataatattgattgaagggattttaaaggaaatgttgctgtgggggattcattgtaactctccttgtgaactgctcagtaaactctacattgttcatgaacaaaaaaaaaaaaaaaaaaaaaaaaaaaaaaaaaaaaa

SEQ ID NO: 846 - DNA, 7212 bp, Homo sapiens
gcggtgcctctgagagccgccgccacctcgtccctcagttcccggcagacagccgcccgggccgggctccctcaccgccaccagggccggagggacgagtgagaggggcggccgggacgcgacccccgggccgggagaagcggaggcccgacgggcgcggccctcgaggtacggcttcttgggggcggcgaggacctcgacgcccttcgccgacaccgcggctggtcccgctcgcccgccccttcctgatcctgccgctgccctccacgcctccaatcccccacctccaccccctctcctttctctcttctcttccttcctctcctcctcctcccctccagccgctgggagccgcgggtcggacgagccgccgcctccttctctgcgtccatgtatgaggggaagaagacgaagaacatgttcctgacccgggctctggagaagatattggccgacaaggaagtgaagaaggcgcatcactcccagctgcgcaaagcttgcgaggtggcgttagaggaaataaaagcggaaactgaaaaacagagtcctcctcatggagaagcaaaagctggatcaagcacccttccaccagtgaaatcaaagacaaattttattgaagcagacaagtacttcttgccttttgagttggcatgccagtccaaatgtcctcgcatagttagtacatctctagattgcttacagaaacttattgcttatgggcacttgactggcaatgctccagatagtacaacaccaggcaaaaaattaattgatagaattattgaaacaatatgtggctgctttcagggccctcagacagatgaaggagttcagctgcagataataaaggctttacttactgcagtaacatcacaacacatagaaattcatgaagggactgtactgcaagctgtgagaacatgttacaatatctacttagcaagcaaaaatctcatcaatcagacaacagccaaagctactctcactcagatgctaaatgttatctttgcacgcatggaaaaccaagcattacaggaagcaaaacaaatggaaaaagaaaggcatcggcagcatcatcatctgttacagtctccagtaagccatcacgagcctgaatcacctcaacttagatatttgccacctcagactgttgatcatatatcccaagaacacgaaggggaccttgacctccatacaaatgatgtagataaaagtcttcaggatgacacagagcctgaaaatggatctgatatttccagtgcagaaaatgaacagactgaagctgatcaggcaactgcagctgaaacattatctaaaaatgaagtgttatatgacggagaaaaccatgattgtgaggaaaagccacaagacattgtacagaacattgtagaagaaatggtgaacattgttgttggagatatgggagaagggactactataaatgcaagtgcagatggcaacattggaactatagaggatggtagtgacagtgaaaatattcaagcaaatggaattccaggaacaccaatttctgttgcatatacaccatccttacctgatgatagattgtcagtctcttccaatgatactcaggaatctggaaattcttcaggaccttcacctggtgctaagttttcccacattttacaaaaggatgcctttctagtattcaggtcattgtgtaaactgtcaatgaaaccactgtcagatggaccaccagatccaaagtctcatgaactacgatccaagattctttcattgcagttacttctatccattctgcagaatgcaggacctattttcaggacaaatgagatgtttattaatgctattaagcagtatctttgtgttgcactctcaaaaaatggagtctcatctgttccagaggtttttgagctttctctttctatatttcttactttgttgtcaaatttcaagacacatctgaagatgcaaattgaggtgttctttaaagaaattttcttatacattttggaaacttctaccagctcatttgatcacaaatggatggttattcagacactgacgaggatttgtgcagatgctcagagtgtagtggatatttatgtaaactatgactgtgacttaaatgcagccaatatatttgaaagactagtaaatgatctatcaaaaattgctcaaggaaggggcagtcaagaacttggtatgagtaatgttcaggaattgagcctgaggaaaaaaggtttagaatgcttagtgtcgattttgaagtgtatggttgaatggagtaaggatcagtatgtgaatcccaactcccagacaactcttggtcaggaaaaaccctcagagcaagagatgagtgaaatcaaacaccctgagacaataaacagatacggaagtttaaattccctggagtcaacatcatcatcaggaataggcagctacagtacacagatgtctggcactgataatccagaacaatttgaggtcctaaagcaacaaaaagaaataatagaacaagggatagatttatttaataagaaaccaaagagaggaatacagtacctccaagaacaagggatgcttggcaccacacctgaagatattgcccaattcttacatcaagaggaaagattagactctactcaagtgggtgagttcctgggagataatgataaatttaacaaagaagtcatgtatgcatatgtggaccaacatgacttttcaggaaaagacttcgtttcagcccttcgtatgtttctagaaggatttcgtcttccaggggaagctcagaaaatcgatcgattaatggaaaaatttgctgcaagatacctagaatgcaaccaaggacaaactctctttgctagtgcggatacagcttatgttttggcttattcaattatcatgttgaccacagaccttcacagtccacaggtgaaaaataaaatgacaaaggaacaatacattaagatgaatagaggtatcaatgacagtaaagaccttcctgaagagtatctatcagccatctataatgaaatagctgggaaaaagatatcaatgaaagaaacaaaagaactaacaatccctacaaaatcaagtaaacagaatgtagccagtgaaaaacaaagaagacttctgtataacttagaaatggagcagatggccaagacagctaaagcactcatggaggccgtgagccatgttcaggcaccctttacaagtgcaacacatttggagcatgtgaggcccatgtttaagttggcttggacgccttttctggctgcattcagtgtgggtctacaagattgtgatgatactgaagtagcctctctttgcctggaaggtataagatgtgcaatcagaattgcatgcattttcagcattcagctggagagagatgcatatgtccaggcactagcaagatttaccttactcacagtgagttccggtattactgaaatgaaacagaagaacattgacacaataaaaacacttatcacagtggctcatacagatggaaattatttaggaaattcatggcatgagattctgaagtgcatcagtcagttggagctggcacagcttataggaactggagtgaaacctcgatacatttctggaacagtgcgaggcagagaaggatctcttactggaacaaaagatcaggctcctgatgaatttgtgggtttagggctagttggaggaaatgtggactggaaacagatagcaagtattcaggaatccattggagaaaccagttctcagagtgttgttgttgctgtagatagaatattcacaggatctacaaggctagatggaaatgccattgtggattttgtccgttggctctgtgctgtgtctatggatgaattactttccacgacacacccaagaatgtttagtctacaaaaaatagtagaaatatcatattacaacatgggaagaataagattacagtggtctcgaatttgggaagttattggagatcattttaataaggttgggtgtaatcctaatgaagatgtagctatttttgcagtagactccttgaggcagttgtcaatgaagttcttagagaaaggggagcttgctaacttcagattccagaaggatttcttaagaccttttgaacatataatgaaacggaacaggtctccaacaattcgagatatggttgtacggtgtatagcacagatggttaattctcaagctgctaacattcgatctggatggaagaacattttctctgtatttcatctagctgcatctgatcaagatgaaagcatagtggaacttgcattccaaacaaccgggcacattgtcacccttgtatttgaaaaacactttccagcgaccattgattctttccaggatgcagtgaagtgtttgtctgaatttgcgtgcaatgcagctttcccagacacaagtatggaagcaattcgacttattcgccattgtgcaaaatatgtgtctgatagacctcaggctttcaaggaatacacaagcgatgatatgaacgtagcacctgaagacagggtgtgggtgagaggatggttcccaattctctttgagttatcctgtatcatcaatagatgcaaattagatgtaagaaccaggggtttaacagtaatgtttgaaataatgaaaacatatggccacacttatgagaaacactggtggcaggatttatttagaattgttttcagaatctttgacaatatgaaattgccagaacaacagacagagaaagctgaatggatgacaacaacttgcaatcatgcactttatgcaatctgtgatgtattcactcagtatttagaagtactcagtgatgtacttttggatgacatttttgctcagctctactggtgtgtgcagcaagacaatgagcagttagcgcgatctggtacaaactgtttagagaatgttgttattctgaatggtgaaaaatttaccctagaaatctgggataaaacttgcaactgcacactggatatcttcaaaaccacaatcccacatgcgctgttgacctggcgacccaattctggagaaactgcccccccacctccatctcctgtaagtgaaaagccattggatacaatatcacagaagtctgtagatattcatgattctattcaaccaaggtctgtggataacagaccacaagcaccactggtttctgcgtctgctgttaatgaagaagtcagcaaaattaaatctacagcaaaatttccagaacaaaaattgtttgctgccctgttgattaaatgtgttgtgcagctggaactcatccagactatcgacaacattgtcttcttcccagccacaagtaagaaagaagatgcagaaaacttagctgcagcacagagagatgcggtggactttgatgttcgcgttgatactcaagaccaaggaatgtaccgctttttaacatcacaacaactttttaagctactggactgcttattagagtcacatagatttgcaaaagcgtttaattccaacaacgaacagaggactgccctgtggaaagcaggattcaaaggcaaatccaagcccaaccttctgaagcaggagaccagcagcctggcctgtgggctgcgcattctcttccggatgtacatggatgagagccgcgttagtgcctgggaggaggtccagcagaggcttttgaatgtctgcagtgaagcactaagttacttcctcactctaacatcagaaagtcatcgagaagcctggactaacttactgcttttgtttctaactaaagttctaaagataagtgataataggtttaaagctcatgcatcattctactaccctctcttatgtgaaattatgcaatttgacttgattcctgaacttcgtgctgttcttagaagattttttctgcgaatcggagtagtttttcagatatcacaaccacctgaacaggaacttggaataaacaagcaatgatgggaacttaatatttttgttggcatttacatccctctgctctttaaaaggacgctggagctgaggtttcctacctgaaaaatgatttctctggattgcagtgtctgagttactggtaaagatgcttagaagtcttactcaaacttgcaacactccagtcccttttagtgctggtggattttgtgtgttatattggcctcatgttgagcagaaagcctgtttaaacagtgtcagctcatgctcacgggtccttccctgtcttccacggcaggaaaagccccacgtttttggcaggtgtggaagtgaaacttacccaaagaactatagatgtaaagattgaacttctacaagaagtacaactcaggagagctgtattttgaaggataaaatgtttataattggggagtggggagagaagaagaaattattgttcatggtaaaagatatttagcaactatggtattcttattctgaagatttttgcacactcaggctatctgagatactggtaatcatcctgtgaaaaatgtacagagatgcaggtctgtaatataaaaatcttaaaacattatatagttcttcctgcactgttttctttattttcttattcatttgctaaatacccataatattttgtcaaatgcactaaacatttgggtggaactttcttttttattttatagggatttttagttttgccctttttggtaggtggtgattttgaggctgtaacatgcccagaagctgttgtggccgacacttcaacaatagggaaaaaaaggtagaaaatatccctactgacagtaactacctgtcacatatttctcttaggacttttaaagatgagccattaaaatagaatgatcctttatggaccaaaacttgaatcactgcaaaatgaatccagattgctgtcattttcttttcttttgggtggtggggcttgatgtagattttactctatgtacagaatttaacgttgaatatattaaaataacaaatctggcatggtttgcggaggttagatttactggaaatgtattcatactgtgaattgtgctctgatggttaaaagacaagattgtcaagcattccgtattaacagtggatgtagaaaattttttcagatggacaaaatgtatatggtacagatgtaaagttttctatgtaaaaaattctgtacaactttctgtacaatattgattcccatctggcatattctaatcaggttataggtcaataaagtttttgaattatttcatcagtgcaatc

SEQ ID NO: 847 - DNA, 5809 bp, Homo sapiens
gtgaccacggaccaggcagtctctaatgaataggcaaggccacaacctccattctcccagaaaagaagaaatgctcatctgaaattcatcacctctctggagtcttcaaactgaccaagcattgaaaagaacacagtttcagaaaacagtttccagtgcctctggccttcctactgaaagcagacacagagtgcatgaagaccgttcaaatatgtcagggacctcctcccatgagtccttctatgactccctctcagacatgcaggaagaaagcaagaatactgacttcttcccgggcctttctgctttcctcagccaggaagagataaacaagagtcttgacctggcccggagagccatagccgactccgaaacagaagattttgactcggaaaaggagatctcgcagattttcagtacttctcctgcaagcctctgtgaacatccttcccataaggagaccaaattgggtgaacacgcctcgaggagacctcaggataacaggtcaacacctgtccagcctctggcagagaaacaaactaagagtatctcttcacctgtttcaaagaggaaacctgccatgtcacccctgctcaccaggcccagctacatccggagcctccgaaaggctgaaaagcgtggtgcaaaaactcccagcacaaacgtaaagcccaaaacgccacatcaaagaaagggtggcccccagagccagctgtgtgacaaggcagctaatttaattgaggagctaacatccatatttaaagccgcaaagccaagaaacagaagcccaaatggggagtcctcgtcaccagacagtgggtacctgtctcctaaaaatcagccgtcagccctgctgagtgcctcagccagccagagccctatggaagaccaaggggagatggaaagagaggtcaagtcccctggggccaggcattgctaccaggacaaccaggacttggcagtgccacacaaccgcaagtctcacccacagccccacagcgccctccacttcccagctgcacctcgattcatccaaaagctgaggagccaagaagtagcagaagggagccgagtttatctggagtgtagagtcactggaaaccccactcctcgagtcagatggttctgtgaagggaaagaactgcacaacactcctgatattcaaatccactgtgagggaggggacctccataccctgatcatagcagaggcctttgaggacgacacaggtcgctacacctgtttggctacgaatcccagcggctcagacacaacatctgctgaggtgttcattgaaggtgccagttcaacagattctgacagtgaaagtttagctttcaaatcaagagctggagctatgccacaagctcaaaagaaaacaacttctgtttccttgacaataggatcatcatctccaaagacaggggtgaccacagctgtgattcaaccactgtctgtccctgtgcaacaggttcacagtccaacttcatatctctgccgacctgatggaaccactactgcctactttcctcctgtttttacaaaggaactgcaaaacacagccgtggcggaaggccaggtggtggttctggagtgccgggtccgtggggcaccccctctgcaggtccagtggtttcggcaagggagtgaaatccaagactctccagatttccgaattctacagaaaaaacctagatctacagctgaacctgaggagatttgcaccctagttatcgctgagactttccctgaagatgcagggatctttacatgttcagcaagaaatgattatggatcagcaaccagcactgcccagctggttgtcacctcagccaacactgaaaactgtagttacgagtcaatgggagaatccaacaatgaccacttccaacactttccacctccccctccaatcttggagacaagttccttggagttggcttcaaagaaaccatctgagatccagcaggtgaacaaccctgagttaggcctgagcagggcagcccttcaaatgcaattcaatgctgctgagagggaaacgaacggagtccatcccagccgtggagtaaatggactgattaacggcaaagctaacagtaataaatctcttccaacaccagctgtcctgctttcacccactaaggagccaccacctctgcttgccaaaccaaaactaggatttccaaagaaggccagtagaactgctagaatagcctccgatgaggaaattcaaggcacaaaggatgctgttattcaagacctggaacgaaaacttcgcttcaaggaggacctcctgaacaatggccagccgaggttaacatacgaagaaagaatggctcgtcgactgctaggtgctgacagtgcaactgtctttaatattcaggagccagaagaggaaacagctaatcaggaatacaaagtctccagctgtgaacagagactcatcagtgaaatagagtacaggctagaaaggtctcctgtggatgaatcaggtgatgaagttcagtatggagatgtgcctgtggaaaatggaatggcaccattctttgagatgaagctgaaacattacaagatctttgagggaatgccagtaactttcacatgtagagtggctggaaatccaaagccaaagatctattggtttaaagatgggaagcagatctctccaaagagtgatcactacaccattcaaagagatctcgatgggacctgctccctccataccacagcctccaccctagatgatgatgggaattatacaattatggctgcaaaccctcagggccgcatcagttgtactggacggctaatggtacaggctgtcaaccaaagaggtcgaagtccccggtctccctcaggccatcctcatgtcagaaggcctcgttctagatcaagggacagtggagacgaaaatgaaccaattcaggagcgattcttcagacctcacttcttgcaggctcctggagatctgactgttcaagaaggaaaactctgcagaatggactgcaaagtcagtgggttaccaaccccagatctaagctggcaactagatggaaagcccgtacgccctgacagtgctcacaagatgctggtgcgtgagaacggggtgcactctctgatcatagagccagtcacgtcacgtgatgccggcatctacacatgtatagctaccaaccgagcaggacagaactcattcagcctggagcttgtggttgctgctaaagaagcacacaaaccccctgtgtttattgagaagctccaaaacacaggagttgctgatgggtacccagtgcggctggaatgtcgtgtattgggagtgccaccacctcagatattttggaagaaagaaaatgaatcactcactcacagcactgaccgagtgagcatgcaccaggacaaccacggctacatctgcctgctcattcagggagccacaaaagaagatgctgggtggtatactgtgtcagccaagaatgaagcagggattgtgtcctgtactgccaggctggacgtttacatttctcgacattaatagtgaaccacaccaggagaacaaatacccaacccagtggcatcagcagtcacagagcaccaagccaaaaaaagtacggccctcagccagtcgctatgcagcactttcggaccagggactagacatcaaagcagcgttccaacctgaggccaacccatctcacctgacactgaatactgccttggtagaaagtgaggacctgtaatccagcattcttgttaaagctgaaacactgaaacagccattgccttgaccaacatattcctttgtcacattatgtaaaaggcagaaacatacctttgactataagaaattaaaaaaaaaacaccaaaataatatttttcttacttgatataccaaacttagtttaagtagataatgctaatacaaatatacacattgcacagaaaatacacatttactgtccaatttaaaactttggaattgctgtgattaaagtgatcaaaatgccaaaatactaaaggaaatcaattgttcacaggtaactacaatttgtattatctacaagtgcctttaaacacaagatataggtgctgtgtagcctgatagtgtgaaatgtttaatgagggagttgtaccacaaacagtactacaatgattctgaagcacagtgtattcagacagatacagtgaaccaagtgcaatatgtaaggatgaaagaagaagagatgacaaagaaatccaagtaaatgccttgtctttgcaaatgtttttatattaaatcataaggaaggaactacttgccttaaatgttaatatcaaaagagttttctaacaaggttaataccttagttcttaacattttttttctttatgtgtagtgttttcatgctaccttggtaggaaacttatttacaaaccatattaaaaggctaatttaaatataaataatataaagtgctctgaataaagcagaaatatattacagttcattccacagaaagcatccaaaccacccaaatgaccaaggcatatatagtatttggaggaatcaggggtttggaaggagtagggaggagaatgaaggaaaatgcaaccagcatgattatagtgtgttcatttagataaaagtagaaggcacaggagaggtagcaaaggccaggcttttctttggttttcttcaaacataggtgaaaaaaacactgccattcacaagtcaaggaacccagggccagctggaagtgtggagcacacatgctgtggagcacacatgctgtggagattgcagtgtgtctgaggtttgtgtagtagtggaagattttaggtatgtagagcaagttgaaaatggattgagactgcatggtggcataaatgagaaattgcctgtagcatctagtctacttgaaggaagtggagacataaggagagacaaaaacaggtttgtgccataaagtattttttcaaagacaccaagatgtggtaaatgaaaattattagttcacttccctgctgccatgaaactttgccttaagaaggtgctggattccaaggtttgtaaaggcatctcggtaaagactgctttttgaatgcatatgattttgcatcagctagactgagttgattctgaccagacttgatggttttaagtcggaaccgataaattttaaaaaggagaaaaaataatttgacctagtagtataaaacatgaggctttaatggtactttgctatgaaaagaaaacactgtattccttatgcaaaacacatgtatctttcattatttataagtggcctctcttagctcagttactcaattcatacgtagtattttttaaaataattttatatctgtgtaccaccccatatatttcatattactgtttcacatgtacagctttctacttctttgtaagaacaccaaccaaccaaggtttaagtgattaataggcttgagcaccgggtggcagatgttctatgcagtgtggttcaagtttctttgaccgcacttatatgcattgctaatatggaatttaagataccatacacagtctctcatggacctatctctattgtagaattatgacttatgtcttacttgccaaatttttctgaatgtgacctttttttgctgatttgctgggtttgggattaactagcattattttgccacctttatattgtatttataaaaaaaaaagtactatcaatcaatcatactactttggattgttgtgctggtgtaatgtggatttaacatcaataaatatttgacaaataatagttgcagttttgtgaagcaaaataaatattcagtttta

SEQ ID NO: 848 - DNA, 3198 bp, Homo sapiens
gctggacacgcagcggctcgcatcgcagagcgcagcgccggcgcggggccgcgagaacgcagcgcaggggagcagcccgaggcggacaccgcgagccgcccggcactcccgcagtccagccggctcctctagcccggccacggctccgctgcgggccacccaggattactcgcgtctggctccaggcgccgagaaggcgcgctgggcgcccgtggccgccgcgccagctcctcctcctcccgctgctcctgctcccggggcgagcgcgcagccccgagcccgccccgcgcctcccggagccctcccccccgctgctcccatgcgcgcgggtgggtcatgagcacagcgccctcgctttctgccctaagaagcagtaagcacagcggcggcggcggcggcggaggcggaggcggcggtgcagaccctgcctggaccagcgcgctctctggaaatagctccggccccggcccaggctcgtccccggccggcagcaccaagccttttgtgcacgccgtgcccccctctgaccccctgcgccaggccaaccgcctgccaatcaaggtgctgaagatgctgacggcacgaactggccacattttgcaccccgagtacctgcagcccctgccttccacgccggtcagccccatcgagctcgatgccaagaagagcccgctggcgctgttggcgcaaacatgttcgcagatcgggaagcccgacccctcgccctcctccaaactctcctcggttgcctccaacgggggcggcgcgggcggtgccggcggcggtgctgcgggcgacaaggacaccaaatcgggccccctgaagctgagcgacatcggcgtggaggacaagtcgagtttcaagccgtactccaaacccggctcggataagaaggagccgggaggcggcggtggaggcggtggcggtggcgggggcggcggcgggggtgtttcgtcggagaagtcgggattccgggtaccgagcgccacctgccagccattcacgcccaggacaggcagcccgagctccagcgcctcggcctgctcgccgggaggtatgctgtcctcggccgggggtgccccggagggcaaggacgacaagaaagacaccgacgtgggcggcggtggcaagggcaccgggggcgcctcggccgaagggggacccacggggctggcacacggccggattagctgcggcggcgggattaatgtggatgtgaaccagcatccggatgggggcccgggaggcaaggctctgggctcggactgcggcggttcatcgggctccagctccggctccggccccagcgcgcccacctcctcctcagtgttgggctctgggctggtggctcccgtgtcaccctacaagccgggccagacagtgttccctctgcctcccgcgggtatgacctacccaggcagcctggccggggcctacgccggctacccgccccagttcctgccacacggcgtggcacttgaccccaccaagccgggcagcctggtgggggcgcagctggcggcggccgcggccgggtctctgggctgcagtaagccggccggctccagccctttggccggagcgtctccgccgtccgtgatgacagccagtttgtgccgggacccttactgcctcagctaccactgcgctagccacctggcaggggcggcggccgccagcgcttcttgcgcacatgatccggctgctgcggctgcggcgctgaagtccggatacccgctggtgtaccccacgcacccgctgcacggtgtgcactcctcgctaacggccgccgcggctgctggcgccacaccgccctccctggccggccaccccctctacccctacggctttatgctccctaacgacccactcccccacatctgcaactgggtgtcggccaacgggccgtgcgacaagcgcttcgccacgtccgaagagctgctgagccacttgcggacccatacggcatttcccgggacagacaaactgctgtcgggctaccccagctcgtcgtctctggccagcgctgccgcggccgccatggcttgccacatgcacatccccacctcgggcgcaccgggcagccctgggacgctggcgctgcgcagcccccaccacgcgctgggactcagcagccgctaccacccctactccaagagcccgcttcccacgcctggcgcccccgtgccggtgcccgccgccaccggaccgtactactccccctacgccctctacggacagagactgaccaccgcctcggcgctggggtatcagtgagggcggccgggagggcgagcgagggagaggagggagagggggaggggaggagtccagggagaggcgggatcacggcccaggctgctgacacccgcgcgtggggaggactcgggccacgaaaggaaagaaatgtataccgtatctatctacccgacagcagcgaccgagacccggtgggacactccccttctccccactttcacctccccacccaaactttataaaagttgaaaaaatatcatttgactttttatagaaaaaaaaaggaaaaaataattgagaaagtgttcatctgaggactgcatcggtggacactggtatttatttatgttagctccaagcggaccggtggttcaaaagtgcattatttagtttgagctctgtaggtaaaaaggaggtgggaaaaattttaaaacttgagggtaaaaatgtggaaaacaaaccctcccatcccttgtagattataaataaaagcaaaaccgccacagaactagaggtcttctctttaatgttactttaaaattgctatgattgtattgtacgttatttaatgtctgattgaaacacaaatttacatgcatgtttgttacaaaaaaaatgaaaaaaaaagtcacaatttgtcagctctgatttcaaattgcaattatttttaaggtgtataccatcgaagagaatgggtatttttttgtatgtattctggaagaaaacaacaaaaaaaaaaagaaaaagaaaaaattctattccaaaacctcatttgccttattttgttctttaaaaggaacacttaactatttttaatttttaagtccacccgctgagaaggggacaaggtttacgtcatgtactaaaataatagacaatgtatcgctttaaagattaaaattccgtatatttgatgtattaaaaaaaaaaaaaaaaaaa

SEQ ID NO: 849 - DNA, 5204 bp, Homo sapiens
ctacctctgggctttctattccgttccagagacccagtaccagaatatttaaatcactgtggcgttgaatacattttaatatctgatagggccagtttctgcgcattgcacatttttttttcccctttcaggaacgtgttcaggcccgcggcagggggcgggatcgcgcctcctcctcggctctggttccagccgagcctctcggacgcagagatggaaatcccgaagctgctcccggctcgcgggacactacagggcggcggcggcggcggtatccccgcgggtggcggccgagtccaccgaggccctgactcgccggctggccaggtccccacgcgccgcctcctgctgccccggggcccccaagatggcgggcccgggcggcggcgcgaggaggccagcacggcatcacggggccctggcccaagcctgttcgcgccgaggccccatcaacctagcggcggcggcgacgacttcttcctggtgctgcttgacccggtgggtggcgacgtggagaccgcgggctccggtcaggccgcagggcctgtgttgagggaggaggccaaggcgggcccggggctccagggggacgagagcggcgcgaaccccgcgggctgctctgcgcagggcccccactgcctgtccgcggttcccactccggccccgatctccgcccccggccccgccgcggccttcgcgggcacagtcactatccacaaccaggacctgctgttgcgctttgagaacggcgtcctcaccctggccacgcccccaccacacgcctgggagccaggggccgctcctgcccagcagcccaggtgtctgatcgccccccaagctgggttcccgcaagccgcgcacccgggtgactgcccagagctgcggtccgacctcctgctagccgagcccgcagaacccgcgcctgctccggcgccccaggaggaggcggagggcctggccgccgccctgggcccccgcggactgctgggctctggtccaggcgtggtgctgtacctgtgccccgaggcgctgtgcgggcaaaccttcgccaagaagcaccagctgaagatgcacctgctgacgcacagcagcagccagggccagaggcccttcaaatgccccctgggtggctgcggctggaccttcaccacctcttacaagctcaagaggcacctgcagtcgcacgataaactgcggcccttcggctgccctgcggagggctgtggcaagagcttcaccaccgtgtacaacctcaaggcgcacatgaagggccatgagcaggagaactcgttcaaatgtgaggtgtgcgaggagagcttccccacgcaggccaaactcggcgcccaccagcgcagccacttcgaacccgagaggccttaccagtgcgcgttttctggctgcaagaagacatttatcacagtgagtgctctgttttcccataaccgcgcccatttcagggaacaggaactgttttcctgctctttccctggctgcagcaagcaatatgacaaggcttgtaggctgaaaattcacctgcggagtcacaccggcgagagacctttcctttgtgactttgatggctgtggctggaacttcaccagcatgtccaaactcttaaggcacaaaaggaagcacgacgatgaccggaggttcatgtgccctgtggaaggctgtgggaaatctttcacgagggccgaacatctgaaaggccacagcattacccacctgggcacaaagcctttcgtgtgtcctgtggcaggctgctgtgccaggttctctgctcgcagtagcctctacattcactccaagaaacacctgcaggatgtggacacttggaaaagccgttgcccgatctcctcttgtaataaactcttcacatccaagcacagcatgaagacgcacatggttaaaaggcataaggtgggccaggatctcttagctcagctagaagcagcaaattctcttacacccagcagtgaacttaccagccagagacagaatgatctcagtgatgcagagatagtgtctctcttctctgatgtacctgacagtacttctgctgcattgctggacacagcattggtgaactctggaatcttgactattgatgtggcttctgtgagctcgactctggcagggcacctccctgctaataataataattccgtagggcaggctgtggaccctccgtccttgatggccaccagcgaccctcctcaaagtctggatacctctctcttttttggaacggcggccactggttttcagcagagctccttaaatatggatgaggtctcaagtgtaagtgtggggccattgggatctctggactctttggccatgaaaaactccagtccagagcctcaggctttgacacccagcagtaagctaacagtggacacagatactctgactccttcgagcaccctttgtgaaaacagtgtctcagaactactgacaccagccaaagcggagtggagcgtacatcctaactctgacttctttggacaggagggagaaacccagtttggattccccaatgcagcaggaaaccatggttctcagaaagaaagaaatcttatcactgtgactggcagctcatttttggtatgaagcaactctattcattccttgccatgtggctaacttttattacagtcaattttgaggatattctggactaaatatttaagtgcagtcatttctttttggtttgcaaaaagagcacagccctggactatgagtttggagatctaaattctgatcttgagtctggaactgacaagttgtgtgaccctcagcaagtcacttaacctatctgagccttaatttccttatttataaattgtggtggtttgaacacattgctcataaggtcttttcagttttgttttgttttgttttgtgattttgtgctttttcttgaaaattttcgggcattttgcaattattattgtttgtacttgtaatcagaagcggtttgagccctgtagcactaaataatgaaagattgaggaactggtgttttacattaaaaatttaatggaaattttacacagtacgaaaatctaatgatagagctcaaaaaaaaagagctaaaaataggagttggttcttcttagctgtttatccttctaaccttttttttaaatgatgaaggtatgtttttgttgtggaaaatacaagggcttttgttatcactcagacccagagtgaaatgtttgctttgtggttttgaataagttggcctttaataagttatttagtctctcttagcctcagttttctatctgtaaaatggtcatagcaatgtgaacatatgtgttacatcctagacttatttttctaccccagtaggttgtattgaaaggaaaatgttatatgtgtttcagcatgttttggtgaatcttcattccctttcctgccccttgttttccctcctcaaaggggagaaattagcacaaattagtatcaggattgtgcaggaaataaacatttgtgaaggttaagaaagaggaaaaggaagttatttcttcaacagattaaggatttttctacacacagttcttttgtggcattggccacatgtccattagaccaatttgatagtatcttcggtctgcattcaaagccagctcatgcaatgagtattcagcctattcttccaagacaatctggacatagaccagagggagatttttctcccctctgtgccctagagagctcattgctggcttactcttagagttgaaatgagagggttttgtctgcattttgagtagataccatctatcttatgtgagtatagcattttacaatttagcactttcacaactattatatttgatcctcacaatcctgtgaggtaattatggcaaagtcagatctacaattcatattaaaatttacctagctcagattacaaatgtatttcacttagtaatgtgtgtgtgtgtgtgtgtgtgtgtgtgtgtgtagctcaaaacaaagaggaaatatttcccactctcccattcgactcttgagtttcatgactattttgtttataactgtttgctgcctcccaccttaattgatttctcttacattctttgtactccatgctatttccttgtaggtgtacaccagtccttgccatgaatctcttttacttacatttaaattagacacgtctctttcatggtcaccatctctcagccattcttcttatggcccatttttcagtcacagtattactgcaagtatgtgtgtacattgagaagtaattttctggatttagatggcaatgtgtttatacatgaatcagataataatggagacattttatataaggtgttagtgagaagtagttctacttttccttttttacagtgtggtcctggtagcaaacactattagttgctttcaactattgtaacccagtattgtttacatgtggatacttggggataacaattattatggcactttaacagtgcactttaatatataccaccttgatatacatctttactgtctttataatttttaagttggttgtacttattcaatgaaaaagcaaaaaatacacataaatttgtaattcaaagaaatagaattttgtgtctaaccatttaacagttctcccttagtattttagaaagattttaagccattttagaaatgtgttgtcattagttaagtcctcttaaatagattattattattttcctatagaaaatgcagaggcctgaggtgaacgcaagggtcataggcatccattaagatacataactatatagatatcttaaaactctgtcacattgtttccttaatcccttagacctatttcctcccatgaaaactatcataagctatgcttttgttatggtctatagaattttcaaaggacaaattttttttttttaggataaagatcttgtgattgtccgtgggctcacatggtttcttttgttcaattttttcaaaagatttctttttcaatactgttgtcccaccatgatagttgacatggcatgtaattacagacagaagtgtgactgtaaacatattagtgtttctgttagtgttggcataagcttgcctttttgtttaaacaatggaacatgatttaattttatctcatttgccttttgtttatcttcagtccttgatttattaacattttgccaattgaaaacacaataaaaaatgccttgcaggaa

SEQ ID NO: 850 - DNA, 2546 bp, Homo sapiens
gacggcaaatggcggacttcgacacctacgacgatcgggcctacagcagcttcggcggcggcagagggtcccgcggcagtgctggtggccatggttcccgtagccagaaggagttgcccacagagcccccctacacagcatacgtaggaaatctacctttcaatacggttcagggcgacatagatgctatctttaaggatctcagcataaggagtgtacggctagtcagagacaaagacacagataaatttaaaggattctgctatgtagaattcgatgaagtggattcccttaaggaagccttgacatacgatggtgcactgttgggcgatcggtcacttcgtgtggacattgcagaaggcagaaaacaagataaaggtggctttggattcagaaaaggtggaccagatgacagaggaatgggtagctctcgagaatctagaggtggatgggattcccgggatgacttcaattctggcttcagggatgacttcttagggggcaggggaggtagtcgcccaggcgaccggcgaacaggcccccccatgggcagccgcttcagagatggccctcccctccgtggatccaacatggatttcagagaacccacagaagaggaaagagcacagagaccacgactccagcttaaacctcgaacagtcgcgacgcccctcaatcaagtagccaatcccaactctgctatcttcgggggtgccaggcctagagaggaagtcgttcaaaaggagcaagaatgagcctgcggttgggagggaatggggcgtggggggttagagcaggaccacagcctggtgagtccccgggcagccgtcctgcagccgccactcctgcgcctgccattggcctcctcacagcggaaacacagcttgtgagtgcatgtcagctgttaacaagtggtttttagtacattctgggctttgctgtatctatctagtgcctgtttgtgcgtttttttctttcttccgctgcttccccattttccttctgtcctttttctcctgctccttgttttcccagcagcacatggggttcctcggaggagcagaggtggccgccgtgggggggcgtttgggctgcggtgctgcgtcatttttcctttgctttctctttactttagacactggcccaactccaggcgtttcctttcattccctcagtgcttctcttctgacctgcatgttgagttctgtattgctggggcttccaacaaaaaccagagtcactgacagagggaacagcagagaccttgttggtattcagctgtgatggatatagagaatcagaggcaccttgttttcacaactaggataaaaatatctgcagggtcctttccattcctatttagagggagtcctggctccatgaccccctcccgagtggactgtccaagcagataggctcacacgagaaacagtgaggctgaaagggggggctatggaagagcggtagggagtccacggagaagatgcagtgaatgcttgcatgcattcacacgtgtgtgtgtcccagctagttcactcctttcgccgtgcgtggtggaggctggcctctctggctgggtgcagtgaatggccagcgggtttcttttctgctgggccaaggcgctttgggggtggagggggtggtgctggtgctgcactgggctgactgcggcgctgacgcagcgtttccccccatccctgttgcctgtgtgttgtgtggatctgttcctagtataggcaacataatgagatactgtgcttcccacctccccttcagttcagagccaaaatgggtctagaatctggcactttactcatttcctttgataaattgtactatgcagagctgtcaggaaccttcagatagcagtagaggactgcagctgtctaggtctgcggccacatcttggggacacactggactgttcccatgtgcagggttcagcagttatgtgggagtgctaggggttaggcttttgagcttgaacgcctgcgtgtgaacagatgaaaaatccttcagtacccaagtcccagtctgtcctatggggagcagtttgggggcggccggcagcaggagcctgggaaagaggccctcgccaggtgatggcagggccagggtggcctggggcacccagcggaatgtgcttagtatttggtcaccagccgtcatcctgggcttttcctactgtgtcttgttacaaggcctcagcaatccacagaactctctctccttccttccacctgtcagcttctctgcttctgagataagaaccatttgtgtaacaccaacacttaacttcagaaagacatgcattatgtggtgtaatcaaacccgatgctttcagatgacctacttacatcttcaatgtggataagataaagaacaaaacacatgcatctaaactgctgggcaatccagttgacttttaaatgtaagaatggaattccaaacacttaacacattcagctatatgacagaaagtaaatctatggatatggtattttgtgaatgatcttttaaataaaagaaaaccttacgtaatattt

SEQ ID NO: 851 - DNA, 1874 bp, Homo sapiens
aaggccccgctgcgtcttccgagccgcaggcgcaggcccagctgagcggccgccgagcgggtgcgggtgcgggcgcatcggccatcaccgcgcggccgcgcagcggacaccgtgcgtaccggcctgcggcgcccggccaccggggcggaccgcggaacccgaggccatgtcccatgaaaagagttttttggtgtctggggacaactatcctccccccaaccctggatatccgggggggccccagccacccatgcccccctatgctcagcctccctaccctggggccccttacccacagccccctttccagccctccccctacggtcagccagggtacccccatggccccagcccctacccccaagggggctacccacagggtccctacccccaagggggctacccacagggcccctacccacaagagggctacccacagggcccctacccccaagggggctacccccaggggccatatccccagagccccttcccccccaacccctatggacagccacaggtcttcccaggacaagaccctgactcaccccagcatggaaactaccaggaggagggtcccccatcctactatgacaaccaggacttccctgccaccaactgggatgacaagagcatccgacaggccttcatccgcaaggtgttcctagtgctgaccttgcagctgtcggtgaccctgtccacggtgtctgtgttcacttttgttgcggaggtgaagggctttgtccgggagaatgtctggacctactatgtctcctatgctgtcttcttcatctctctcatcgtcctcagctgttgtggggacttccggcgaaagcacccctggaaccttgttgcactgtcggtcctgaccgccagcctgtcgtacatggtggggatgatcgccagcttctacaacaccgaggcagtcatcatggccgtgggcatcaccacagccgtctgcttcaccgtcgtcatcttctccatgcagacccgctacgacttcacctcatgcatgggcgtgctcctggtgagcatggtggtgctcttcatcttcgccattctctgcatcttcatccggaaccgcatcctggagatcgtgtacgcctcactgggcgctctgctcttcacctgcttcctcgcagtggacacccagctgctgctggggaacaagcagctgtccctgagcccagaagagtatgtgtttgctgcgctgaacctgtacacagacatcatcaacatcttcctgtacatcctcaccatcattggccgcgccaaggagtagccgagctccagctcgctgtgcccgctcaggtggcacggctggcctggaccctgcccctggcacggcagtgccagctgtacttcccctctctcttgtccccaggcacagcctagggaaaaggatgcctctctccaaccctcctgtatgtacactgcagatacttccatttggacccgctgtggccacagcatggcccctttagtcctcccgcccccgccaaggggcaccaaggccacgtttccgtgccacctcctgtctactcattgttgcatgagccctgtctgccagcccaccccagggactgggggcagcaccaggtcccggggagagggattgagccaagaggtgagggtgcacgtcttccctcctgtcccagctccccagcctggcgtagagcacccctcccctcccccccacccccctggagtgctgccctctggggacatgcggagtgggggtcttatccctgtgctgagccctgagggcagagaggatggcatgtttcaggggagggggaagccttcctctcaatttgttgtcagtgaaattccaataaatgggatttgctctctgcaaaaaaaaaaaaaaaaaa

SEQ ID NO: 852 - DNA, 2615 bp, Homo sapiens
taaggactcgactacctccgaagaaagccgaaacatgtggctccgcccacactggcctcagctctccgttctcgactattgccgaagtgagccgaagtttgtggccccgcttccggagaactcaagctcccgattgtgcccgaaggaacccgaagggagaccccgcctcattcctcacggcgagctccagaccccgcctcctttccggagcccgtctgttccccttcgggtccaaagcttttggctcctccttgttccgagcccgaaggcccgccccttcacgtactcggagctcggatcccagtgtggacctggactcgaatcccgttgccgactcgcgctctcggcttctgctccggggcttcttccctgcccgcccggggccctgaccgtggcttcttccccggcctgatctgcgcagcccggcgggcgcccagaaggagcaggcggcgcgggggcgcgctgggcgggggaggcgtggccggagctgcggcggcaagcgggctgggactgctcggccgcctcctgcccggcgagcagctcagaccatgtcgcctgaagaatggacgtatctagtggttcttcttatctccatccccatcggcttcctctttaagaaagccggtcctgggctgaagagatggggagcagccgctgtgggcctggggctcaccctgttcacctgtggcccccacactttgcattctctggtcaccatcctcgggacctgggccctcattcaggcccagccctgctcctgccacgccctggctctggcctggactttctcctatctcctgttcttccgagccctcagcctcctgggcctgcccactcccacgcccttcaccaatgccgtccagctgctgctgacgctgaagctggtgagcctggccagtgaagtccaggacctgcatctggcccagaggaaggaaatggcctcaggcttcagcaaggggcccaccctggggctgctgcccgacgtgccctccctgatggagacactcagctacagctactgctacgtgggaatcatgacaggcccgttcttccgctaccgcacctacctggactggctggagcagcccttccccggggcagtgcccagcctgcggcccctgctgcgccgcgcctggccggccccgctcttcggcctgctgttcctgctctcctctcacctcttcccgctggaggccgtgcgcgaggacgccttctacgcccgcccgctgcccgcccgcctcttctacatgatccccgtcttcttcgccttccgcatgcgcttctacgtggcctggattgccgccgagtgcggctgcattgccgccggctttggggcctaccccgtggccgccaaagcccgggccggaggcggccccaccctccaatgcccaccccccagcagtccggagaaggcggcttccttggagtatgactatgagaccatccgcaacatcgactgctacagcacagatttctgcgtgcgggtgcgcgatggcatgcggtactggaacatgacggtgcagtggtggctggcgcagtatatctacaagagcgcacctgcccgttcctatgtcctgcggagcgcctggaccatgctgctgagcgcctactggcacggcctccacccgggctactacctgagcttcctgaccatcccgctgtgcctggctgccgagggccggctggagtcagccctgcgggggcggctgagcccagggggccagaaggcctgggactgggtgcactggttcctgaagatgcgcgcctatgactacatgtgcatgggcttcgtgctgctctccttggccgacacccttcggtactgggcctccatctacttctgtatccacttcctggccctggcagccctggggctggggctggctttaggtgggggcagccccagccggcggaaggcagcatcccagcccaccagccttgccccagagaagctccgggaggagtaagctgtcacgacgctccctctgccagctggtcccgggaattctgtgaaccaggctgctgtctcctccccagaaagagtccttaccttggagagggtcctggagagaatttcctcttccccagctaaataccctgcctgcaactgaagcagacccgggggtgtcctccctgccctctgcccagaggccacctccactcctacaaaatcaaagtattgtccagacaagagtcactggcccctgctccagcttctgggtatccagagagcactgcacttccccaaaacggaaggggcccctgggcagtgggttttgggcaaattccctttctttgcatccacaatgtggggtcggagcttgggggcaggtcctgggagtgggaagcctcttccttgtgtctttcgctccacttttagctcatcgcaccaatattgcagacttggaaggaagcataagcttcccatttcacaaaggggaaactgaggtgcgggtgcgcgggcctggggacggccgtcccatggcttccatctgagccacctcgggaccccagcgctcctggcgccctcttctcatcgcttggcctatgacaggtcaccgtgtgtaaatctttcccaataaagtgttgcacaaaggcaaaaaaaaaaaaaaaaa

SEQ ID NO: 853 - DNA, 2167 bp, Homo sapiens
gtctgggagcgagagtaagagataaaggcaagggcgcctgaccgggcctgggcacctcctcccactgcgggcaaagggcaggcagttcgtgcgcggacacaagcactggcggaccgtggccatggcgggcgctgagtggaagtcgctggaggaatgcttggagaagcacctgccgctccccgacttgcaggaagtgaagcgcgttctctatggcaaggaactcaggaagcttgatctgcccagggaagctttcgaagctgcctccagagaagactttgaactgcagggatatgcctttgaagcagcggaggagcagctgagacgaccccgcattgtgcacgtggggctggttcagaacagaatccccctccccgcaaatgcccctgtggcagaacaggtctctgcccttcatagacgcataaaggctatcgtagaggtggctgcaatgtgtggagtcaacatcatctgtttccaggaagcatggactatgccctttgccttctgtacgagagagaagcttccttggacagaatttgctgagtcagcagaggatgggcccaccaccagattctgtcagaagctggcgaagaaccatgacatggtggtggtgtctcccatcctggaacgagacagcgagcatggggatgttttgtggaatacagccgtggtgatctccaattccggagcagtcctgggaaagaccaggaaaaaccacatccccagagtgggtgatttcaacgagtcaacttactacatggagggaaacctgggccaccccgtgttccagacgcagttcggaaggatcgcggtgaacatttgctacgggcggcaccaccccctcaactggcttatgtacagcatcaacggggctgagatcatcttcaacccctcggccacgataggagcactcagcgagtccctgtggcccatcgaggccagaaacgcagccattgccaatcactgcttcacctgcgccatcaatcgagtgggcaccgagcacttcccgaacgagtttacctcgggagatggaaagaaagctcaccaggactttggctacttttatggctcgagctatgtggcagcccctgacagcagccggactcctgggctgtcccgtagccgggatggactgctagttgctaagctcgacctaaacctctgccagcaggtgaatgatgtctggaacttcaagatgacgggcaggtatgagatgtacgcacgggagctcgccgaagctgtcaagtccaactacagccccaccatcgtgaaagagtagccggcttcagtgcctgccttggggtgaggaagacacctctgccccagtggattagcaagtgtggcaggcttaacatgtccaggttctccccaataacattgtccaggttggttttaaaattcccaggcagggggagagtggcatggggagtgacttcttaatgggtaaggggctgcttacttctggggtattggaaatgtttggggactaggtagaggtgaatgtactaaatgccactgaatttgtatacttcagaatgtttgttatgtaaattttacctcaactaaaaaaaaaaatgcccaggtactgcttgtgcaggtggatttgaggttaggcagatgatgctgtccatcccgtacaccagtgggaagagggtgagggctgatccagagaccctgagcctacagcaaggctgtggtgggtcggatggtctttggatgtgtcagcttagctaggccacagtcaccagtaattcaatcagacactaatctaggtatttctgtgaaggtattttgtagatgtgacagaagtccattcccaattgactaagtaagtgagattatctcagataatctgggtcagcctgacctgattagtcagaaggcctaaagaacagagctaagggtttccctgaggaagaaattctgcctgaggacagcagcccagtgcttggcgagagttcctgacagtctgcccttctgatagcctgcctcacagagtttagacatgactagccagctcctacaatcactgaagtcaattccttgcaataaatctcaatatatcccctaaaaaaaaaaaaaaaaaaaaaaaaaaaaaaaaaaaaaaaaaaaaaaaaaaaaaaaaaaaaaaaaaaaaaaaaaaaaaaaaaaaaaaaaaaaaaaaaaaaaa

SEQ ID NO: 854 - DNA, 4273 bp, Homo sapiens
cggggaaagatgtcgctcccggaagtgttgggcgcagggcgtggctgcggctgcggctgccacgttggaacggaacgtggaggtggccctggccggggaggaggggcggcggcgaatgctgggagagtccgacgagcgctgcactaacgcaggatccggctgccgaaggtcctcgccaggatgaagttaaaggaagtagatcgtacagccatgcaggcatggagccctgcccagaatcaccccatttacctagcaacaggaacatctgctcagcaattggatgcaacatttagtacgaatgcttcccttgagatatttgaattagacctctctgatccatccttggatatgaaatcttgtgccacattctcctcttctcacaggtaccacaagttgatttgggggccttataaaatggattccaaaggagatgtctctggagttctgattgcaggtggtgaaaatggaaatattattctctatgatccttctaaaattatagctggagacaaggaagttgtgattgcccagaatgacaagcatactggcccagtgagagccttggatgtgaacattttccagactaatctggtagcttctggtgctaatgaatctgaaatctacatatgggatctaaataattttgcaaccccaatgacaccaggagccaaaacacagccgccagaagatatcagctgcattgcatggaacagacaagttcagcatattttagcatcagccagtcccagtggccgggccactgtatgggatcttagaaaaaatgagccaatcatcaaagtcagtgaccatagtaacagaatgcattgttctgggttggcatggcatcctgatgttgctactcagatggtccttgcctccgaggatgaccggttaccagtgatccagatgtgggatcttcgatttgcttcctctccacttcgtgtcctggaaaaccatgccagggggattttggcaattgcttggagcatggcagatcctgaattgttactgagctgtggaaaagatgctaagattctctgctccaatccaaacacaggagaggtgttatatgaacttcccaccaacacacagtggtgcttcgatattcagtggtgtccccgaaatcctgctgtcttatcagctgcttcgtttgatgggcgtatcagtgtttattctatcatgggaggaagcacagatggtttaagacagaaacaagttgacaagctttcatcatcttttgggaatcttgatccctttggcacaggacagccccttcctccgttacaaattccacagcagactgctcagcatagtatagtgctgcctctgaagaagccgcccaagtggattcgaaggcctgttggtgcttctttttcatttggaggcaaactggttacgtttgagaatgtcagaatgccttctcatcagggagctgagcagcagcagcagcagcaccatgtgttcattagtcaggttgtaacagaaaaggagttcctcagccgatcagaccaacttcagcaggctgtgcagtcacaaggatttatcaattattgccaaaaaaaaattgatgcttctcagactgaatttgagaaaaatgtgtggtcctttttgaaggtaaactttgaggatgattctcgtggaaaataccttgaacttctaggatacagaaaagaagatctaggaaagaagattgctttggccttgaacaaagtggatggagccaatgtggctcttaaagactctgaccaagtagcacagagtgatggggaggagagccctgctgctgaagagcagctcttgggagagcacattaaagaggaaaaagaagaatctgaatttctaccctcatctggaggaacatttaatatctctgtcagtggggacattgatggtttaattactcaggctttgctgacgggcaattttgagagtgctgttgacctttgtttacatgataaccgcatggccgatgccattatattggccatagcaggtggacaagaactcttggctcgaacccagaaaaaatacttcgcaaaatcccaaagcaaaattaccaggctcatcactgcagtggtgatgaagaactggaaagagattgttgagtcttgtgatcttaaaaattggagagaggctttagctgcagtattgacttatgcaaagccggatgaattttcagccctttgtgatcttttgggaaccaggcttgaaaatgaaggagatagcctcctgcagactcaagcatgtctctgctatatttgtgcagggaatgtagagaaattagttgcatgttggactaaagctcaagatggaagccaccctttgtcacttcaggatctgattgagaaagttgtcatcctgcgaaaagctgtgcaactcactcaagccatggacactagtactgtaggagttctcttggctgcgaagatgagtcagtatgccaatttgttggcagctcagggcagtattgctgcagccttggcttttcttcctgacaacaccaaccagccaaatatcatgcagcttcgtgacagactttgtagagcacaaggagagcctgtagcaggacatgaatcacctaaaattccgtacgagaaacagcagctccccaagggcaggcctggaccagttgctggccaccaccagatgccaagagttcaaactcaacaatattatccccatggagaaaatcctccacctccgggtttcataatgcatggaaatgttaatccaaatgctgctggtcagcttcccacatctccaggtcatatgcacacccaggtaccaccttatccacagccacagccttatcaaccagcccagccgtatcccttcggaacaggggggtcagcaatgtatcgacctcagcagcctgttgctcctcctacttcaaacgcttaccctaacaccccttacatatcttctgcttcttcctatactgggcagtctcagctgtacgcagcacagcaccaggcctcttcacctacctccagccctgctacttctttccctcctcccccttcctctggagcatccttccagcatggcggaccaggagctccaccatcatcttcagcttatgcactgcctcctggaacaacaggtacactgcctgctgccagtgagctgcctgcgtcccaaagaacaggtcctcagaatggttggaatgaccctccagctttgaacagagtacccaaaaagaagaagatgcctgaaaacttcatgcctcctgttcccatcacatcaccaatcatgaacccgttgggtgacccccagtcacaaatgctgcagcaacagccttcagctccagtaccactgtcaagccagtcttcattcccacagccacatcttccaggtggccagcccttccatggcgtacagcaacctcttggtcaaacaggcatgccaccatctttttcaaagcccaatattgaaggtgccccaggggctcctattggaaataccttccagcatgtgcagtctttgccaacaaaaaaaattaccaagaaacctattccagatgagcacctcattctaaagaccacatttgaggatcttattcagcgctgcctttcttcagcaacagaccctcaaaccaagaggaagctagatgatgccagcaaacgtttggagtttctgtatgataaacttagggaacagacactttcaccaacaatcaccagtggtttacacaacattgcaaggagcattgaaactcgaaactactcagaaggattgaccatgcatacccacatagttagcaccagcaacttcagtgagacctctgctttcatgccagttctcaaagttgttctcacccaggccaataagctgggtgtctaaaaggacagcttctcttccactcaatattgccatttttccaaagaaacatgttaaaaaaaaaaattataagacatggactagtcctcattagcatgtttgcatagcaaccagtcaagagcatttacactatttctgctgatatactcaccttagaactgctcagaaccctggtgctttatttttgttttaatcttttgttgccagtgatgattttcctattctgcaaatagtgtatttcctggattacacatagtatggtttcctgaagtattctgataaatgtgttttttaaaacctcaatatactttttagaaaaggagcatctggttatgcataaagcagagctaaaactaaatttctttcatgtcctccctacttcctcagtgtcaatcagattaaagtgtgtaatcctaaaaaaaaaaaaaaaaaa

SEQ ID NO: 855 - DNA, 2272 bp, Homo sapiens
cgccgcagcgcgcgcccttcccctcctcaccgctacctgctccggttccggcgctcggccgctccgttgccctcgggcgccttggttgcggccctccgctgaggagccatcggaccaggccgccgcggagccgggccggacgcgggcgccaggcccggggacgaacgccgtaacagggagcgcgaggcaggcacggcgcagggacgcgagtgcgacgcgctcggccatcggcccctgggctggcggccaggcccgagcaatcggcggccgagcggggcggggctcagagcggaggcggcggccgcgagggcggggcggccgggcctggctgcgcccccggacctcgcgggaccgcggcggcgcaggaagaagtccccaaggagacttcgccataggagttcacaggaaatattgaaatgtcaggttccactccatttcagatgagattagttcatttagaccttaaaggagctccaccaaaggtctcgtacctctcagagatttttcctctgttccgtgcgctaggtgcaaacggcctcctcattgagtatgaagacatgtttccctacgagggccctctgaggctgctgagggccaagtacgcctacagcccctctgaaatcaaagagatcttgcatctggctggactcaatgagctggaggtgattcccttggtgcagacatttggacacatggagtttgtgctgaagcacacggccttcgcccacctgcgggaggtgggctccttcccctgcaccctgaacccccacgaggcagagtccctggcgctggtgggcgccatgattgaccaggtcctggagctacacccaggcgcccagcggctgcacatcgggtgtgatgaggtctattacctcggagagggggaggcctcgcgccggtggctacagcaagagcagaacagcacggggaagttgtgcctgtcacacatgcgggcggtggccagcggcgtgaaggcccggcgccccagcgtgacacccctggtgtgggacgacatgctccgagacctgcctgaggaccagctcgcagcgtccggggtgccgcagctggtggagccggtgctctgggactacacggccgacctggatgtgcacggcaaggtcctcctcatgcagaagtaccggcggtgcggctttccgcagctgtgggcagccagtgccttcaagggtgccacggggcccagccaggccgtgccccctgttgagcaccacctcaggaaccacgtgcagtggctgcaggtggcgggcagcgggcccacggactcactgcagggcatcatcctgaccggctggcagaggtacgaccactactctgtgctgtgcgagctgctgcccgcaggagtcccgtccctggccgcctgcctgcagttgcttctacgcggaggatttgatgaagatgttaaagcgaaagtggagaaccttctcgggatttccagcctggaaaaaacggaccctgttaggcaagcaccctgcagccctccctgtccccttcttcccctccccttcccccgcccgtggagacagctgttctcagcagggctctccgcagggagggggccggctccttccctggcagcaacatccttgcccttgtcacacaagtcagcctccatctgcgcagctctgtggatgcgctgctggagggcaacaggtatgtcactggctggttcagcccctaccaccgccagcggaagctcatccacccggtcatggttcagcacatccagcccgcagcgctcagcctcctggcacagtggagcaccctcgtgcaggagctggaggctgccctgcagctggctttctacccggatgccgtggaggagtggctggaggaaaacgtgcaccccagcctgcagcggctgcaagctctgctgcaggacctcagcgaggtgtctgcccccccgctgccacccaccagccctggcagggacgttgctcaggacccctgaggggagagctcatgccagggggctcctgctggaggctgggggggctctgcactgccaaatggcctgggcaatacgggcccacgtgggcgtcgtgccctctggcccagcagtgtcttgcccacactcagttcctgagggccctgggcagcccctgggggagagactagaaaacacagaaggaagcagcacagggagacccgctttgtgatctgcatgtgtgacactgattctttggaaataaagagtggaagctgcaaaaaaaaaaaaaaaaaaaaaaaaaaaaaaaaaaaaaaaaaaaaaaaaaaa

SEQ ID NO: 856 - DNA, 2099 bp, Homo sapiens; identical to SEQ ID NO: 623

SEQ ID NO: 857 - DNA, 2129 bp, Homo sapiens
tcctatccaccctccactcccctgtcccttggtgactcatccctgagcttcccaaggaagcccccaccctctgccctttcctcccgccttccatgagtggaaaatccacctccgccccctatagcaggccagcccccttcctccccagtctccgaccccatcccccagccgaccagtttcctctccaggaccagggagcaatcacagctgccccgaccttggcttcctctgctgggtgggattgggggctgggcccccaaatgggcccctggcttcccccttcctctgggcaggggacagagagacacaggctcggggagcaggactgacttcctcttgtcccggaatgagcatgcctgccctttgcaagcaggtttgggtctcacgcagaggaaaccaaaagcaataagagggagggaaggcagagcaaccaatcaagggcagggtgagactcaaaacgagcgggctccctggggagccagacagaggctgggggtgatggcggagctacagcagctgcaggagtttgagatccccactggccgggaggctctgaggggcaaccacagtgccctgctgcgggtcgctgactactgcgaggacaactatgtgcaggccacagacaagcggaaggcgctggaggagaccatggccttcactacccaggcactggccagcgtggcctaccaggtgggcaacctggccgggcacactctgcgcatgttggacctgcagggggccgccctgcggcaggtggaagcccgtgtaagcacgctgggccagatggtgaacatgcatatggagaaggtggcccgaagggagatcggcaccttagccactgtccagcggctgccccccggccagaaggtcatcgccccagagaacctaccccctctcacgccctactgcaggagacccctcaactttggctgcctggacgacattggccatgggatcaaggacctcagcacgcagctgtcaagaacaggcaccctgtctcgaaagagcatcaaggcccctgccacacccgcctccgccaccttggggagaccaccccggattcccgagccagtgcacctgccggtggtgcccgacggcagactctccgccgcctcctctgcgtcttccctggcctcggccggcagcgccgaaggtgtcggtggggcccccacgcccaaggggcaggcagcacctccagccccacctctccccagctccttggacccacctcctccaccagcagccgtcgaggtgttccagcggcctcccacgctggaggagttgtccccacccccaccggacgaagagctgcccctgccactggacctgcctcctcctccacccctggatggagatgaattggggctgcctccacccccaccaggatttgggcctgatgagcccagctgggtgcctgcctcatacttggagaaagtggtgacactgtacccatacaccagccagaaggacaatgagctctccttctctgagggcactgtcatctgtgtcactcgccgctactccgatggctggtgcgagggcgtcagctcagaggggactggattcttccctgggaactatgtggagcccagctgctgacagcccagggctctctgggcagctgatgtctgcactgagtgggtttcatgagccccaagccaaaaccagctccagtcacagctggactgggtctgcccacctcttgggctgtgagctgtgttctgtccttcctcccatcggagggagaaggggtcctggggagagagaatttatccagaggcctgctgcagatggggaagagctggaaaccaagaagtttgtcaacagaggacccctactccatgcaggacagggtctcctgctgcaagtcccaactttgaataaaacagatgatgtcctgtgactgccccacagagataaggggccaggagggattgaaaggcatcccagttctaaggctgctgctaattacagcccccaacctccaacccaccagctgacctagaagcagcatcttcccatttcctcagtacccacaaagtgcagcccacattggaccccagacacccctctgcagccattgactgcaacttgttcttttgcccattgaaaaaaaaaaaaaaaaaaaa

SEQ ID NO: 858 - DNA, 1617 bp, Homo sapiens
cggccgccgagccgagcagcgccgcgcggggccgagtggagccgagcagctgccgcgccgcgtcgccggtttaagcgcagtgcaggccgcggccgggggcggcggtagtgagcccagcgctgcgctccagcccccttttccctccatggtttctctccgctcccgtgagtaacttggctccgggggctccgctcgcctgcccgcacgccgcccgccacccaggaccgcgccgccggcctccgccgctagcaaacccttccgacggccctcgctgcgcaagccgggacgcctctcccccctccgcccccgccgcggaaagttaagtttgaagaggggggaagaggggaacatggacatgaagaggaggatccacctggagctgaggaaccggaccccggcagctgttcgagaacttgtcttggacaattgcaaatcaaatgatggaaaaattgagggcttaacagctgaatttgtgaacttagagttcctcagtttaataaatgtaggcttgatctcagtttcaaatctccccaagctgcctaaattgaaaaagcttgaactcagtgaaaatagaatctttggaggtctggacatgttagctgaaaaacttccaaatctcacacatctaaacttaagtggaaataaactgaaagatatcagcaccttggaacctttgaaaaagttagaatgtctgaaaagcctggacctctttaactgtgaggttaccaacctgaatgactaccgagagagtgtcttcaagctcctgccccagcttacctacttggatggctatgaccgagaggaccaggaagcacctgactcagatgccgaggtggatggtgtggatgaagaggaggaggacgaagaaggagaagatgaggaagacgaggacgatgaggatggtgaagaagaggagtttgatgaagaagatgatgaagatgaagatgtagaaggggatgaggacgacgatgaagtcagtgaggaggaagaagaatttggacttgatgaagaagatgaagatgaggatgaggatgaagaggaggaagaaggtgggaaaggtgaaaagaggaagagagaaacagatgatgaaggagaagatgattaagaccccagatgacctgcagaaacagaactgttcagtattggttggactgctcatggattttgtagctgtttaaaaaaaaaaaaaaggtagctgtgatacaaaccccaggacacccacccacccaaagagccaaagaatagttcctgtgacattccgccttccttccatgtagtccctcttggtaatctaccaccaagcttgtggacttcaccccaacaaaattgtaagcgttgttaggtttttgtgtaagattcttgctgtagcgtggatagctgtgattggtgagtcaaccgtctgtggctaccagttacactgagattgtaacagcatttttactttctgtacaacaaaaaagctttgtaaataaaatcttaacattttgggtctgttttttcatgctttgctttttaattattattattattttttttacattaggacattttatgtgacaactgccaaaaaagtatttttaagaatttaagcgaaataaacagttactctttggtaaa

SEQ ID NO: 859 - DNA, 704 bp, Homo sapiens
ggtttataggtcccggcccgagcctccggccgcccgccgggtttgtcccgcgatccccgaccatgcccgccgacctcagcggtacttggaccctgctcagcagcgacaacttcgagggctacatgctggccctaggtattgactttgccactcgtaaaatagccaagttgctgaagccacagaaagtgattgagcagaatggggattcttttaccatccacacgaacagcagcctaaggaactactttgtgaaatttaaagttggagaagaatttgatgaagataacagaggcctggacaacagaaaatgcaagagtttggttatctgggacaatgacaggctcacctgtatccagaagggagaaaagaagaacagaggctggacccattggatcgaaggagacaaactccacctggaaatgttctgtgaaggtcaagtgtgcaaacagacattccagagagcctgatccacatccagcagcagagcccacttgtggctgcagctttatgccaaattatattgcagactgaacagacgtttatctatcccatttggcgacgaggactcgtggctggagagagccacacagcgtgtaacctgaagtcatctagattatggggaaactgctcagcttcaataaacctgtccaaatgaaaaaaaaaaaaaaaaaaaaaaaaaaaaaaaaaaaaaaaaaaaaaaaaaa

SEQ ID NO: 860 - DNA, 4674 bp, Homo sapiens
gcgctgcgtcgctttcagcctctggtgaagggcggcgcgcttaggcaggcggtggcgcggctggagtgccgcggggagggctgtgccggttgctttctgcagccgcatctcggccagctctcctcgccgtccccggggcgctgtgcgtctccagtccgggaccgaagccgcctgccgtagcgggcggccagatccgcgtcccgcctcagcggccggaggacatgcgggagagagaatgagccagagggacacgctggtgcatctgtttgccggaggatgtggtggtacagtgggagctattctgacatgtccactggaagttgtaaaaacacgactgcagtcatcttctgtgacgctttatatttctgaagttcagctgaacaccatggctggagccagtgtcaaccgagtagtgtctcccggacctcttcattgcctaaaggtgatcttggaaaaagaagggcctcgttccttgtttagaggactaggccccaatttagtgggggtagccccttccagagcaatatactttgctgcttattcaaactgcaaggaaaagttgaatgatgtatttgatcctgattctacccaagtacatatgatttcagctgcaatggcaggttttactgcaatcacagcaaccaaccccatttggcttataaagactcggttacagcttgatgcaaggaaccgcggggaaaggcgaatgggtgcttttgaatgtgttcgtaaagtgtatcagacagatggactaaaaggattttataggggcatgtctgcttcatatgctggtatatcagagactgttatccattttgttatttatgaaagtataaaacaaaaactactggaatataagactgcttctacaatggaaaatgatgaagagtctgtgaaagaagcatcagattttgtgggaatgatgctagctgctgccacctcaaaaacttgtgccacaactatagcatatccacatgttgtaagaacaagactacgtgaagagggaacaaaatacagatctttttttcagactctatctttgcttgttcaagaagaaggttatgggtctctttatcgtggtctgacaactcatctagtgagacagattccaaacacagccattatgatggccacctatgaattggtggtttacctactcaatggatagcagcacgaggactgctgtactgcaaaaaaagaagaccaaaagattacagtggaccatgggatacagaagccagcatggcagacagaagaaaaatagtttgggaacatgtaactattctaagtggaagttttgttgtaggaattatagtaatcacaccacattacttggcctttcggtaatgtgaaaaaaaaaaaaaacctcagagcctccaaggaaatgcctttagaagcactcctctctcaaaattgccattttctctaccatgtcccccagacacagttgggttttgttgatttatggcagtcttctaaacaaagccatccttaattttacatactgtattgtaactatccaaagatagtattggcagtcataaatttataacttctggcctttgtttaattccagtaaaataacagcaatgacaatgagatcgtcagtattattttcacatttccctgagaggacctggcacaatattttaaatttaattatttggcagtagtcactgtttttgacaaccaatgaaatagcgtctaaatatcttgtatattttttagcatcaaaatgttttggtttccactgctgacaggtgcttgttgtttagcctaatgtggatatttaaattgttaacataccaaacacacatggtaatagtttgggacaaaataactagtaaaatgttgatttctcggctatttcactgactgcggcatgtcctcgtgtcttctctgattttgtggtacatgaatgaatgcatttatctttttagtgacttactagttacgaacttgaattatcacctctttgtcatacttaagtatcatttacataaagtgtaaaagattttttcacttttgaatctttacctacttgctttcacattaagaatttgaacttttgagttttttccaggtctatatataatagattacatttattttgtaaagaaaatagtaatttaaagttttgccattttaaggtgacaatatttgggacagtataaatattatagacaagggcccccttgctgtctgctttagcaggtagtgacattaattgacttatagttttgtgtaaatgaacaaactgcttttgacaagaaatttattctgtcctagtttcctgcgtggtaaatcatagaaagattcaagttcatttgggttaaatgtgctaataggatgtagcttttaaattctgctattgagtcagctgtaccttttaatactttaaatgtgttatttgtatggcccttataaaggtgtttgctgtaattctgttaaaagacttcgcctatgccatactggtgtataaaaactgccgcaattggacgccggtgtggtactcatttcagtatacctgaactgtacattttgtgcaatggctttatctaaaagaatgacgcttcgtgaaagcactttgtggccttttttgggggggagggtgagagagtaggagagaataccatgttaagattaaaaaaaaaaacaaaaacattggtcatgtattaggcagaaacagtgttcataacatttttctgggttttaaatatgttgtttcggatatccttaatataaatgttttaggtattctgtgtaccctgtcgtacccccaacattatagaatattgcagcgtgtcattgcaagctttctctgctgtcaccagtgaaacatagtgccctgttaaattcccccactttaacttccttgtgatcaacagtaactggatgtttttgaggtgctcaattggaataaaaatattccaatctatttggagaccaaaggcaaaatcagttttcttacctttggaattattcgtaccttttatggtaaatttcagctttgacatgtattatgaggaacgtaccaaaaaccggtttgtaacaaatctgtagagaaggtctgaatctatcgtgtttgccttttcaggtgccatttctactgcctaatacagtgccatttgccttgtgaagacccataaacattcattgtgttgaatgtaagatagagactctccctagtcttactgatctcagtaccccacaaatgattaagaatgatatgaaaaccagcagctaaggaacatcttattatttagttgtagcatattcataacaagtgtccttcaaggataaacatatattctctatttgtatttagcaagtaaaacttgtgttgacctttagtgcattatattcagcttttaacagtattatgtatgtactggaaagcaaagaaatcttagagtcttggacattgtttatttgtgcaacaactagaaaggagcaatgaagtttatttcagttgtatttttccctaagcacaatctgcaatagtttatgtatgacagagataattcaaaaaggaaaactatatataaaagttgtatataaagtttgtctctgaaatatttctttgaagtttttaaaaaatcgactcatgtttaaaaacaaaaacacatattcagagcattggacttttttaacttgttttcatctgtttatcatgacttttttatttctggtgtagagtccacattatttagtttgttgtacttttaaatttcaaagttcaaatctgaagaattagcgtttgtgatttcgggataccatgcagtggttttaatcccaggaaaaaaactatcaccaaaagttcgtttgattctcattatgtaactttgtagaaccatcctttctagatgggtccaccacagtgaatttgtaactttgaagtcaggatagaatatcattagattatctgtgagatagcattactatgttaggaccagcagagtttgggttggtaaaaataatgtttgctctattactgggttacagacatttcagcatttttaggttggttttaaatcactaaaaatatttattcggatttgaaggatttaagtgctaaaaatcaatccatttcttgcccttcaataattgtccatgcctgccttttgttgtttacatgctcttctgcccagactgttagtaatctagggaccccctttggagctgataagtacagttcagccttttctcctcaaatatataatgactttaacattcctaagaatataggtatttctgaatgatttaaatttgaggaattttaatacataaaatacaatgtacaaactttctgcccactcagatctcttctccatcatgtacttagtatttcccattaacctacacactgatttttatgctactccttgtagaaacaaaattctggtttgactcagtttttgtgtttataaacttttggaatgtgtaccccgtttatgtgaagaattatgacctatcagtcatagctaaatagtgaacctcaaaagtgttaacttttgactattcatgtgaggtttggtatcttgcatttatgtacatggctgtaaattatgtgcatttactctgtatttatgttatctagctgacttttacttgaattgttcaaattttaaaaattaaaatacgctcatgaaaatatgaaaaaaaaaaaaaaaa

SEQ ID NO: 861 - DNA, 1086 bp, Homo sapiens; identical to SEQ ID NO: 33

SEQ ID NO: 862 - DNA, 3778 bp, Homo sapiens
ccatttcctcctcctagccggactggagggagacaaagcagcgcccgtctgcttcgggcctctggaatttagcgctcgcccagctagccgcagaaatgactgctgtccatgcaggcaacataaacttcaagtgggatcctaaaagtctagagatcaggactctggcagttgagagactgttggagcctcttgttacacaggttacaacccttgtaaacaccaatagtaaagggccctctaataagaagagaggtcgttctaagaaggcccatgttttggctgcatctgttgaacaagcaactgagaatttcttggagaagggggataaaattgcgaaggagagccagtttctcaaggaggagcttgtggctgctgtagaagatgttcgaaaacaaggtgatttgatgaaggctgctgcaggagagttcgcagatgatccctgctcttctgtgaagcgaggcaacatggttcgggcagctcgagctttgctctctgctgttacccggttgctgattttggctgacatggcagatgtctacaaattacttgttcagctgaaagttgtggaagatggtatcttgaagttgaggaatgctggcaatgaacaagacttaggaatccagtataaagccctaaaacctgaagtggataagctgaacattatggcagccaaaagacaacaggaattgaaagatgttggccatcgtgatcagatggctgcagctagaggaatcctgcagaagaacgttccgatcctctatactgcatcccaggcatgcctacagcaccctgatgtcgcagcctataaggccaacagggacctgatatacaagcagctgcagcaggcggtcacaggcatttccaatgcagcccaggccactgcctcagacgatgcctcacagcaccagggtggaggaggaggagaactggcatatgcactcaataactttgacaaacaaatcattgtggaccccttgagcttcagcgaggagcgctttaggccttccctggaggagcgtctggaaagcatcattagtggggctgccttgatggccgactcgtcctgcacgcgtgatgaccgtcgtgagcgaattgtggcagagtgtaatgctgtccgccaggccctgcaggacctgctttcggagtacatgggcaatgctggacgtaaagaaagaagtgatgcactcaattctgcaatagataaaatgaccaagaagaccagggacttgcgtagacagctccgcaaagctgtcatggaccacgtttcagattctttcctggaaaccaatgttccacttttggtattgattgaagctgcaaagaatggaaatgagaaagaagttaaggagtatgcccaagttttccgtgaacatgccaacaaattgattgaggttgccaacttggcctgttccatctcaaataatgaagaaggtgtaaagcttgttcgaatgtctgcaagccagttagaagccctctgtcctcaggttattaatgctgcactggctttagcagcaaaaccacagagtaaactggcccaagagaacatggatctttttaaagaacaatgggaaaaacaagtccgtgttctcacagatgctgtcgatgacattacttccattgatgacttcttggctgtctcagagaatcacattttggaagatgtgaacaaatgtgtcattgctctccaagagaaggatgtggatggcctggaccgcacagctggtgcaattcgaggccgggcagcccgggtcattcacgtagtcacctcagagatggacaactatgagccaggagtctacacagagaaggttctggaagccactaagctgctctccaacacagtcatgccacgttttactgagcaagtagaagcagccgtggaagccctcagctcggaccctgcccagcccatggatgagaatgagtttatcgatgcttcccgcctggtatatgatggcatccgggacatcaggaaagcagtgctgatgataaggacccctgaggagttggatgactctgactttgagacagaagattttgatgtcagaagcaggacgagcgtccagacagaagacgatcagctgatagctggccagagtgcccgggcgatcatggctcagcttccccaggagcaaaaagcgaagattgcggaacaggtggccagcttccaggaagaaaagagcaagctggatgctgaagtgtccaaatgggacgacagtggcaatgacatcattgtgctggccaagcagatgtgcatgattatgatggagatgacagactttacccgaggtaaaggaccactcaaaaatacatcggatgtcatcagtgctgccaagaaaattgctgaggcaggatccaggatggacaagcttggccgcaccattgcagaccattgccccgactcggcttgcaagcaggacctgctggcctacctgcaacgcatcgccctctactgccaccagctgaacatctgcagcaaggtcaaggccgaggtgcagaatctcggcggggagcttgttgtctctggggtggacagcgccatgtccctgatccaggcagccaagaacttgatgaatgctgtggtgcagacagtgaaggcatcctacgtcgcctctaccaaataccaaaagtcacagggtatggcttccctcaaccttcctgctgtgtcatggaagatgaaggcaccagagaaaaagccattggtgaagagagagaaacaggatgagacacagaccaagattaaacgggcatctcagaagaagcacgtgaacccggtgcaggccctcagcgagttcaaagctatggacagcatctaagtctgcccaggccggccgcccccacccctcggggctcctgaatatcagtcactgttcgtcactcaaatgaatttgctaaatacaacactgatactagattccacagggaaatgggcagactgaaccagtccaggtggtgaattttccaagaacatagtttaagttgattaaaaatgcttttagaatgcaggagcctacttctagctgtattttttgtatgcttaaataaaaataaaaattcataaccaaagagaatcccacattagcttgttagtaatgctctgaccaagccgagatgcccattctcttagtgatggcggcgttagggtttgagagaagggaatttggctcaacttcagttgagagggtgcagtccagacagcttgactgcttttaaatgaccaaagatgacctgtggtaagcaacctgggcatcttaggaagcagtccctggagaaggcatgttcccagaaaggtctctggagggacaaactcactcagtaaaacataatgtatcatgaagaaaactgattctctatgacatgaaatgaaaattttaatgcattgttataattactaatgtacgctgctgcaggacattaataaagttgcttttttaggctacagtgtctcgatgccataatcagaacacactttttttcctctttctcccagcttcaaatgcaaattcatcattgggctcacttctaataactgcagtgtttcccgccttgggcttgcagcagaaaaacctgacaacatagtgtttgctaaggcagtaatttagactttaccttatttgtgattactgtagtgattgattgattgattactattaactacaaggtataatttactatcaccttatttaaattttatgaattaatttgaatgttttttacactaactaacttttcccaataaagtccactatgaaaccacgacaaaaaaaaaaaaaaaaaa

SEQ ID NO: 863 - DNA, 2368 bp, Homo sapiens
ccctgttaggtctggagctccccacagacactgatctcagtttcccccgagagtgtgagtgtaggcctctacaggcagctgcctctggggagttggggagcctaggggttaactctagacccccctcaaccctctggaccaaagtctgtccaggaaaataggatgccggagcccaggagtcgtcagcctagcagttgcctggcctccagatgcctcccagggtcaccttccagccctgtggatggcagtggaatcaggacactcccttgaacagtgaatacgattttgccctggtcaacattggacgattagaggctgtgagcggcttgtcccgagtccagctcctccgtccagggtccctgcataaatttatccctgaggagattctgattcatggccgagacttccggctgctcagagttggttttgaggctggaggcctagagcctcaggcttttcaggtgaccatggccattgtccaagccagagctcagagcaatcaagcccaacagtattcggggataaccctgagcaaggctggccagggttctggctccagaaaaccaccaattcctctcatggagacagcggaagactgggagactgagcggaagaagcaggcagccagaggctggagggtcagcacggtcaacgagaggttcgacgtagccaccagcctcccccgttacttctgggtccctaaccgaattctggacagtgaggtcaggagagcatttggccactttcatcagggccgtggaccgcgcttgtcctggcatcaccctgggggcagtgatcttctccgctgtggaggcttctatacagccagtgaccctaacaaggaggatatcagagcagtggagttgatgctccaggctgggcattcagatgttgtcctggtagacactatggatgagctgcccagccttgcagatgtccaacttgcccacctgaggctgagggccctctgcctgcctgattcatctgtagctgaggataaatggctttcagccctggaaggaacacgatggctggactatgtcagggcttgtcttcgaaaggccagtgacatttcagtattagtgacatccagggttcgttctgtaatacttcaagagcgcggtgatcgtgatctcaatggcctcctctcttcactcgtccagctgctttcagcccccgaagcccgaacactgtttggcttccaatcactagtacagcgagagtgggtggcagctggacatcccttcctgactcggcttgggggaactggggccagtgaagaggctccggtgtttctcctcttccttgattgtgtctggcagctcctccagcagtttccagctgattttgaattctctgagtttttccttcttgctcttcatgacagtgtcagggttcctgacacccttaccttcctgagaaataccccctgggagcgcggaaagcagagcggacagttaaactcctatacacaagtctacaccccaggatactcccagcctccagctgggaactcttttaacctgcagctgtctgtctgggactgggatttacgttatagcaatgcacagatactacaattccagaatcctggctatgacccagaacactgtccagattcctggctccctagaccacagccaagcttcatggttcctggaccccccagttctgtgtggctcttctctagaggagcattgacccccctgaatcagctctgtccttggcgggacagtccttccctgctggcagtctcttctcgttggctccctcgacctgctatctcctctgaaagcctggctgaccaggaatggggtctcccctcacattggggagcttgccctttacctccagggctgctgctgcctgggtatctgggaccccagatcaggctctggagacgctgctacctgaggggaaggcctgaggtccagatgggcctctcagctcccacaatctctggcctccaggatgagctatcccatcttcaggagttattacggaaatggacaccaagaatatctcctgaggatcactccaagaaaagagatccacataccattctcaatcccactgaaattgctggcattctcaaaggccaatcccatcccttctggataaccagatgttaaatcatgagatcagagatgctgttcatcagtcccaacaagatggcctagaaatcgcattctcacctcgccttgctgctgctttaattccaagttctatttcttcccttatagttttctatgggaatgaggcggatacaggaaacaccctatctcctctgtatttttgtagtggaatttctatttaaggggctcattaaagcatagtatttatacacaaaaaaaaaaaaaaaaaaaaa

SEQ ID NO: 864 - DNA, 4452 bp, Homo sapiens
ttattttccccggagagtcccgaggcgccgcgccttggccctgcctacagcccgaggccccgcccccggcgcccctcccagccgtttgaagcggctcgggctgcggctggctcagagtggcgcggggggcgtggggcggtgctgaggagctgaagccgtggccagctcgacgccggacagtccagcgagcagcacggcgggaaccggcagccggagcagtcccggagcagaagcagcagcagcagcagcagccctcgccgttcgcggagcgcagccgagccggccatggcgttgtcgatgccgctgaatgggctgaaggaggaggacaaagagcccctcatcgagctcttcgtcaaggctggcagtgatggtgaaagcataggaaactgccccttttcccagaggctcttcatgattctttggctcaaaggagttgtatttagtgtgacgactgttgacctgaaaaggaagccagcagacctgcagaacttggctcccgggacccacccaccatttataactttcaacagtgaagtcaaaacggatgtaaataagattgaggaatttcttgaagaagtcttatgccctcccaagtacttaaagctttcaccaaaacacccagaatcaaatactgctggaatggacatctttgccaaattctctgcatatatcaagaattcaaggccagaggctaatgaagcactggagaggggtctcctgaaaaccctgcagaaactggatgaatatctgaattctcctctccctgatgaaattgatgaaaatagtatggaggacataaagttttctacacgtaaatttctggatggcaatgaaatgacattagctgattgcaacctgctgcccaaactgcatattgtcaaggtggtggccaaaaaatatcgcaactttgatattccaaaagaaatgactggcatctggagatacctaactaatgcatacagtagggacgagttcaccaatacctgtcccagtgataaggaggttgaaatagcatatagtgatgtagccaaaagactcaccaagtaaaatcgcgtttgtaaaagagatgtcttcatgtcttcccctaagaatacgcttttcctaacaggctactccttcctgtagagcagaaattgtattttgcacgaacatgcagttattgaagattaggatcaaggatagacaaggtatagtagttatcttaaaatatacactcctaagcagtattattttaaaatcctttaccctggctacctcccctacccgggttcccctctctttaatttggagacactccaccacaaacttttcactttagaggtagcttgccatctctcaggagccctcaccattgtgtccattcactgtgtatagatggcagaacttttgaggtgcaatgtttaattgttaaaaatagtagccacgactttatcaggcagccccaaactggtgcataatgcatggtacaagaaatatttatgtattttttggaattttgtaatatttagtaagagtatatgaaaggattgctactgtatcagaaatattgtttcaatttagtctatcctggatatgtactaacgaatattaccaccagagaagagagctttctacaaaagtcactacagattttgctatattgctttgtagatagatttttacttttgcctaaaagcatttatccttcataccaattgtaacatctgacaccatgtagaagctaaaagtttagagggagtgagggttttctcaagaccttcctcaagcattttatctttagaagagaaactgatgggcacctgatactctgtctaaatacgtttgttatatgtgttttgccctgtgccattcatttggaactttattgcattctttattttaaaaagcttgtttttacgtaatcatagagcttgctatttgtacatctgttgagcaacactacataactgatttttagttgacttagctatagcagtacaatgattagtaatgtaaaaattaacacagaaattaacctaaggaatgaagggtgggtttgtcaaaatatcaagtaaatttttgtttctaaagtacatttaatgtagatgacctaaagaatgcgttatccatcctatataaaagaaagataaaacacaggtcaccaattttctcatttcaccccatttaccttgtatagaggattgttcattcctttgggactaagttatagttatggtgagtgtgtatttactgtagttttgcctgatctcactcattgcacttcctggagttaaattttccaacagccatgttgaggaatagcactctgcatgtttttgttttgtttttcggggttttttttaattgaagccctaaaccaggaattatttgtgttctaacaggaggatgaacttgctgaaaataaaactttgctatgtatttactcttttttaaaagacaaaagcaaaaccagactttctacgtactactccaaagactgtgattgtgactataatacatttttggtaatttttttatacctaatttgtataggaagtgctatttctcataggctgtttcttgaaattttaagtttattgctttaaaatggcagtgtttctcccactttgatatgctaacatttagtaagcactggctttatgaaagcggctttttataagtatactgcattttttgagcctatcattaattagcttagtatgaaagataagaaaatctccatgttgtatccatttggctcaggaagattctttgccttacctttcttagaactctttattgcttatcaaaagtttgagtacccgcttggtttttttttggtaattaaatattgtatgatttatctggttcaaggaagatgcactattcagttatctattgagaaattattttgcagtggttttagtgggtgaaaatgtcccatctgcaccagtacacaggcaggcattatcattcttcacctactttttaaatagtggcaacttgggattcattctggtgattctgaaccttgcctcatagcttaaagtataaaaaagattcaagagcagtgaggtttgttctttccagtgaatggtggactgagtggtgcgaggtggagggctaacaagaggaaagaactacattcttcagaatacagtgatgaaaattcattttgaaactcaaatattttcattttggatattctcctgtttttattaaaccagtgattacacctggccatccctctaaatgttctaggaaggcatgtctattgtgattttgatgaagacagaattatttttctctgtagaaacacagataccactttatcagggaagttagtcaaatgaaatggaaattggtaaatggacaaaagctagctagtaaaaaggacgacccagcaacatgctttaaccccattgtatgtttgtggaaagagcatagtttaacatcttgagaaatttgggacataaagttttcatggtagacagttcatgcagtatatgaattgccataatggaaataatctgattttatttttacaactaacatccattccccttcatttaaacaccttttgtgttttacttcagtgaggagattggagtctgaatggatctgttttccaagagattctgagaaatttttgtattcagcagttggaaagctctctattctagttgataaaacttcccttttttgatgtagatgcagatattctatacagttctgttgtcttttactaggactgtaaacttttgtgataaaattcaaataagattttatttcttggtaattttggctttcacaatttatctttaaatccttgagcaatctgtatacaattaagagatttctgacatttattcttacactaaatggatcaactctaggatttaggcatgttaacttctgttgtgttttgaatctctccagagttgcatgtagatagcatttatttctgtgcccttaaacccatttagaaaataactacaaagtaaaaatgtagaggaaatagaaatgtattttttcatgaacattttgatacaaatttcatcatttaatgattcaccaatttcttgcattaatttgaatttaagcatttaattcaaagagaggggagcatccattattgatacatgtgggcttttaaaaactccatcctttataaatagtcaaggtttgggccacacaaagtatatttttatcatggaaaaatttcaactcctcaagccgtaatgttgaacagaattggagtattttctttataatttcttgaacaggcaaatgaaagcttattatagaatgcatgtattttcttttatctttggaacatcagcaccagtatattgctggcagctattgtattaaaaaataaagtatattttcactatcataaaggattcttttttcccccctcatgaaaataaacaacaacttggggtaaaagtgaaaaaaaaaaaaaaaaaa

SEQ ID NO: 865 - DNA, 1421 bp, Homo sapiens
ccggcccggaagtgcgcaggcgctggcaagatggcgggaggggtgctcccgctgaggggcctccgcgccttgtgtcgcgtgctgctcttcctctcgcagttctgcattctgtcgggcggtgagcaatcgcaggcgctggctcagtcaataaaggatccgggcccaacacgcacattcacagtagttcccagggcagcagaaagtactgaaatcccaccttatgtgatgaagtgtccgagcaatggtttgtgtagcaggcttcctgcagactgtatagactgcacaacaaatttctcctgtacctatgggaagcctgtcacttttgactgtgcagtgaaaccatctgttacctgtgttgatcaagacttcaaatcccaaaagaacttcatcattaacatgacttgcagattttgctggcagcttcctgaaacagattacgagtgtaccaactccaccagctgcatgacggtgtcctgtcctcggcagcgctaccctgccaactgcacggtgcgggaccacgtccactgcttgggtaaccgtacttttcccaaaatgctatattgcaattggactggaggctataagtggtctacggctctggctctaagcatcaccctcggtgggtttggagcagaccgtttctacctgggccagtggcgggaaggcctcggcaagctcttcagcttcggtggcctgggaatatggacgctgatagacgtcctgctcattggagttggctatgttggaccagcagatggctctttgtacatttagctgtggtgtgtgcttcagaaaggagcagggcttagaaaaagcccttttgtccgtaggagttgatgtggtgtgagtgatatatttctatgtttttaatgtacagcatctgtactttgtttgccttgataaaggtaagataaatgaaacgctgaactatgctaatctggaatttgtttttatttgcctgaaatatatttttttctgtgaaaaaattaaaacgtacttaagccaggagaatgaattatacagtgattgaaaatccatttaattcctatgacttttgttttgtattgcccaagtcaaactacatcacttgtatctccagcccaaatgtagtctgccttgaaaagtctttcagctgtgactgcaggaagtgggagtgtttttattgttagctaattgctgtgactgcaggaagtgggagtgtttctgttgttggctaattgaagttattaggctcagcttcagtcatgtgtaagttttgcagtgtaatacatatgtagtctggtctgtatatatgaaaatttgaattaaactgcagaatgtttatgtctagttatggtttaaattttcttagtagtatataaaaggtaagagtactgaaaaattaataaaattgcaagttaagaaataaaaaaaaaaaaaaa

SEQ ID NO: 866 - DNA, 390 bp, Homo sapiens
atgtctggtcgcggcaaaggcggaaaaggcttggggaagggtggtgctaagcgccatcgtaaggtgctccgggataacatccagggcattacaaaaccggctattcgccgtttggctcggcgcggtggcgtcaagcgcatttccggtcttatctatgaggagactcgaggtgtgcttaaggttttcttagagaacgttattcgagacgccgtcacctatacggagcacgccaagcgcaaaactgtcacagccatggatgtagtatatgccctaaaacgtcaggggcgcactctgtatggcttcggcggctgaatctaagaatacgcggtctcctgagaacttcaaaaaacaaaaacaaaaaaacccaaaggcccttttcagggccgctca

SEQ ID NO: 867 - DNA, 3792 bp, Homo sapiens
cggcgatcccggcggagggggccgttcgccagctctgaggcagaaagtgccacgactccacacgcgcgcacgcagccagcgagcggccggagcggacggcagacggggcgggcggcgtcagggtcgcagcgtctacagctgctcgggggcggtttcttggcggaggcttggccggctcctctctcccggctccgcggcggctgcgaaggcggcggctcctgccctctcgctttccctctcgcgtctctggctgcagaaagaagcttccggttctgaggtcctggaggtgccatttccctctctgttgaagcaaaggccggggcagacctcctagtgaaaggaaagcaagccaggatggatatttacgacactcaaaccttgggggttgtggtctttggaggattcatggttgtttctgccattggcatcttcctggtgtcgactttctccatgaaggaaacgtcatatgaagaagccctagccaaccagcgcaaggagatggcgaaaactcaccaccagaaagtcgagaagaaaaagaaggagaaaacagtggagaagaaaggaaagaccaagaaaaaggaagagaaacctaatgggaagatacctgatcatgatccagcccccaatgtgactgtcctccttcgagaaccagtgcgggctcctgctgtggctgtggctccaaccccagtgcagccccccattatcgttgctcctgtcgccacagttccagccatgccccaggagaagctggcctcctcccccaaggacaaaaagaagaaggagaaaaaagtggcaaaagtggaaccagctgtcagctctgtagtgaattccatccaggttctcacttcgaaggctgccatcttggaaactgctcccaaggagggcagaaatacagatgtggcccagagcccagaggcaccaaagcaagaggctcctgccaagaagaagtctggttcaaagaaaaaagggcccccagatgccgacggccctctctacctcccctacaagacgctggtctccacggttgggagcatggtgttcaacgagggcgaggcccagcggctcatcgagatcctgtctgagaaggctggcatcattcaggacacctggcacaaggccactcagaagggtgaccctgtggcgattctgaaacgccagctggaagagaaggaaaaactgctggccacagaacaggaagatgcggctgtcgccaagagcaaactgagggagctcaacaaggagatggcagcagaaaaggccaaagcagcagccggggaggccaaagtgaaaaagcagctggtggcccgggagcaggagatcacggctgtgcaggcacgcatgcaggccagctaccgggagcacgtgaaggaggtgcagcagctgcagggcaagatccggactcttcaggagcagctggagaatggccccaacacgcagctggcccgcctgcagcaggagaactccatcctgcgggatgccttgaaccaggccacgagccaggtggagagcaagcagaacgcagagctggccaagcttcggcaggagctcagcaaggtcagcaaagagctggtggagaagtcagaggctgtgcggcaagatgagcagcagcggaaagctctggaagccaaggcagctgccttcgagaagcaggtcctgcagctgcaggcgtcccacagggagagtgaggaggccctgcagaagcgcctggacgaggtcagccgggagctgtgccacacgcagagcagccacgccagcctccgggcggatgccgagaaggcccaggagcaacagcagcagatggccgagctgcacagcaagttacagtcctccgaggcggaggtgcgcagcaaatgcgaggagctgagtggcctccacgggcagctccaggaggccagggcggagaactcccagctcacagagagaatccgttccattgaggccctgctggaggcgggccaggcgcgggatgcccaggacgtccaggccagccaggcggaggctgaccagcagcagactcgcctcaaggagctggagtcccaggtgtcgggtctggagaaggaggccatcgagctcagggaggccgtcgagcagcagaaagtgaagaacaatgacctccgggagaagaactggaaggccatggaggcactggccacggccgagcaggcctgcaaggagaagctgcactccctgacccaggccaaggaggaatcggagaagcagctctgtctgattgaggcgcagaccatggaggccctgctggctctgctcccagaactctctgtcttggcacaacagaattacaccgagtggctgcaggatctcaaagagaaaggccccacgctgctgaagcacccgccagctcccgcggagccctcctcggacctggcctccaagttgagggaggccgaggagacgcagagcacactgcaggccgagtgtgaccagtaccgcagcatcctggcggagacggagggcatgctcagagacctgcagaagagcgtggaggaggaggagcaggtgtggagggccaaggtgggcgccgcagaggaggagctccagaagtcccgggtcacagtgaagcatctcgaagagattgtagagaagctaaaaggagaacttgaaagttcggaccaggtgagggagcacacgtcgcatttggaggcagagctggaaaagcacatggcggccgccagcgccgagtgccagaactacgccaaggaggtggcagggctgaggcaacttctcctagaatctcaatctcagctcgatgccgccaagagcgaagcccagaaacagagcgatgagcttgccctggtcaggcagcagttgagtgaaatgaagagccacgtagaggatggtgacatagctggggccccagcttcctccccagaggcgcccccagccgagcaggaccccgttcagctgaagacgcagctggagtggacagaagccatcctggaggatgagcagacacagcggcagaagctcacggccgagtttgaggaggctcagacctcggcatgtcggttacaagaagaattggagaagctccgcacagccggccccctagagtcttcagaaacagaggaggcctcacagctgaaggagagactagaaaaagagaagaagttaacaagtgacctggggcgcgccgccacgagactgcaggagcttctgaagacgacccaggagcagctggcaagggagaaggacacggtgaagaagctgcaggaacagctggaaaaggcagaggacggcagcagctcaaaggagggcacctctgtctgagtttcctctttggaaaaagaagttactgttcaacttaccaaaatgccttacacattccttacaaataaaccaaccaacctacacagcgttatccaggcccaacttccggtagctccgagagaagccatgagagacaagtctcttagagccacagaagtagaccttccagagccccagtttgtaaatgaacctgtgtcacatttgataaacactatcctgggcgcagccccgggccaccgccgagtgacgccaaagccctggttgactctgacagccccgtgggtgtgtgggaggccgggcgctctggggtctgtctgtcagtgcaatcgtttagtgttttttcagtggggcggggcgggaagcgggtgggaccgggcagccagttctcaaaggctgtggggccgactggaggccacagcccctcacccctagacgttgccaaccagaactgacgtgtgacctcctgggtgttgatgccattaaaaccaacgttggtgcccggtg

SEQ ID NO: 868 - DNA, 4884 bp, Homo sapiens
aggtgtcttgggcccgggcggctgtagaggcggcggcgcctacgggcagtgggaggagccgcgcggttccggctgctccggcgaggcgacccttgggtcggcgctgcgggcgaggtgggcaggtaggtgggcggacggccgcggttctccggcaagcgcaggcggcggagtcccccacggcgcccgaagcgcccccccgcacccccggcctccagcgttgaggcgggggagtgaggagatgccgacccagagggacagcagcaccatgtcccacacggtcgcaggcggcggcagcggggaccattcccaccaggtccgggtgaaagcctactaccgcggggatatcatgataacacattttgaaccttccatctcctttgagggcctttgcaatgaggttcgagacatgtgttcttttgacaacgaacagctcttcaccatgaaatggatagatgaggaaggagacccgtgtacagtatcatctcagttggagttagaagaagcctttagactttatgagctaaacaaggattctgaactcttgattcatgtgttcccttgtgtaccagaacgtcctgggatgccttgtccaggagaagataaatccatctaccgtagaggtgcacgccgctggagaaagctttattgtgccaatggccacactttccaagccaagcgtttcaacaggcgtgctcactgtgccatctgcacagaccgaatatggggacttggacgccaaggatataagtgcatcaactgcaaactcttggttcataagaagtgccataaactcgtcacaattgaatgtgggcggcattctttgccacaggaaccagtgatgcccatggatcagtcatccatgcattctgaccatgcacagacagtaattccatataatccttcaagtcatgagagtttggatcaagttggtgaagaaaaagaggcaatgaacaccagggaaagtggcaaagcttcatccagtctaggtcttcaggattttgatttgctccgggtaataggaagaggaagttatgccaaagtactgttggttcgattaaaaaaaacagatcgtatttatgcaatgaaagttgtgaaaaaagagcttgttaatgatgatgaggatattgattgggtacagacagagaagcatgtgtttgagcaggcatccaatcatcctttccttgttgggctgcattcttgctttcagacagaaagcagattgttctttgttatagagtatgtaaatggaggagacctaatgtttcatatgcagcgacaaagaaaacttcctgaagaacatgccagattttactctgcagaaatcagtctagcattaaattatcttcatgagcgagggataatttatagagatttgaaactggacaatgtattactggactctgaaggccacattaaactcactgactacggcatgtgtaaggaaggattacggccaggagatacaaccagcactttctgtggtactcctaattacattgctcctgaaattttaagaggagaagattatggtttcagtgttgactggtgggctcttggagtgctcatgtttgagatgatggcaggaaggtctccatttgatattgttgggagctccgataaccctgaccagaacacagaggattatctcttccaagttattttggaaaaacaaattcgcataccacgttctctgtctgtaaaagctgcaagtgttctgaagagttttcttaataaggaccctaaggaacgattgggttgtcatcctcaaacaggatttgctgatattcagggacacccgttcttccgaaatgttgattgggatatgatggagcaaaaacaggtggtacctccctttaaaccaaatatttctggggaatttggtttggacaactttgattctcagtttactaatgaacctgtccagctcactccagatgacgatgacattgtgaggaagattgatcagtctgaatttgaaggttttgagtatatcaatcctcttttgatgtctgcagaagaatgtgtctgatcctcatttttcaaccatgtattctactcatgttgccatttaatgcatggataaacttgctgcaagcctggatacaattaaccattttatatttgccacctacaaaaaaacacccaatatcttctcttgtagactatatgaatcaattattacatctgttttactatgaaaaaaaaattaatactactagcttccagacaatcatgtcaaaatttagttgaactggtttttcagtttttaaaaggcctacagatgagtaatgaagttatcttttttgtttaaaaaaaaaaaaaacactgcattaaaaaagtatctgttgcattaaggcacatagtgggattacatcataaacctcccataatttttgtcattctgtgttaaatcatttcagggtttaattttgaaataaaagattaatataaaatgcaacaactttttatattacctattagttttggagttctttatgtttaaaaattcaggtgtaaattttattgccttggataaataaattattgatcttttttaaggcagcagttattaaattggtaatagaagatgctgcttgcttagaattgggaaattcggctgggtgcagtgactcaatgcctgtgatcccagtactttgggaggttgaggcgggcagatcacttgaggtcaggagtttgagattggcctggtcaacatggtgaaatcctgtctctactaaaaatacaaaaattagctgggcatggtggcacatacctgtaatcccagctactcgggaggctgaaacaggagaatcgcttgaacccaggagatggagttggcagtgagccaagattagcctgggcaacagtgagtgagactcggtctcaaacaaaaaccaaattgggaaattcttcttgagttaaaaaagacactttttattatgaatcagattccaaatcattaactatttttgcaaaactggcacaagtggtttttctttttaagtatattaacagggtagctcctgagcctttccctttattggaaactttaactgcagtgttaatatatacactgcaaaagaccaaggatgcagttgaatggaaaattactcagtgtatagaaaggaaaaaaaccagaaatttaaaatagatacagaaaagtacactggtaatatttttatttcctattggagagtgaatccccacagttgctttttgtgacttgattcaaatgaggcactcattattgttaccaaacttgtaaaagcattccatgtattcagtggaggcagaatgtataatattttttccttataatttagcatacaggaaaagtatttattttttaagtagggtatcttaattatgctcatttcttcccctaaaccacattatctatatgattggaccctttagtgaaatcagaaaaataaagtaggcatgaataaatgttcaggacacacacatacactcacacacatcacagtatcagctctttcagtgagtttttattaactagataacacatgtaatacatagtagaatacatttcagaggcagagttcctcggattattttttatggatattagtgttcagcagcttattatttaaaggggtgccaaatatagcatccttctgttgtttattttaaatatatttttaatgaaaagggacttaaaaagtaaacatgattatctaaattacttaaaattttttaatcttagtaaaaattttaggaaagttatctagtttaaatttcaaatgttttaaaatttgtaggcatttaataaattatctttttttggaggggtggatgctgcatttcattggaaatgtcatttttccaaagtttctagctatatactctctttccttcaaataacataagtctgaaagcaatgaaaacgtcaaaggaaaatgtttatatacatccacatgtttatttaatatgtttctcttaacacctgaaacttgttttaaaacaaaaagcagtattcacttcaaatcataaacttagaattctgtatctcatgtcagaaatatgtttatggccttgcttttaagtggtgctgtttcccatagggcattagttctcagattttggaatgtgaaataatcacctaggaagttggtttaaaatgcacactagtgagcccaccttagacttcttttggggccttcgacctcactttgagaaataccttcttcaggttattctttatgtttgtcctgtggttaaatattagagtattcatgataaaacattttgagaaggggtaagcagtgagttattacccacaatttaaagcaaattttgaatgaatctttaagttaggtatctaccttcccaccagccccccaaaaaacctctcagtagtttctttcagtgtacaaaatgatgagcatttttctatgatgaggttttaaccattattcagggtggtcttttgtttttaaatctttttttaactaataagatttacggtgtgtattttatacagaaatgcattataaatgtttttaattgtgttctgttttttgcagtctttaagtgccatgccaattgttcttatattctatagaagttcgctcaaaatactcaacaggggaataggcagcggacagtcagaatggttggaattttggctttctaagaaaaactttattttgcataagcatgtggtcagatcattttgtgcatatgcagcctggattggatgttaagtaaatgcttgttcagtgccggtacatttacttaaatctgtttttatttttgtcatgtagaatactactgtggtcatcataatgtaatctatttctgtaccttttttttttttttttactttgaagtctttaaataaaatgtataatacccattgag

SEQ ID NO: 869 - DNA, 3870 bp, Homo sapiens
gagcgccgggaccgcggcggcggggccgcggcgcgcattgcggagggcgcggagcgcaggagctgccgcctgccgggcagatccaagggggcagcacgcttcccgggagcgcccccgcctcctctccggggccgccgcaggctcggtgagcggttttatccctccggccggcaggctgggcgcgcaggggcgcgagcccccgcccggcgcgcagcagcaccatgggcacggtgctgtccctgtctcccagctaccggaaggccacgctgtttgaggatggcgcggccaccgtgggccactatacggccgtacagaacagcaagaacgccaaggacaagaacctgaagcgccactccatcatctccgtgctgccttggaagagaatcgtggccgtgtcggccaagaagaagaactccaagaaggtgcagcccaacagcagctaccagaacaacatcacgcacctcaacaatgagaacctgaagaagtcgctgtcgtgcgccaacctgtccacattcgcccagcccccaccggcccagccgcctgcacccccggccagccagctctcgggttcccagaccgggggctcctcctcagtcaagaaagcccctcaccctgccgtcacctccgcagggacgcccaaacgggtcatcgtccaggcgtccaccagtgagctgcttcgctgcctgggtgagtttctctgccgccggtgctaccgcctgaagcacctgtcccccacggaccccgtgctctggctgcgcagcgtggaccgctcgctgcttctgcagggctggcaggaccagggcttcatcacgccggccaacgtggtcttcctctacatgctctgcagggatgttatctcctccgaggtgggctcggatcacgagctccaggccgtcctgctgacatgcctgtacctctcctactcctacatgggcaacgagatctcctacccgctcaagcccttcctggtggagagctgcaaggaggccttttgggaccgttgcctctctgtcatcaacctcatgagctcaaagatgctgcagataaatgccgacccacactacttcacacaggtcttctccgacctgaagaacgagagcggccaggaggacaagaagcggctcctcctaggcctggatcggtgagcactgtagcctgcgtcatggctcaaggattcaatgcatttttaagaatttattattaaatcagttttgtgtacagtatgtgtctagcaaagccaccaagggcctcacctttcccacagtctctccctggggtttttttcatccctgccaagaactctgggcacttttgaactcacgagccttgcgcaaaacccagaagatgtattcagagccacccaggccactgacctcccactttggggaactcaaaggactgacctgcccctgccgcctgtgcccttgctgggtccagggtaggcaaggctgccggctgcaccctgtatggagctagagaggggcctctggctgcctggcccagggaggaattggggtttctggttggaggcccttttctggctcctgtgtggagttattcactctcccagaggctcctggagccagccaccctaactgagctgccagtggggtcgtgaggcaagatccccgccacccggggacatcttcaatctaggcgaggcgaagctgagcgggtctagtggaaagattgtgtctggtcgtttgaccacacaccgccctgatttgctgttttctttttttagggagaagggcttttctttagtggagaaatggaactcgcccccctacccccttgtctgctgctcccagccacgttggtggtattggccgatgagctggtttgactcattaatttctctcaatttgggtcccagctaaagaggtggggtgaagctggggacagctttcctgggtgagtttttcttttgaataatgtagtgcagtcaccctgtggcaaatgccaggacagctgcaggtgcccattagcaacgcctgccttctgggcaaggtgagggatgccataccttgagaccaagccggtgcccacctaagggctaaggcctcttgctggtgcacatgacatttgtcctgcagagctggggggaaggcgatgtggtgaccccacccccacccgttaatttaaagctgtttctaaacagttgagtttcttctaaagaggaagccttgcccagcaaggaccagtgagacagccggatcttggagacaattacaagacggggagtgagactcctgattgctctggaagcctgctgatttctacaactgatcatttgcagctgctggttttggtttccaccttaccctactggctgtaaaaacacaaatgtgtactttattgattttctttctaattctcccgcattggtggcttgggacttgggagagggagcaagccttcctccatggcccatcactcggctgtggagaacaaagaccaatgtgaagacactacagaggattctgtcttccaggcccagtccactggggagtgctggaatggggacctggggtggggaggcagagggtcactttacataggattaagttcgaggtggctaccgatttcagcacatgcactactgaaatttacacaaaaagaaagctgtgaaattgaagtcccaatttaagagtcctgaggcagaacctggtggctggaggcattcccagaggtggggaagagagcctgcccggccggagaacatctgccttgctgcacctgaggcccagcagagccgttcctgggactgtcagataatcggtgcagcggtggaaggagcctgcggctgctggcacagacttcacacagcacctcctctctgctgggtttccacacagcctgtcttcagatcctgctgccgcgtgcgaccagaggtgggaggcccctggtggcatggaagagggagggtcagtgccaagtctcaggaggagggcgcatgtgtgtatcaccctcagctggcggaacctggctgcgaactgtgcagttacgttgcatccacaggattccagttgcgtgtctgtttccttctctttctccgtatttatttttttattcttcggaggaggtggacatttcggaagtggtggggactaagggaagaactctctagttccctcagtgtgaagcctgtcgtgttctctccccttgcactggtcatcagtattgtgtaaaggaacaactgatatacttgagtgtgcaagcaaagaacccatttgccatgctgctatgaagactacttttagatcaacaataaaaaaaaacctacaaaaaaacctttattctttaattgttgcttttacggtgatattgtgcatgcaaaccaggagcattttgtgtcttaagaaaaataatcttagaacagatggctgtgaaaattacacccatgcacagaacaagccacaggaataatagttcaggatttggtttttctctttttcttgtaaacctggagggttgatatattctttccatgcagttattagaacttagttttgttccaacagttaaacttgcaatgaaaagaaaatgtgccatttttttcactcagaattattcatagctgtatatttgaaactgctaattacacacgtgtgatgtatgttggttttttagtgcaatttcttctgtagctattctttgaccaaactgtgggtattgttaatattaatttatatttgtctcattttgtatgtatgtgtagtgtgtttgtgagtatgtgtggtttataatctgacaaagtcatgaagctcagtttggctgtaatttaattccccttcccttatttttatttatttttgtactgtgctgattcaataaaatgcactgaccatccaaaaaaaaaaaaaaaaa

SEQ ID NO: 870 - DNA, 1282 bp, Homo sapiens
ggcgggccgaagcgaggtgcggctccctgtcgccgcggaggggcgggggcaggacgcgcaactccggccggagctgtccggggtcgtgagccggccccgccttggtggcggcgccccctcgcggtccagaggcagacgcatcgggtgggctcgggtctccagcccggccgggaggagggaccgggtctgcggagcggggactcggggcctcggcggggcgcgcacacgcaggcggggcggcccggggtgcggggcctctgcgcggctgaccaggctcccagagcgtcagcgccgcccatggccgagccgctccagccagaccccggggcggccgaggacgcggcggcccaagctgtggagacgccgggctggaaggccccggaggacgccggcccccagcccggaagttatgagatccgacactatggaccagccaagtgggtcagcacgtccgtggagtctatggactgggattcagccatccagacgggctttacgaaactgaacagctacattcaaggcaaaaacgagaaagagatgaaaataaagatgacagctccagtgacaagctacgtggagcctggttcaggtccttttagtgagtctaccattaccatttccctgtatattccctctgaacagcaatttgatccacccaggcctttagagtcagatgtcttcattgaagatagagccgaaatgactgtgtttgtacggtctttcgatggattttctagtgcccaaaagaatcaagaacaacttttgacattagcaagcattttaagggaagatggaaaagttttcgatgagaaggtttactacactgcaggctacaacagtcctgtcaaattgcttaatagaaataatgaagtgtggttgattcaaaaaaatgaacccaccaaagaaaacgaatgagaaaaatgaaaggaagttctgctgtcagaggcaaaacatctgtttatcatagacatcaacatgacctataagtaaagtgcgtgtctagtgtcttctattgagagtactactattaattaagcttatttccaatgtgcctttttaatgcttgaagttttatctacatacacaggtaacagaggacagtagtctgtaaacatataaatcggtcataactatcgtggtctttatttctgtgaggatctagggaaatttcatgtcacttccctccttcactgcatcacaatcatattcccttttttttttcttggatttgtgtcagttggatgatatcccctccagatagtatcaataaaatgttaaaatt

SEQ ID NO: 871 - DNA, 3618 bp, Homo sapiens
gctttctccgcgccgccaaacccgttttcttcctggtggcgtttgggcttaatacagctttggcgaggtcggatgacgggtgggagccagcggtggaaggggtggcgaaagtaccggtttgccccaggccgccgaggggcctccttagagagaccttgcctgctccgctcgcgtccgccggggccgcgcgggtcctcctggcgccgccaggttcaaaaagccactcgagttgtcactgcgacggccctgggccaggagccgtttcgggatctgtcaaacaacgagttttcgtcgttcgaatcaggttgactggtccttcatccccccaatctcccgtacctggcgagtccagctcgtcgcggcaatgctaagaaaagagtgatatgcaagctgagaccaaaaatatggtatgatttagccatactgaaggggaaggaaataagagctgggcaaagcattctgtgaattggctgactccacttctatggtgagagagaggagtgcatcaaagattactcccagtagagatggtttcagcatgttggccagtctggtctcagactcctgacctcaagtgatccacccacctcggcctcccaaaatgctgggattacaggtataagccactgtgcctggccaaagataccgttaaccctggataaagagaatggaggttacctctgtccgtgtagattcctaagctgtcctggagtgatccttggagtaaaggaaaggtgctttgaagcacattcagccatcagccctgtgggatggcagccactgatttgtcctatggtctttacagggacccagtctgccttcaagaaaagacagaagtagaaagggtggtggctgactgtctgacaaattgttatcaggtatgcaggaagtatatccttctccaaaatatcatacttgcatcaccaggtagacacatttccttctacacagaattatcttcagagcttcttaaagcaaataaagcctgcttcaaggactgagtccctagtcgaattcccggaaggagtggagcctgtcatattgtgtttatctagcatctgctcaagagtgtgctgcagtggagggaaatcagatgacctcccagtctggttgtgttacatacaatcatgtgtaagaagtgccattcaagccgtgtcactggaggggactgacagtgagattcagtgacttttgatgatctggctgtggacttcaccccagaagaatggactttactggacccaactcagagaaacctctacagagatgtgatgctggagaactacaagaatttggccacagtaggatatcagctcttcaaacccagtctgatctcttggctggaacaagaagagtctaggacagtgcagagaggtgatttccaagcttcagaatggaaagtgcaacttaaaaccaaagagttagcccttcagcaggatgttttgggggagccaacctccagtgggattcaaatgataggaagccacaacggaggggaggtcagtgatgttaagcaatgtggagatgtctccagtgaacactcatgccttaagacacatgtgagaactcaaaatagtgagaacacatttgagtgttatctgtatggagtagacttccttactctgcacaagaaaacctctactggagagcaacgttctgtatttagtcagtgtggaaaagccttcagcctgaacccagatgttgtttgccagagaacgtgcacaggagagaaagcttttgattgcagtgactctgggaaatccttcattaatcattcacaccttcagggacatttaagaactcacaatggagaaagtctccatgaatggaaggaatgtgggagaggctttattcactccacagaccttgctgtgcgtatacaaactcacaggtcagaaaaaccctacaaatgtaaggaatgtggaaaaggatttagatattctgcataccttaatattcacatgggaacccacactggagacaatccctatgagtgtaaggagtgtgggaaagccttcaccaggtcttgtcaacttactcagcacagaaaaactcacactggagagaaaccttataaatgtaaggattgtgggagagccttcactgtttcctcttgcttaagtcaacatatgaaaatccatgtgggtgagaagccttatgaatgcaaggaatgtgggatagccttcactagatcttctcaacttactgaacatttaaaaactcacactgcaaaggatccctttgaatgtaagatatgtggaaaatcctttagaaattcctcatgcctcagtgatcactttcgaattcacactggaataaaaccctataaatgtaaggattgtgggaaagccttcactcagaactcagaccttactaagcatgcacgaactcacagtggagagaggccctatgaatgtaaggaatgtggaaaggcctttgccagatcctctcgccttagtgaacatacaagaactcacactggagagaagccttttgaatgtgtcaaatgtgggaaagcctttgctatttcttcaaatcttagtggacatttgagaattcacactggagagaagccctttgagtgcctggaatgtggtaaagcatttacgcattcctccagtcttaataatcacatgcggacccacagcgccaaaaaaccattcacgtgtatggaatgtggcaaagcttttaagtttcccacgtgtgttaaccttcacatgcggatccacactggagaaaaaccctacaaatgtaaacagtgtgggaaatccttcagttactccaattcgtttcagttacatgaacgaactcacactggagagaaaccctatgaatgtaaggagtgcgggaaagccttcagttcttccagttcctttcgaaatcatgaaagaaggcatgcggatgagagactgtcagcataaggaatgtgggaaaacctaaaggtgtccctgttctctctgaagacatgaaaactcactggggagaaaccctatgaatgtaaaaatgtggaagcaactttgtatctcaggtcttaatgaacacatatgaattcacagtggagaagaccctgcatcagggaatgtggaaatgactttgctgaattctcaagccttaccaaacacatcagaaatctcactggagagaaactgtatgaatgtagagaatctgggaatacctttctgaatcccacaaaccttaatgtgtgtatgtgaactcacattggagagaaaccctgcaatttaaatggtatggtctggatgatgccccactccatatttgtaagccctaagtcctagttccttacactataactgtatttggacatagggttttcaaacaggtgagtaacttcaaatgaggttgttgggttcgatccctaatctgacatcactggtgtccctataagggaaactgaaggaaggatacacatggagaagactgtgtggatccaccagaagatggccatctacaagccaaggacagagacctggaacagatgctttcattatggcctccagaggaaaccaaccctgtctccaccttgatattgcacttccaggctccagaactgtgaggcaataaatttctcttggttaaatcaaaaaaaaaaaaaaaaaa

SEQ ID NO: 872 - DNA, 4241 bp, Homo sapiens
gggatccggcgccttccccggctgtcctcggcctcccgcgcgctccgcgggaggagccgccagcggccgtgacgcgtcaaggaggaaacgccggcgcccggcggccctgccgggaaggaggaagcgcagtgcgttcggctccgcgcccgccgcgccgggagcagcaccgcggggccaggttgcatgatggaatttgaacattacttcaagaggttttgtattttggattagttaattgggtttgtcctctgctgactgtttcttcggatgcattttttggtgtgctcttgagggattaaatgcaaagagatcacaccatggactacaaggaaagctgcccaagtgtaagcattcccagctccgatgaacacagagagaaaaagaagaggtttactgtttataaagttctggtttcagtgggaagaagtgaatggtttgtcttcaggagatatgcagagtttgataaactttataacactttaaaaaaacagtttcctgctatggccctgaagattcctgccaagagaatatttggtgataattttgatccagattttattaaacaaagacgagcaggactaaacgaattcattcagaacctagttaggtatccagaactttataaccatccagatgtcagagcattccttcaaatggacagtccaaaacaccagtcagatccatctgaagatgaggatgaaagaagttctcagaagctacactctacctcacagaacatcaacctgggaccgtctggaaatcctcatgccaaaccaactgactttgatttcttaaaagttattggaaaaggcagctttggcaaggttcttcttgcaaaacggaaactggatggaaaattttatgctgtcaaagtgttacagaaaaaaatagttctcaacagaaaagagcaaaaacatattatggctgaacgtaatgtgctcttgaaaaatgtgaaacatccgtttttggttggattgcattattccttccaaacaactgaaaagctttattttgttctggattttgttaatggaggggagctttttttccacttacaaagagaacggtcctttcctgagcacagagctaggttttacgctgctgaaattgctagtgcattgggttacttacattccatcaaaatagtatacagagacttgaaaccagaaaatattcttttggattcagtaggacatgttgtcttaacagattttgggctttgtaaagaaggaattgctatttctgacaccactaccacattttgtgggacaccagagtatcttgcacctgaagtaattagaaaacagccctatgacaatactgtagattggtggtgccttggggctgttctgtatgaaatgctgtatggattgcctcctttttattgccgagatgttgctgaaatgtatgacaatatccttcacaaacccctaagtttgaggccaggagtgagtcttacagcctggtccattctggaagaactcctagaaaaagacaggcaaaatcgacttggtgccaaggaagactttcttgaaattcagaatcatcctttttttgaatcactcagctgggctgaccttgtacaaaagaagattccaccaccatttaatcctaatgtggctggaccagatgatatcagaaactttgacacagcatttacagaagaaacagttccatattctgtgtgtgtatcttctgactattctatagtgaatgccagtgtattggaggcagatgatgcattcgttggtttctcttatgcacctccttcagaagacttatttttgtgagcagtttgccattcagaaaccattgagcaaaataagtctatagatgggactgaaacttctatttgtgtgaatatattcaaatatgtataactagtgcctcatttttatatgtaatgatgaaaactatgaaaaaatgtattttcttctatgtgcaagaaaaatagggcatttcaaagagctgttttgattaaaatttatattcttgtttaataagcttatttttaaacaatttaaaagctattattcttagcattaacctatttttaaagaaaccttttttgctattgactgttttttccctctaagtttacactaacatctacccaagatagactgttttttaacagtcaatttcagttcagctaacatatattaatacctttgtaactctttgctatggcttttgttatcacaccaaaactatgcaattggtacatggttgtttaagaagaaaccgtatttttccatgataaatcactgtttgaaatatttggttcatggtatgatcgaaatgtaaaagcataattaacacattggctgctagttaacaattggaataactttattctgcagatcatttaagaagtaacaggccgggcgcggtggctcacgcctgtaatcccagcactttgggaggctgaggcgggcagatcacctgaggtcaggagttggagaccagcctgaccaacatggacaaaccccgtctctactaaaaatacaaaattggcagggtgtggtggcacatgcctataatcccagctacttgggaggctaaggcaggagaatcgcttgaacccgggaggcggaggttgcagtgagccgagatcgcaccattgcactcctgcctgggcaacaagagtgaaactccatctccaaaaaaaaaaagaaaaagtaacaaaaggaaattatttgtttttgaaataccagttcaactttgtggattatttttcctctgaaggaaaagaaaaggcttaatggttaggatttttaagtattcccaaagatctgaagggtaataaaatgtactggattttttaaggtggtaccaaaaatgaatgtctgtcatatatttatattacaaatacattatatttatgttctattcatcttttgaatgtttagtatgctattaagtcattctgaatctttgtatttgcttttgcaaataggtatttcaaagctcttttcctaactggttaagtaaaataaaaaattgagctttctagaatatttgcctaattgggaattaaaaagtaaaataataggccaggcatggtggctcatgcctataagcaccctgggaggccgaggcaggcagattatttgagctcaggagtttgagaccatcctgggcaacatggcgaaaccctatctctacaaaaaatacaaaaattagccagacatggtggcacatgcctttagtcccagctactctggaggctgaagttggaggatggcttgagcccacgagatggaagttgcagtgaactgaaattgtgccactgcacttttcagcctgggtgccacagcgagaccctagttaagagaaaaaaaaagtaaaaacaaattgtgggtcaaagtaaatgtatacagttttattacaatgtaacaaaagttgaaaatcaggcagatgtgtattcagtatccaattcaatatatcttagaaaaagcacaggaaacagaccttaaaattgtaacctaccaactaacttacatgcttataaaagtaaaggagaataactggccgggcacggtggctcatgcctataaaattccagcactttgggaggccaaggcaggaggatcacttgagcctatgagttcaagaccagcctaggcaatgtagtgacacctcatttctatttattttaaaaaaaagagagagtaactacagaagaactttaaaaaataaaaaataagcttaccttggattcttggcttagagtagaggttttttttaagttatggaggaaacatttttgtaaaagtttaatgacccactttagatgctccaagaacaagcatcccttccatgtatgtcttgagaaagaaatcacagaagcatttctcaccaatactctttggcttaaaatgttcagcagaattgggcagtgggggtgacttttcttatattaataatatttacatccaatacactgaatcttcctttagaggtaagactttaatatctatactgtaaatatttggtttatttggcactactgtaagttttgtttttcacaaagctcttattatgaagcaaaataaaaattctagtttcttgtatgattttttgtactcattcattcctgttaagctgccaaaaattaaagtgcaatattgtatatttttaagaacaaatttaaaatagaattttgatgtttctcagatcacaagaaatacaaatctatatagtataataaaatcagcaaaaagatcaaaaaaaaaaaa

SEQ ID NO: 873 - DNA, 1409 bp, Homo sapiens
cgacttcctctttccagtgcatttaaggcgcagcctggaagtgccagggagcactggaggccacccagtcatgggggacaccttcatccgtcacatcgccctgctgggctttgagaagcgcttcgtacccagccagcactatgtgtacatgttcctggtgaaatggcaggacctgtcggagaaggtggtctaccggcgcttcaccgagatctacgagttccataaaaccttaaaagaaatgttccctattgaggcaggggcgatcaatccagagaacaggatcatcccccacctcccagctcccaagtggtttgacgggcagcgggccgccgagaaccgccagggcacacttaccgagtactgcggcacgctcatgagcctgcccaccaagatctcccgctgtccccacctcctcgacttcttcaaggtgcgccctgatgacctcaagctccccacggacaaccagacaaaaaagccagagacatacttgatgcccaaagatggcaagagtaccgcgacagacatcaccggccccatcatcctgcagacgtaccgcgccattgccaactacgagaagacctcgggctccgagatggctctgtccacgggggacgtggtggaggtcgtagagaagagcgagagcggttggtggttctgtcagatgaaagcaaagcgaggctggatcccagcgtccttcctcgagcccctggacagtcctgacgagacggaagaccctgagcccaactatgcaggtgagccatacgtcgccatcaaggcctacactgctgtggagggggacgaggtgtccctgctcgagggtgaagctgttgaggtcattcacaagctcctggacggctggtgggtcatcaggaaagacgacgtcacaggctacttcccgtccatgtacctgcaaaagtcagggcaagacgtgtcccaggcccaacgccagatcaagcggggggcgccgccccgcaggtcgtccatccgcaacgcgcacagcatccaccagcggtcgcggaagcgcctcagccaggacgcctatcgccgcaacagcgtccgttttctgcagcagcgacgccgccaggcgcggccgggaccgcagagccccgggagcccgctcgaggaggagcggcagacgcagcgctctaaaccgcagccggcggtgcccccgcggccgagcgccgacctcatcctgaaccgctgcagcgagagcaccaagcggaagctggcgtctgccgtctgaggctggagcgcagtccccagctagcgtctcggcccttgccgccccgtgcctgtacatacgtgttctatagagcctggcgtctggacgccgagggcagccccgacccctgtccagcgcggctcccgccaccctcaataaatgttgcttggagtggaaaaaaaaaaaa

SEQ ID NO: 874 - DNA, 1526 bp, Homo sapiens
gcatctgcgcaggcgcccggctcctaagtctacccaggaactgaccctgctctctcctttccctgttagacatgggcactccacagaaggatgttattatcaagtcagatgcaccggacactttgttattggagaaacatgcagattatatcgcatcctatggctcaaagaaagatgattatgaatactgtatgtctgagtatttgagaatgagtggcatctattggggtctgacagtaatggatctcatgggacaacttcatcgcatgaatagagaagagattctggcatttattaagtcttgccaacatgaatgtggtggaataagtgctagtatcggacatgatcctcatcttttatacactcttagtgctgtccagattcttacgctgtatgacagtattaatgttattgacgtaaataaagttgtggaatatgttaaaggtctacagaaagaagatggttcttttgctggagatatttggggagaaattgacacaagattctctttttgtgcggtggcaactttggctttgttggggaagcttgatgctattaatgtggaaaaggcaatcgaatttgttttatcctgtatgaactttgacggtggatttggttgcagaccaggttctgaatcccatgctgggcagatctattgttgcacaggatttctggctattacaagtcagttgcatcaagtaaattctgatttacttggctggtggctttgtgaacgacaattaccctcaggcgggctcaatggaaggccggagaagttaccagatgtatgctactcatggtgggtcctggcttccctaaagataattggaagacttcattggattgatagagagaaactgcgtaatttcattttagcatgtcaagatgaagaaacggggggatttgcagacaggccaggagatatggtggatccttttcataccttatttggaattgctggattgtcacttttgggagaagaacagattaaacctgttaatcctgtcttttgcatgcctgaagaagtgcttcagagagtgaatgttcagcctgagctagtgagctagattcattgaattgaaagttgcatagtatagttttgccattttaacatttctgtatttgaagtgcttatcgaatctaaaagtgactactgttaatattttgtatattgtgttaaattaattttaataaattatataattatacatattgtaaaataaagaccggtattttattttctgctttttattctgaagtcctgttattctgactacagttctttgtgtatacttctgtgtctgttatgttcaataactgagctaacataaaataactctaggtttctacttgatttttcccccatgtatacctttcatctgttctatagcaagttgatgtaaattggtttgtcaacaagaatgttaactgatgaaagtggatagaacccatacatgaattaaatgatgcacaaaataaatggctgttgaaatttgaaaaaaaaaaaaaaaaaaaaaaaaaaaaaa

SEQ ID NO: 875 - DNA, 3738 bp, Homo sapiens
aagtttcttgggcccccggcagccggcgggacagaacgcggagagtcgccgcctggccgggcgtagacgcggtggcagagcccgcgcggcgctggaagcgagtggcggagcggcgggacctcggcggactcgccatggaggaggagggtgtgaaggaagccggtgagaagcctcggggagcacagatggtggacaaggctggctggatcaagaagagcagtgggggcctcctgggtttctggaaagaccgatatctgctcctctgccaggcccagctgctggtctatgagaatgaggatgatcagaagtgtgtggagactgtggagctgggcagctatgagaagtgccaggaccttcgtgccctcctcaagcgaaaacaccgctttatcctgctgcgatccccagggaacaaggtcagcgacatcaaattccaggcacccaccggggaggagaaggaatcctggatcaaagccctcaatgaagggattaaccgaggcaaaaacaaggctttcgatgaggtaaaggtggacaagagctgcgccctggagcatgtgacacgggaccgggtgcgagggggccagcgacgccggccaccaacgagagtccacctgaaggaggtggccagtgcagcttctgacggtcttctgcgcctggatcttgatgttccggacagtgggccaccagtgtttgcccccagcaatcatgtcagtgaagcccaacctcgggagacaccccggcccctcatgcctcctaccaagcctttcctagcacctgagaccaccagccctggtgacagggtggagacccctgtgggggagagagccccaacccctgtctcagcaagctctgaggtctcccctgagagccaagaggactcagagaccccagcagaggaggacagtggctctgagcagcctcccaacagcgtcctgcctgacaaactgaaggtgagctgggagaaccccagcccccaggaggcccctgctgcagagagtgcagaaccgtcccaggcaccctgttctgagacttctgaggctgcccccagggagggtgggaagccccctacacccccacccaagatcttatcagagaaactgaaagcctccatgggtgagatgcaggcttctgggccacctgctccaggcacagtgcaggtctcagtgaatggcatggatgacagtcctgagcctgccaagccctctcaggctgagggcaccccaggaactcctccaaaggatgcaacaacatccacagcactgcccccctgggacctgccacctcagttccatccccgctgctcctcccttggggacttgcttggggaaggcccgcggcatcccttgcagcccagggaacggctatatcgggcccagctggaggtgaaggtggcctcggaacagacggagaaactgttgaacaaggtgctgggcagtgagccggcccctgttagtgccgaaacattgctcagccaggctgtggagcagctgaggcaggccacccaggtcctgcaggaaatgagagatttgggagagctgagccaggaagcacctgggctaagggagaagcggaaggagctggtgaccctctacaggagaagtgcaccctagggccttctgggccagaggcaccatcccttctggccatccatcaagtccatcaaggcccagccctgctgagaaatgtgcttctgcttctacagcaatggctgcaggagggccattgggcatgtcagggtttggccatgacccgaagagactcctggcgtccttcctactctgctctggccagtggtgccaggtgccacccagggctactgcctggctatctggcctggcctctgggctggggctggggctgggagcacacacgctgggacctatgtgtttgtgtggtcgttccaaactgccccagggctttgggggcggcacttggggtttctgggaatgacatcatctctgttccccatccccagtagtttacattcctgacttctgaatacagcacagctgagccccctgcagctcccatctccagctattcctaggcaaagagcctcatggctaaggcagcctcaaagccagcccctcctcccacctattctgagtagctgcagaggccttgggtccaggctctaggttcatccctcagttggggggaacgtaggacccagctggagcctcttgagggagatgagaggcctctttgtgaggaggacattagctgtgtggcctctctctctttggccctgtttccttttttgcaaaacaaggacattttctgcagccccttcctctcagtgagctatgattggagggcttaggtctggaggattcaagagtggaagaggaatttaaggggtcccctagtctagtctctgcccctggatagtgtccagccttgtatatttctgaagaggtggatcccagagtggctctgatgtccacattagaaaaacttacttgtaatgatcatgtcagccttcagaagagaatccccaccaacttctgtgcctcctcagatggggatttatctggatctctgtggttccttctcagccgaaacaggtccagtatcccagtcatttcttcaaatgctgataggggtatgttggaatccgaagccacttccccgccttcaagccccagatgggctgctctcctgtaactttctaggagaagagacattttcttctttccctttcctggtccatccctgcaccctggtcctctcccagcctctcccccacattgtccctgactctaggggcacatccagtctccatcgtgctgcagcagctggactgagggcagagcctgtaggtgcagaggccctggctcccgaggtccagccactctccctggggcctctggggtgagagcagcttccgataggacctgcccagatttctgcatgtgcacttttgtttactgaaagagagaaaggggggggtcacagcaacatgccctggcctttctgctctgttccccaaccccactgaggcctgctgcacaggtcaatgccttcgttatcgttattgtactgtcactttgttcttgaggtagtagtcaaggatcaggaggggcagatgtcttctctgggctgcgtggggccggagcagaggtgagcagcaatgcactggttcgggagcccccatcagcctccttgtgcaaactgggcccccatgccacagtctggctttccctccatctgccccaggacaagagcaagaaggacatcagttgcccagtcatgtgatcccctgccatcttgccttaggaacagccttcccccaccagcagccatggctggctggggctttagccaagccacctactgccaggaattggagcctcagttccctcctgtgtcaagtagctaactgcagcagctggactgagggcagagtctgtgggtgcagagaccctgcatgtaggtcacaggttgaggcccagccactctccctggggcctggtgggtaggcaagtagctctggggccacctcaagtgaccaaatgctattaatttccatcctttagcaggctgggccctaggcaggaagctggcttctgggagaggagtgagaacgtgcagggcctgcctagcttgcgtgcttgaggaaggtggcattccgtgcttgcctccttgaggagggtggcattctgtgtcttctgcttatgaagcgcctttcttaaagtttggcaataaatccatttttatggaaaaaaaaaaaaaaaaaaa

SEQ ID NO: 876 - DNA, 1022 bp, Homo sapiens
gggcgggagcggcggtccagactggggagggacgcgcaccggccaggaggcttcaagaggagggcactagggccctgcgagcggcgtcttaaccggcggcgctaggactccgcgggaaacggcgggggcggagcgggcggcaccaggacccaggggaaccgcgacgggcgggcggcgagcaggcccgggagccgggaggctgcgggcggcggcgctggacccgacgcggcgagagaggccccgagatgccgagcaagaagaagaagtacaacgcgcggttcccgccggcgcggatcaagaagatcatgcagacggacgaagagattgggaaggtggcggcggcggtgcctgtcatcatctcccgggcgctcgagctcttcctagagtcgctgttgaagaaggcctgccaggtgacccagtcgcggaacgcgaagaccatgaccacatcccacctgaagcagtgcatcgagctggagcagcagtttgacttcttgaaggacctggtggcatctgttcccgacatgcagggggacggggaagacaaccacatggatggggacaagggcgcccgcaggggccggaagccaggcagcggcggccggaagaacggtgggatgggaacgaaaagcaaggacaagaagctgtccgggacagactcggagcaggaggatgaatctgaggacacagatactgatggggaagaggagacatcacaacccccaccccaggccagccacccctctgcccactttcagagccccccgacacccttcctgcccttcgcctctactctgcctttgcccccagcgcccccgggcccctcagcacctgatgaagaggacgaagaagattacgactcctagcgccttctgccccccagaccatagccccttttagttggttttagttgctctggggggaggagagaaggtagagctgttcttaaatttattaaaaaaaaaaataaaagggaatctcagtgtctgttccaggctctgcgcaggaaaaaaaaaaaaaaaaaa

SEQ ID NO: 877 - DNA, 3760 bp, Homo sapiens
agaaacacttggtttcatgtatgactcataagctgaagcacagacaccacttccccaatctacaggagccattttaacagctaaaacttgtcggattgctttttattttcaagctcaaaagacgatagagaaagaatacttgaaggccaagaagcttgagagaagaaaaatttcagaaaaattgtctcaatttgactagaatatcaatgaaccaggaaaactgaagcaccttccctaaagaaaacttgggtatacaattactccacagacagagctgagggttttttacccaaatcagtcactggattttgctgcctgatacgtgaatcttcttggaatttttctcatgtggatctaaggggaatgctttattatggctgctgttgtccaacagaacgacctagtatttgaatttgctagtaacgtcatggaggatgaacgacagcttggtgatccagctatttttcctgccgtaattgtggaacatgttcctggtgctgatattctcaatagttatgccggtctagcctgtgtggaagagcccaatgacatgattactgagagttcactggatgttgctgaagaagaaatcatagacgatgatgatgatgacatcacccttacagttgaagcttcttgtcatgacggggatgaaacaattgaaactattgaggctgctgaggcactcctcaatatggattcccctggccctatgctggatgaaaaacgaataaataataatatatttagttcacctgaagatgacatggttgttgccccagtcacccatgtgtccgtcacattagatgggattcctgaagtgatggaaacacagcaggtgcaagaaaaatatgcagactcaccgggagcctcatcaccagaacagcctaagaggaaaaaaggaagaaaaactaaaccaccacgaccagattccccagccactacgccaaatatatctgtgaagaagaaaaacaaagatggaaagggaaacacaatttatctttgggagtttttactggcactgctccaggacaaggctacttgtcctaaatacatcaagtggacccagcgagagaaaggcatttttaaattggtggattctaaagcagtgtccaggttgtgggggaagcacaaaaacaaacctgatatgaattatgagaccatgggaagagcactcaggtactattaccaaaggggtattctggcaaaagtggaaggtcagcgcttggtgtatcagtttaaagaaatgccaaaagatcttatatatataaatgatgaggatccaagttccagcatagagtcttcagatccatcgctatcttcatcagccacttcaaataggaatcaaaccagccggtcgagagtatcttcaagtccaggggtaaaaggaggagccactacagttctaaaaccagggaattctaaagctgcaaaacccaaagatcctgtggaagttgcacaaccatcagaagttttgaggacagtgcagcccacgcagtctccatatcctacccagctcttccggactgttcatgtagtacagccagtacaggctgtcccagagggagaagcagctagaaccagtaccatgcaggatgaaacattaaattcttccgttcagagtattaggactatacaggctccaacccaagttccagtggttgtgtctcctaggaatcagcagttgcatacagtaacactccaaacagtgccactcacaacagttatagccagcacagatccatcagcaggtactggatctcagaagtttattttacaagccattccatcatcacagcccatgacagtactgaaagaaaatgtcatgctgcagtcacaaaaggcgggctctcctccttcaattgtcttgggccctgcccaggttcagcaggtccttactagcaatgttcagaccatttgcaatggaaccgtcagtgtggcttcctctccatccttcagtgctactgcacctgtggtgaccttttctcctcgcagttcacagctggttgctcacccacctggcactgtaatcacttcagttatcaaaactcaagaaacaaaaactcttacacaggaagtagagaaaaaggaatctgaagatcatttgaaagagaacactgagaaaacggagcagcagccacagccttatgtgatggtagtgtccagttccaatggatttacttctcaggtagctatgaaacaaaacgaactgctggaacccaactctttttagttaatataccaaagcttatgaataattgtttgttaattgaacattttcaattatatgcagactgactgattctaagataaattctaaggaggtttctaattttgtaattgttaaaaatagagttaattttgactttgttagatgagggaggaaaactcaactgtttctctttgttatctaaatgtttcagaattcaatcgtgaaggaacaggcattttacactatgaagacattcttttgagatttttatttcagttgctatatcataagcatttttaaagtttcttttctaattttacattgtattagattttctgattcttttgtaaatacagaacttaaatagaaggcaacaggaaatttatataggaactattttcattccacttgtgtaagttaagtcttgactctttcaaatgcaaaaaacctattttatgctttgttaaaattatggtgtcacttagattgactttagttgactgcactatataatatagaactatgaatatgtagaataacatgaaaaattggaggtgctggtggtatggctgaccctgtttcagaagcaggatagtataaaagcatcagcctaagaatggcactcccactaactagctatgtaatcttgacctctttgggctttagttcctctcataaaaggaagagatgtattggattagactagatgatcaccactttctcttctagttctaatttttttaattctaatacctatattttcaagttatgtcaattaaatcattatcaggttatttcctaatgtaagaatagctaaaatgttgcagagaaataagtgacccaacaaaatttattcatctgttatgggtaagatctgccataaattcttcctaaataatttgtttactaactctttaggccactgtgctttgcggtccattagtaaacttgtgttgctaagtgctaaacagaatactgctattttgagagagtcaagactctttcttaagggccaagaaagcaacttgagccttgggctaatctggctgagtagtcagttataaaagcataattgctttatattttggatcattttttactgggggcggacttggggggggttgcatacaaagataacatatatatccaactttctgaaatgaaatgtttttagattactttttcaactgtaaataatgtacatttaatgtcacaagaaaaaaatgtcttctgcaaattttctagtataacagaaatttttgtagatgaaaaaaatcattatgtttagaggtctaatgctatgttttcatattacagagtgaatttgtatttaaacaaaaatttaaattttggaatcctctaaacatttttgtatctttaattggtttattattaaataaatcatataaaaattctcagtgtctgttttcaggcaaaagtttcttaaagaataagtgtgcagagaatattactagaacatcagcattacttaatgtttataaataaatttcattagtcagaattgcaaaaaaaaaaaaaaaaaaaaaa

SEQ ID NO: 878 - DNA, 1662 bp, Homo sapiens
gtcatcagatcaagtcgactcgctcctctccttccaggccctggtgaagtacggaatgccggaagggccgggctcaaagctccgcctctggcgcgaccgacgactggagcgcagggcaggggtagaggctcgtagatggaactggtagtcagctggagagcagcatggaggcgtcctgggggagcttcaacgctgagcggggctggtatgtctctgtccagcagcctgaagaagcggaggccgaagagttgagtccgttgctaagcaacgaacttcacagacagcgatccccaggtgtttcatttggtttatcagtgtttaatttgatgaatgccatcatgggaagtggcatccttggcttagcttatgttttggctaataccggtgtctttggatttagcttcttgctgctgacagttgctctcctggcttcttactcagtccatcttctgcttagtatgtgtattcagacagctgtaacatcttatgaagatcttggactctttgcatttggattacctggaaagttggtggtggcaggcaccataataattcagaatattggagctatgtcatcttatcttttaattattaaaacagagcttcctgctgctattgcagaatttttgactggagactatagtagatattggtatcttgatggacaaacactactaataatcatatgtgttggcattgtgttccctcttgcacttcttcccaaaataggctttcttggctacacaagtagtttatcatttttctttatgatgttctttgctcttgtggtaataattaaaaaatggtccatcccttgtcctctgacattaaattatgtagagaaaggtttccagatttcaaatgttacagatgattgtaagccaaagctctttcatttctccaaagagagtgcttatgccttaccaaccatggctttttcatttctctgccatacctcaatattgcccatatactgtgaacttcaaagtccttcaaagaaaagaatgcagaatgttaccaatacagcaattgctttaagttttctcatttattttatatctgcactctttgggtacctcactttttatgacaaagtggagtcagaattactaaaaggttatagtaaatacttatcacatgatgttgttgtcatgactgtgaagttatgcatactatttgctgtgcttttgacagtccctctaatccacttccctgccagaaaagctgtaacaatgatgtttttctccaattttccattctcatggattcgccattttttgatcactctagcactcaatattatcatcgttttacttgcaatatatgttcctgacattagaaatgtatttggtgtagttggtgccagtacatcaacatgtttgatttttatattcccaggactattttatcttaaacttagcagagaggattttctgtcatggaaaaagcttggggcattcgttttgctcatctttggaattttggttgggaattttagtttagcactcatcatttttgattggattaataaataaaagaaatattttcctacttcttacaagaataatatacccctagttgcaagaatgaattattccggaagacaccctggatgaaaaataacattttaataaaaattattaacagaaaaaaaaaaaaaaa

SEQ ID NO: 879 - DNA, 2784 bp, Homo sapiens
ggaaggcttgcacagggtgaaagctttgcttctctgctgctgtaacagggactagcacagacacacggatgagtggggtcatttccagatattaggtcacagcagaagcagccaaaatggatccccagtgcactatgggactgagtaacattctctttgtgatggccttcctgctctctggtgctgctcctctgaagattcaagcttatttcaatgagactgcagacctgccatgccaatttgcaaactctcaaaaccaaagcctgagtgagctagtagtattttggcaggaccaggaaaacttggttctgaatgaggtatacttaggcaaagagaaatttgacagtgttcattccaagtatatgggccgcacaagttttgattcggacagttggaccctgagacttcacaatcttcagatcaaggacaagggcttgtatcaatgtatcatccatcacaaaaagcccacaggaatgattcgcatccaccagatgaattctgaactgtcagtgcttgctaacttcagtcaacctgaaatagtaccaatttctaatataacagaaaatgtgtacataaatttgacctgctcatctatacacggttacccagaacctaagaagatgagtgttttgctaagaaccaagaattcaactatcgagtatgatggtgttatgcagaaatctcaagataatgtcacagaactgtacgacgtttccatcagcttgtctgtttcattccctgatgttacgagcaatatgaccatcttctgtattctggaaactgacaagacgcggcttttatcttcacctttctctatagagcttgaggaccctcagcctcccccagaccacattccttggattacagctgtacttccaacagttattatatgtgtgatggttttctgtctaattctatggaaatggaagaagaagaagcggcctcgcaactcttataaatgtggaaccaacacaatggagagggaagagagtgaacagaccaagaaaagagaaaaaatccatatacctgaaagatctgatgaagcccagcgtgtttttaaaagttcgaagacatcttcatgcgacaaaagtgatacatgtttttaattaaagagtaaagcccatacaagtattcattttttctaccctttcctttgtaagttcctgggcaacctttttgatttcttccagaaggcaaaaagacattaccatgagtaataagggggctccaggactccctctaagtggaatagcctccctgtaactccagctctgctccgtatgccaagaggagactttaattctcttactgcttcttttcacttcagagcacacttatgggccaagcccagcttaatggctcatgacctggaaataaaatttaggaccaatacctcctccagatcagattcttctcttaatttcatagattgtgttttttttttaaatagacctctcaatttctggaaaactgccttttatctgcccagaattctaagctggtgccccactgaattttgtgtgtacctgtgactaaacaactacctcctcagtctgggtgggacttatgtatttatgaccttatagtgttaatatcttgaaacatagagatctatgtactgtaatagtgtgattactatgctctagagaaaagtctacccctgctaaggagttctcatccctctgtcagggtcagtaaggaaaacggtggcctagggtacaggcaacaatgagcagaccaacctaaatttggggaaattaggagaggcagagatagaacctggagccacttctatctgggctgttgctaatattgaggaggcttgccccacccaacaagccatagtggagagaactgaataaacaggaaaatgccagagcttgtgaaccctgtttctcttgaagaactgactagtgagatggcctggggaagctgtgaaagaaccaaaagagatcacaatactcaaaagagagagagagagaaaaaagagagatcttgatccacagaaatacatgaaatgtctggtctgtccaccccatcaacaagtcttgaaacaagcaacagatggatagtctgtccaaatggacataagacagacagcagtttccctggtggtcagggaggggttttggtgatacccaagttattgggatgtcatcttcctggaagcagagctggggagggagagccatcaccttgataatgggatgaatggaaggaggcttaggactttccactcctggctgagagaggaagagctgcaacggaattaggaagaccaagacacagatcacccggggcttacttagcctacagatgtcctacgggaacgtgggctggcccagcatagggctagcaaatttgagttggatgattgtttttgctcaaggcaaccagaggaaacttgcatacagagacagatatactgggagaaatgactttgaaaacctggctctaaggtgggatcactaagggatggggcagtctctgcccaaacataaagagaactctggggagcctgagccacaaaaatgttcctttattttatgtaaaccctcaagggttatagactgccatgctagacaagcttgtccatgtaatattcccatgtttttaccctgcccctgccttgattagactcctagcacctggctagtttctaacatgttttgtgcagcacagtttttaataaatgcttgttacattcaaaaaaaaaaaaaaaaaaaaaaaaaaaaaaaaaaaaaaaaaaaaaaaaaaaaaaaaaaaaaaaaaaaaaaaaaaaaa

SEQ ID NO: 880 - DNA, 762 bp, Homo sapiens
gtctgcgcggagtctgagcggcgctcgtcccgtcccaaggccgacgccagcacgccgtcatggcccccgcagcggcgacggggggcagcaccctgcccagtggcttctcggtcttcaccaccttgcccgacttgctcttcatctttgagtttgtgttctcctacatagccactctgctctacgtggtccatgcggtgttctctttaatcagatggaagtcttcataaagccgcagtagaacttgagctgaaaacccagatggtgttaactggccgccccactttccggcataactttttagaaaacagaaatgcccttgatggtggaaaaaagaaaacaaccacccccccactgcccaaaaaaaaaagccctgccctgttgctcgtgggtgctgtgtttactctcccgtgtgccttcgcgtccgggttgggagcttgctgtgtctaacctccaactgctgtgctgtctgctagggtcacctcctgtttgtgaaaggggaccttcttgttcgggggtgggaagtggccaccgtgacctgagaaggaaagaaagatcctctgctgacccctggagcagctctcgagaactacctgttggtattgtccacaagctctcccgagcgccccatcttgtgccatgttttaagtcttcatggatgttctgcatgtcatgcggactaaaactcacccaacagatctttccagaggtccatggtggaagacgataaccctgtgaaatactttataaaatgtcttaatgttc

SEQ ID NO: 881 - DNA, 4548 bp, Homo sapiens; identical to SEQ ID NO: 107

SEQ ID NO: 882 - DNA, 1068 bp, Homo sapiens
ctgtgattctcactatactggtcctgaggaaagggcttctgtgaactgcggtttttagtttttattgtggttcttagttctcatgagacccctcttgaggatatgtgcctatctggtgcctctgctctccactagttgagtgaaaggaaggaggtaatttaccaccatgtttggttcctgtttataagatgttttaagaaagatctgaaacagattttctgaagaaagcagaagctctcttcccattatgacttcggaaatcacttatgctgaagtgaggttcaaaaatgaattcaagtcctcaggcatcaacacagcctcttctgcagagacagcctggagctgttgcccaaagaattggaagtcatttagttccaactgctactttatttctactgaatcagcatcttggcaagacagtgagaaggactgtgctagaatggaggctcacctgctggtgataaacactcaagaagagcaggatttcatcttccagaatctgcaagaagaatctgcttattttgtggggctctcagatccagaaggtcagcgacattggcaatgggttgatcagacaccatacaatgaaagttccacattctggcatccacgtgagcccagtgatcccaatgagcgctgcgttgtgctaaattttcgtaaatcacccaaaagatggggctggaatgatgttaattgtcttggtcctcaaaggtcagtttgtgagatgatgaagatccacttatgaactgaacattctccatgaacaggtggttggattggtatctgtcattgtagggatagataataagctcttcttattcatgtgtaagggaggtccatagaatttaggtggtctgtcaactattctacttatgagagaattggtctgtacattgactgattcactttttcataaagtgagcatttattgagcattttttcatgtgccagagcctgtactggaggcccccattgtgcacacatggagagaacatgagtctctcttaatttttatctggttgctaaagaattatttaccaataaaattatatgatgtggtgtctcaaa

SEQ ID NO: 883 - DNA, 1586 bp, Homo sapiens
cgcccccgccgggcgtgtgtgtcgtgtgtgtttggggcccgcgcgggttgcgcgccctccgccttcgcgcctcctgcccccgaggccctactgctgcccctgtgcccctcgccccgccgggcgtcgcgggccaacatgggccaggaagaggagctgctgaggatcgccaaaaagctggagaagatggtggccaggaagaacacggaaggggccctggaccttctgaagaagctgcacagctgccagatgtccatccagctactacagacaaccaggattggagttgctgttaatggggtccgcaagcactgctcagacaaggaggtggtgtccttggccaaagtccttatcaaaaactggaagcggctgctagactcccctggacccccaaaaggagaaaaaggagaggaaagagaaaaggcaaagaagaaggaaaaagggcttgagtgttcagactggaagccagaagcaggcctttctccaccaaggaaaaaacgagaagaccccaaaaccaggagagactctgtggactccaagtcttctgcctcctcctctccaaaaagaccatcggtggaaagatcaaacagcagcaaatcaaaagcggagagccccaaaacacctagcagccccttgacccccacgtttgcctcttccatgtgtctcctggccccctgctatctcacaggggactctgtccgggacaagtgtgtggagatgctgtcagcagccctgaaggcggacgatgattacaaggactatggagtcaactgtgacaagatggcatcagaaatcgaagatcatatctaccaagagctcaagagcacggacatgaagtaccggaaccgcgtgcgcagccgcataagcaacctcaaggaccccaggaaccccggcctgcggcggaacgtgctcagtggggccatctccgcagggcttatagccaagatgacggcagaggaaatggccagtgatgaactgagggagttgaggaatgccatgacccaggaggccatccgtgagcaccagatggccaagactggcggcaccaccactgacctcttccagtgcagcaaatgcaagaagaagaactgcacctataaccaggtgcagacacgcagtgctgatgagcccatgactacctttgtcttatgcaatgaatgtggcaatcgctggaagttctgctgatggaacagccagccatgaacaaggtgaggaagaagaaagaggaagcgctgaattatctgaactggagaagcaataaaaattaaagtgaaggaaaatactgaactctgtctgagtgggatggtatgagttagaggaagaattctcttgcaaattaataatcggtcattagaaacaattggttaatgggggagcctaattggagaatgatgctgagaatttgtattgatgaacctcttttagaaactgcagagggctgggcacggtggtttatggctgtaatctgcaaactctgggaggctgaggtgggagaatcgcttaaccccagaagtttgagtccagcccaggcaacacagcaagaccccatctctataaaaagaaaaaataaagaaactgcagcgccttag

SEQ ID NO: 884 - DNA, 1722 bp, Homo sapiens
gtccaccatcatccttcgggctcatttaacacttactatttctatactgtaaatggcaacaagattttccctacctcaacctgactttgagcaggagctgttgctggctaagcagcctgaacaattcacatgctcagacgcttgtgcttttttcacatggcccctccaggacacctctgcactgggctgcagctgcagggaaggccgaatgtgtccagtcactgctggagttgggaatggacagcaacctgcgggacatcaatgagagcacgcccttggcctatgccctgtactgcggtcacacggcgtgtgtcaaactcctctcccaagagagcagaacagagcctactcgaccccctccctcccagagcagtcggccccagaagaaggagagacggttcaacgtgctcaaccaaatattctgcaaaaacaagaaagaagagcagagagcccatcagaaggatcccagcagggaccgatacagagaggaggacacctcagaagtcaatgacatcatcaccacctttgatagcatcgtgggtaccaactgccaagaacagcctggtgatcaggtggctatggttgaatttaagaagaaaacctcagacaattcaaaatatctcttaccagaaaagaaaccgctggcccgtaaggggcttccaccaatcagaacgcagagtctcccacccatcaccctgggcaataacttcctaacagcctcccatagggccacttcccatgcaggcctgagctctgctcctcatcatatggcccagcgatctcagaaaagtcgaagtgagcaggatttattaaataacagaactggctgccagatgttactagataacccctggaagagtgattctaatcaggtattttcctacaaagtttggactgtgtcttcttctgataagctgctggacagattgctcagtgtccggcctggtcaccaagaggtctccgtgccaccacaccttcgccatctacataatccatcatcaggacaaaattttcagcatctttccccaaacagacacaaaatcagggatcttcctttcactcggaacaacctagctcccctaccagatcaaaaatttctatctggagaacctctgcggacaaaccgagtgcttcctgcaattccaagtcaacgaagacacagcacagcagcagaagagagtgaacattctgccaaccccaccagtgatgaaaattaactgtgggccactcgctgcagaaatgtagatgaatatgtattttcaactctcaaaggacaagattactccagtttgtaagaacgaagaccaatttagtaagctgcattctataagccatcagttttataactcgaaattctttattccaaataaagatactccctaaataagcacttagaatatttgggtgtgcatattaagtctgtgaatttctgtgacttccacatgccaaaattaaaagacaaaatatgttatcagtaggaaaactgagctatgtttggtttgctttgtggcatgtgcactgtttttttgttattgttctttggttgtttttttgctgaatgattttatgttttgggaaaaaaagtacgctttgctgaataaaagcaaaaaacaaaacaaaaaaaaaaccacatcccagacaaacatgtcttcacatttattgtcattctaacttgaactaatgaaacctatttaaaaataaattcctatgatcagtcacaaa

SEQ ID NO: 885 - DNA, 10412 bp, Homo sapiens
gtaattgcgagcgagagtgagtggggccgggacccgcagagccgagccgacccttctctcccgggctgcggcagggcagggcggggagctccgcgcaccaacagagccggttctcagggcgctttgctccttgttttttccccggttctgttttctccccttctccggaaggcttgtcaaggggtaggagaaagagacgcaaacacaaaagtggaaaacagttaatgaccagccacggcgtccctgctgtgagctctggccgctgccttccagggctcccgagccacacgctgggggtgctggctgagggaacatggcttgttggcctcagctgaggttgctgctgtggaagaacctcactttcagaagaagacaaacatgtcagctgctgctggaagtggcctggcctctatttatcttcctgatcctgatctctgttcggctgagctacccaccctatgaacaacatgaatgccattttccaaataaagccatgccctctgcaggaacacttccttgggttcaggggattatctgtaatgccaacaacccctgtttccgttacccgactcctggggaggctcccggagttgttggaaactttaacaaatccattgtggctcgcctgttctcagatgctcggaggcttcttttatacagccagaaagacaccagcatgaaggacatgcgcaaagttctgagaacattacagcagatcaagaaatccagctcaaacttgaagcttcaagatttcctggtggacaatgaaaccttctctgggttcctgtatcacaacctctctctcccaaagtctactgtggacaagatgctgagggctgatgtcattctccacaaggtatttttgcaaggctaccagttacatttgacaagtctgtgcaatggatcaaaatcagaagagatgattcaacttggtgaccaagaagtttctgagctttgtggcctaccaagggagaaactggctgcagcagagcgagtacttcgttccaacatggacatcctgaagccaatcctgagaacactaaactctacatctcccttcccgagcaaggagctggctgaagccacaaaaacattgctgcatagtcttgggactctggcccaggagctgttcagcatgagaagctggagtgacatgcgacaggaggtgatgtttctgaccaatgtgaacagctccagctcctccacccaaatctaccaggctgtgtctcgtattgtctgcgggcatcccgagggaggggggctgaagatcaagtctctcaactggtatgaggacaacaactacaaagccctctttggaggcaatggcactgaggaagatgctgaaaccttctatgacaactctacaactccttactgcaatgatttgatgaagaatttggagtctagtcctctttcccgcattatctggaaagctctgaagccgctgctcgttgggaagatcctgtatacacctgacactccagccacaaggcaggtcatggctgaggtgaacaagaccttccaggaactggctgtgttccatgatctggaaggcatgtgggaggaactcagccccaagatctggaccttcatggagaacagccaagaaatggaccttgtccggatgctgttggacagcagggacaatgaccacttttgggaacagcagttggatggcttagattggacagcccaagacatcgtggcgtttttggccaagcacccagaggatgtccagtccagtaatggttctgtgtacacctggagagaagctttcaacgagactaaccaggcaatccggaccatatctcgcttcatggagtgtgtcaacctgaacaagctagaacccatagcaacagaagtctggctcatcaacaagtccatggagctgctggatgagaggaagttctgggctggtattgtgttcactggaattactccaggcagcattgagctgccccatcatgtcaagtacaagatccgaatggacattgacaatgtggagaggacaaataaaatcaaggatgggtactgggaccctggtcctcgagctgacccctttgaggacatgcggtacgtctgggggggcttcgcctacttgcaggatgtggtggagcaggcaatcatcagggtgctgacgggcaccgagaagaaaactggtgtctatatgcaacagatgccctatccctgttacgttgatgacatctttctgcgggtgatgagccggtcaatgcccctcttcatgacgctggcctggatttactcagtggctgtgatcatcaagggcatcgtgtatgagaaggaggcacggctgaaagagaccatgcggatcatgggcctggacaacagcatcctctggtttagctggttcattagtagcctcattcctcttcttgtgagcgctggcctgctagtggtcatcctgaagttaggaaacctgctgccctacagtgatcccagcgtggtgtttgtcttcctgtccgtgtttgctgtggtgacaatcctgcagtgcttcctgattagcacactcttctccagagccaacctggcagcagcctgtgggggcatcatctacttcacgctgtacctgccctacgtcctgtgtgtggcatggcaggactacgtgggcttcacactcaagatcttcgctagcctgctgtctcctgtggcttttgggtttggctgtgagtactttgccctttttgaggagcagggcattggagtgcagtgggacaacctgtttgagagtcctgtggaggaagatggcttcaatctcaccacttcggtctccatgatgctgtttgacaccttcctctatggggtgatgacctggtacattgaggctgtctttccaggccagtacggaattcccaggccctggtattttccttgcaccaagtcctactggtttggcgaggaaagtgatgagaagagccaccctggttccaaccagaagagaatatcagaaatctgcatggaggaggaacccacccacttgaagctgggcgtgtccattcagaacctggtaaaagtctaccgagatgggatgaaggtggctgtcgatggcctggcactgaatttttatgagggccagatcacctccttcctgggccacaatggagcggggaagacgaccaccatgtcaatcctgaccgggttgttccccccgacctcgggcaccgcctacatcctgggaaaagacattcgctctgagatgagcaccatccggcagaacctgggggtctgtccccagcataacgtgctgtttgacatgctgactgtcgaagaacacatctggttctatgcccgcttgaaagggctctctgagaagcacgtgaaggcggagatggagcagatggccctggatgttggtttgccatcaagcaagctgaaaagcaaaacaagccagctgtcaggtggaatgcagagaaagctatctgtggccttggcctttgtcgggggatctaaggttgtcattctggatgaacccacagctggtgtggacccttactcccgcaggggaatatgggagctgctgctgaaataccgacaaggccgcaccattattctctctacacaccacatggatgaagcggacgtcctgggggacaggattgccatcatctcccatgggaagctgtgctgtgtgggctcctccctgtttctgaagaaccagctgggaacaggctactacctgaccttggtcaagaaagatgtggaatcctccctcagttcctgcagaaacagtagtagcactgtgtcatacctgaaaaaggaggacagtgtttctcagagcagttctgatgctggcctgggcagcgaccatgagagtgacacgctgaccatcgatgtctctgctatctccaacctcatcaggaagcatgtgtctgaagcccggctggtggaagacatagggcatgagctgacctatgtgctgccatatgaagctgctaaggagggagcctttgtggaactctttcatgagattgatgaccggctctcagacctgggcatttctagttatggcatctcagagacgaccctggaagaaatattcctcaaggtggccgaagagagtggggtggatgctgagacctcagatggtaccttgccagcaagacgaaacaggcgggccttcggggacaagcagagctgtcttcgcccgttcactgaagatgatgctgctgatccaaatgattctgacatagacccagaatccagagagacagacttgctcagtgggatggatggcaaagggtcctaccaggtgaaaggctggaaacttacacagcaacagtttgtggcccttttgtggaagagactgctaattgccagacggagtcggaaaggattttttgctcagattgtcttgccagctgtgtttgtctgcattgcccttgtgttcagcctgatcgtgccaccctttggcaagtaccccagcctggaacttcagccctggatgtacaacgaacagtacacatttgtcagcaatgatgctcctgaggacacgggaaccctggaactcttaaacgccctcaccaaagaccctggcttcgggacccgctgtatggaaggaaacccaatcccagacacgccctgccaggcaggggaggaagagtggaccactgccccagttccccagaccatcatggacctcttccagaatgggaactggacaatgcagaacccttcacctgcatgccagtgtagcagcgacaaaatcaagaagatgctgcctgtgtgtcccccaggggcaggggggctgcctcctccacaaagaaaacaaaacactgcagatatccttcaggacctgacaggaagaaacatttcggattatctggtgaagacgtatgtgcagatcatagccaaaagcttaaagaacaagatctgggtgaatgagtttaggtatggcggcttttccctgggtgtcagtaatactcaagcacttcctccgagtcaagaagttaatgatgccatcaaacaaatgaagaaacacctaaagctggccaaggacagttctgcagatcgatttctcaacagcttgggaagatttatgacaggactggacaccaaaaataatgtcaaggtgtggttcaataacaagggctggcatgcaatcagctctttcctgaatgtcatcaacaatgccattctccgggccaacctgcaaaagggagagaaccctagccattatggaattactgctttcaatcatcccctgaatctcaccaagcagcagctctcagaggtggctctgatgaccacatcagtggatgtccttgtgtccatctgtgtcatctttgcaatgtccttcgtcccagccagctttgtcgtattcctgatccaggagcgggtcagcaaagcaaaacacctgcagttcatcagtggagtgaagcctgtcatctactggctctctaattttgtctgggatatgtgcaattacgttgtccctgccacactggtcattatcatcttcatctgcttccagcagaagtcctatgtgtcctccaccaatctgcctgtgctagcccttctacttttgctgtatgggtggtcaatcacacctctcatgtacccagcctcctttgtgttcaagatccccagcacagcctatgtggtgctcaccagcgtgaacctcttcattggcattaatggcagcgtggccacctttgtgctggagctgttcaccgacaataagctgaataatatcaatgatatcctgaagtccgtgttcttgatcttcccacatttttgcctgggacgagggctcatcgacatggtgaaaaaccaggcaatggctgatgccctggaaaggtttggggagaatcgctttgtgtcaccattatcttgggacttggtgggacgaaacctcttcgccatggccgtggaaggggtggtgttcttcctcattactgttctgatccagtacagattcttcatcaggcccagacctgtaaatgcaaagctatctcctctgaatgatgaagatgaagatgtgaggcgggaaagacagagaattcttgatggtggaggccagaatgacatcttagaaatcaaggagttgacgaagatatatagaaggaagcggaagcctgctgttgacaggatttgcgtgggcattcctcctggtgagtgctttgggctcctgggagttaatggggctggaaaatcatcaactttcaagatgttaacaggagataccactgttaccagaggagatgctttccttaacaaaaatagtatcttatcaaacatccatgaagtacatcagaacatgggctactgccctcagtttgatgccatcacagagctgttgactgggagagaacacgtggagttctttgcccttttgagaggagtcccagagaaagaagttggcaaggttggtgagtgggcgattcggaaactgggcctcgtgaagtatggagaaaaatatgctggtaactatagtggaggcaacaaacgcaagctctctacagccatggctttgatcggcgggcctcctgtggtgtttctggatgaacccaccacaggcatggatcccaaagcccggcggttcttgtggaattgtgccctaagtgttgtcaaggaggggagatcagtagtgcttacatctcatagtatggaagaatgtgaagctctttgcactaggatggcaatcatggtcaatggaaggttcaggtgccttggcagtgtccagcatctaaaaaataggtttggagatggttatacaatagttgtacgaatagcagggtccaacccggacctgaagcctgtccaggatttctttggacttgcatttcctggaagtgttctaaaagagaaacaccggaacatgctacaataccagcttccatcttcattatcttctctggccaggatattcagcatcctctcccagagcaaaaagcgactccacatagaagactactctgtttctcagacaacacttgaccaagtatttgtgaactttgccaaggaccaaagtgatgatgaccacttaaaagacctctcattacacaaaaaccagacagtagtggacgttgcagttctcacatcttttctacaggatgagaaagtgaaagaaagctatgtatgaagaatcctgttcatacggggtggctgaaagtaaagaggaactagactttcctttgcaccatgtgaagtgttgtggagaaaagagccagaagttgatgtgggaagaagtaaactggatactgtactgatactattcaatgcaatgcaattcaatgcaatgaaaacaaaattccattacaggggcagtgcctttgtagcctatgtcttgtatggctctcaagtgaaagacttgaatttagttttttacctatacctatgtgaaactctattatggaacccaatggacatatgggtttgaactcacacttttttttttttttttgttcctgtgtattctcattggggttgcaacaataattcatcaagtaatcatggccagcgattattgatcaaaatcaaaaggtaatgcacatcctcattcactaagccatgccatgcccaggagactggtttcccggtgacacatccattgctggcaatgagtgtgccagagttattagtgccaagtttttcagaaagtttgaagcaccatggtgtgtcatgctcacttttgtgaaagctgctctgctcagagtctatcaacattgaatatcagttgacagaatggtgccatgcgtggctaacatcctgctttgattccctctgataagctgttctggtggcagtaacatgcaacaaaaatgtgggtgtctccaggcacgggaaacttggttccattgttatattgtcctatgcttcgagccatgggtctacagggtcatccttatgagactcttaaatatacttagatcctggtaagaggcaaagaatcaacagccaaactgctggggctgcaagctgctgaagccagggcatgggattaaagagattgtgcgttcaaacctagggaagcctgtgcccatttgtcctgactgtctgctaacatggtacactgcatctcaagatgtttatctgacacaagtgtattatttctggctttttgaattaatctagaaaatgaaaagatggagttgtattttgacaaaaatgtttgtactttttaatgttatttggaattttaagttctatcagtgacttctgaatccttagaatggcctctttgtagaaccctgtggtatagaggagtatggccactgccccactatttttattttcttatgtaagtttgcatatcagtcatgactagtgcctagaaagcaatgtgatggtcaggatctcatgacattatatttgagtttctttcagatcatttaggatactcttaatctcacttcatcaatcaaatattttttgagtgtatgctgtagctgaaagagtatgtacgtacgtataagactagagagatattaagtctcagtacacttcctgtgccatgttattcagctcactggtttacaaatataggttgtcttgtggttgtaggagcccactgtaacaatactgggcagcctttttttttttttttttaattgcaacaatgcaaaagccaagaaagtataagggtcacaagtctaaacaatgaattcttcaacagggaaaacagctagcttgaaaacttgctgaaaaacacaacttgtgtttatggcatttagtaccttcaaataattggctttgcagatattggataccccattaaatctgacagtctcaaatttttcatctcttcaatcactagtcaagaaaaatataaaaacaacaaatacttccatatggagcatttttcagagttttctaacccagtcttatttttctagtcagtaaacatttgtaaaaatactgtttcactaatacttactgttaactgtcttgagagaaaagaaaaatatgagagaactattgtttggggaagttcaagtgatctttcaatatcattactaacttcttccactttttccagaatttgaatattaacgctaaaggtgtaagacttcagatttcaaattaatctttctatattttttaaatttacagaatattatataacccactgctgaaaaagaaaaaaatgattgttttagaagttaaagtcaatattgattttaaatataagtaatgaaggcatatttccaataactagtgatatggcatcgttgcattttacagtatcttcaaaaatacagaatttatagaataatttctcctcatttaatatttttcaaaatcaaagttatggtttcctcattttactaaaatcgtattctaattcttcattatagtaaatctatgagcaactccttacttcggttcctctgatttcaaggccatattttaaaaaatcaaaaggcactgtgaactattttgaagaaaacacaacattttaatacagattgaaaggacctcttctgaagctagaaacaatctatagttatacatcttcattaatactgtgttaccttttaaaatagtaattttttacattttcctgtgtaaacctaattgtggtagaaatttttaccaactctatactcaatcaagcaaaatttctgtatattccctgtggaatgtacctatgtgagtttcagaaattctcaaaatacgtgttcaaaaatttctgcttttgcatctttgggacacctcagaaaacttattaacaactgtgaatatgagaaatacagaagaaaataataagccctctatacataaatgcccagcacaattcattgttaaaaaacaaccaaacctcacactactgtatttcattatctgtactgaaagcaaatgctttgtgactattaaatgttgcacatcattcattcactgtatagtaatcattgactaaagccatttgtctgtgttttcttcttgtggttgtatatatcaggtaaaatattttccaaagagccatgtgtcatgtaatactgaaccactttgatattgagacattaatttgtacccttgttattatctactagtaataatgtaatactgtagaaatattgctctaattcttttcaaaattgttgcatcccccttagaatgtttctatttccataaggatttaggtatgctattatcccttcttataccctaagatgaagctgtttttgtgctctttgttcatcattggccctcattccaagcactttacgctgtctgtaatgggatctatttttgcactggaatatctgagaattgcaaaactagacaaaagtttcacaacagatttctaagttaaatcattttcattaaaaggaaaaaagaaaaaaaattttgtatgtcaataactttatatgaagtattaaaatgcatatttctatgttgtaatataatgagtcacaaaataaagctgtgacagttctgttggtctacagaaa

SEQ ID NO: 886 - DNA, 2062 bp, Homo sapiens
gtcagtccctcctgtagccgccgccgccgccgcccgccgcccctctgccagcagctccggcgccacctcgggccggcgtctccggcgggcgggagccaggcgctgacgggcgcggcgggggcggccgagcgctcctgcggctgcgactcaggctccggcgtctgcgcttccccatggggctggcctgcggcgcctgggcgctctgagattgtcactgctgttccaagggcacacgcagagggatttggaattcctggagagttgcctttgtgagaagctggaaatatttctttcaattccatctcttagttttccataggaacatcaagaaatcatgaacaactttggtaatgaagagtttgactgccacttcctcgatgaaggttttactgccaaggacattctggaccagaaaattaatgaagtttcttcttctgatgataaggatgccttctatgtggcagacctgggagacattctaaagaaacatctgaggtggttaaaagctctccctcgtgtcacccccttttatgcagtcaaatgtaatgatagcaaagccatcgtgaagacccttgctgctaccgggacaggatttgactgtgctagcaagactgaaatacagttggtgcagagtctgggggtgcctccagagaggattatctatgcaaatccttgtaaacaagtatctcaaattaagtatgctgctaataatggagtccagatgatgacttttgatagtgaagttgagttgatgaaagttgccagagcacatcccaaagcaaagttggttttgcggattgccactgatgattccaaagcagtctgtcgtctcagtgtgaaattcggtgccacgctcagaaccagcaggctccttttggaacgggcgaaagagctaaatatcgatgttgttggtgtcagcttccatgtaggaagcggctgtaccgatcctgagaccttcgtgcaggcaatctctgatgcccgctgtgtttttgacatgggggctgaggttggtttcagcatgtatctgcttgatattggcggtggctttcctggatctgaggatgtgaaacttaaatttgaagagatcaccggcgtaatcaacccagcgttggacaaatactttccgtcagactctggagtgagaatcatagctgagcccggcagatactatgttgcatcagctttcacgcttgcagttaatatcattgccaagaaaattgtattaaaggaacagacgggctctgatgacgaagatgagtcgagtgagcagacctttatgtattatgtgaatgatggcgtctatggatcatttaattgcatactctatgaccacgcacatgtaaagccccttctgcaaaagagacctaaaccagatgagaagtattattcatccagcatatggggaccaacatgtgatggcctcgatcggattgttgagcgctgtgacctgcctgaaatgcatgtgggtgattggatgctctttgaaaacatgggcgcttacactgttgctgctgcctctacgttcaatggcttccagaggccgacgatctactatgtgatgtcagggcctgcgtggcaactcatgcagcaattccagaaccccgacttcccacccgaagtagaggaacaggatgccagcaccctgcctgtgtcttgtgcctgggagagtgggatgaaacgccacagagcagcctgtgcttcggctagtattaatgtgtagatagcactctggtagctgttaactgcaagtttagcttgaattaagggatttggggggaccatgtaacttaattactgctagttttgaaatgtctttgtaagagtagggtcgccatgatgcagccatatggaagactaggatatgggtcacacttatctgtgttcctatggaaactatttgaatatttgttttatatggatttttattcactcttcagacacgctactcaagagtgcccctcagctgctgaacaagcatttgtagcttgtacaatggcagaatgggccaaaagcttagtgttgtgacctgtttttaaaataaagtatcttgaaataattaggc

SEQ ID NO: 887 - DNA, 3069 bp, Homo sapiens
atgcaccacctcctggagcagtcggcggacatggcgaccgcgctgctggcgggagagaagctgcgggagctgatcctgccgggcgcgcaggacgacaaggcgggcgcgctggccgcgctgcttctgcagctgaagctggagctgccgttcgaccgggtggtcaccatcggcaccgtgctggtgcccatcctgctggtcaccctggtcttcaccaagaacttcgcagaggaacccatttactgttacaccccgcacaacttcacgcgcgaccaggcgctgtacgcccgcggctactgctggacggagctgcgggacgcgctgcccggcgtggacgccagcctgtggccgtcgctgtttgagcacaagttcctgccctacgcgctgctggccttcgccgccatcatgtacgtgcccgcgctgggctgggagttcctggcctccacgcgcctcacctccgagctcaacttcctgctgcaggagatcgacaactgttaccaccgggcggccgagggccgcgcgcccaagatcgagaagcagatccagtccaagggcccgggcatcacggagcgcgagaagcgcgagatcatcgagaacgcggagaaggagaagagcccggagcagaacctgttcgagaagtacctggagcgccgcggccgcagcaacttcctggccaagctgtacctggcgcggcacgtgctgatcctgctgctgagcgccgtgcccatctcctacctgtgcacctactacgccacgcagaagcagaacgagttcacctgcgcgctgggcgcgtccccggacggggcggcaggtgcggggcccgcggtgcgcgtgagctgcaagctcccgtccgtgcaactgcagcgcatcatcgcgggcgtggacatcgtgctgctgtgcgtcatgaacctcatcatcctcgtcaacctcatccacctcttcatcttccgcaagagcaacttcatcttcgacaagctgcacaaggtgggcatcaagacgcgccggcagtggcgccgctcgcagttctgcgacatcaacatcctggccatgttctgcaacgagaaccgcgaccacatcaagtcgctcaaccggctggacttcatcaccaacgagagcgacctcatgtacgacaacgtggtccggcagctgctggcggcgctggcgcagtccaaccacgacgccacccccacggtgcgcgactcgggggtgcagaccgtggaccccagcgccaaccccgccgagcccgacggcgccgccgagccgcccgtggtcaagcggccgcgcaagaagatgaagtggatccccaccagcaacccgcttccgcagcccttcaaggagccgctggccatcatgcgcgtggagaacagcaaggcggagaagccgaagcccgcgcgcaggaagacggccacggacacgctgatcgcgccgctgctggaccgctccgcccaccactacaagggcggagggggcgacccgggccccggccccgcccctgcccccgccccgccgcccgcccctgacaagaagcacgcgcgccacttctccctggacgtgcacccctacatcctcggcaccaagaaggccaaggccgaggcggtgcccgccgccctgcccgcctcccggagccaggaggggggcttcctgtcccaggcggaggactgtgggctaggcctggccccggcgcccatcaaagatgctccgctccccgagaaggaaatcccgtaccccacagagccagcccgggcagggcttccctcggggggcccgttccacgtccgctcacctcccgccgcccctgctgtggcccctctgacaccagccagcctgggcaaggcggagcccctcaccatcctgagccgaaacgccacacacccgctgctgcacatcaacacgctgtacgaggcccgggaggaggaggacgggggcccccgcctgccgcaggacgtgggggacctcatcgccatccctgccccacagcagatcctcatcgccaccttcgacgagccgagaacggtcgtgagtactgtggagttttgagggatggcaccgtccaggccgccgagagcccctctgcctgtgtcgtgtggcctggccagcctcccggtggacaccagccctgcgtggacgtggcctgtgcttcgcccgcactgcgcgcatccccaacctctgtccgcatgcctggggccttcgcccccacgtgctcgacaggggaacccgcccggacggcatcgccaggcactggctggggtggggaaaggtggcccagtggagccggtggccaggaaggctgaagcccgcttcccatgctcctgcatcaggtgcccagccgtgggtgggggccctgaggtgaagagtttatttttttagtccgtttcgtcctggccccgggctgtggcgagacagcccaactcccccagcccagctcccccagcccagagccagggaagaggaaggtggggccagtcccaccagtggggtggccacgcccatggggtcacatgctcaggggtcaccccctgcagggacctgatgccctcgggtgggagggaccgaggtccaccctcgggtcaaaggtcaacgtgcactttctccttgtcgcctgacagacattttattttactaagactgctgtaccgaacaagcatatttatcatcaggagacaggatgggtttaaagcaggatggtgtgtgtgtgaacgggcatgagcagaggtgagcgtgagcgagcgggtgtgtatgtacgagtgtgcacgtgtgtgcgtgtgcacagagggtgtggtgccagcttgagtgggagtgtgtgagtgtgagcaggcgggcgagtgcgtgagtgcacgccagcgcgtggcccatgtatgaggagtgaaggggcccaacgcaataaccacgtcccccacccgggccccccgccgcggctgaggccacatggcttcctgtgggagccccggccggcacccggctggtcccaccccaaatacctcagccatggagaccatgtcatgcagaattaacaaggtagcaccgagcatatcaataaatattattctgataatcaaaaaaaaaaaaaaaaaa

SEQ ID NO: 888 - DNA, 1729 bp, Homo sapiens
ggaacatggggctgtacgctgcggtggcaggcgtgctggccggcgtggagagccgccagggctctatcaaggggctggtgtactccagcaacttccagaacgtgaagcagctgtacgcgctggtgtgcgaaacgcagcgctactccgccgtgctggatgccgtgatctccagcgccggcctcctcagtgcgaagaagctgcagccgcacctggccaagggtgctagtgtatgagttgttgggaaagggctttcgagggggtgggggccaatggaaggctctgttgggacggcaccaggcgaggtgttgagttggctcggctcaaggttcttcggggtgtgagctggcatgaggacctgttggaagtgggatccaggcctggtccagcctcccagctgcctcgatttgtgcgtgtgaacactctcaagacctgctccgtttatgtagttatttcaagagacaaggtttctcctatcagggtcgggcttccaggctggatggagtgccctggcgcgatctcggctcaccgcaacctctgcctcctgggttcaagcgattctcctgcttcagccttctgagcagctgggattatgaaggggtggcctgcccctccacatctgtgggatatctcatcagccttgatgacttacaagccctcaaggggaagcattttctcctggactccttgatgccggagctgctggtgtttcccgcccagacagatctgcatgaacacccactgtaccgggccggacacctcattctgcaggacagggccagctgtctcccagccatgctgctggacccccgccaggctcccatgtcatcgatgcctgtgccgccccaggcaataagaccagtcacttggctgctcttctgaagaaccaagggaagatctttgcctttgacctggatgccaagcggctggcatccatggccacgctgctggcctgggttggcgtctcctgctgtgagctggctgaggaggacttcctggcggtctcccccttagatccgcgctatcgtgaggtccactatgtcctgctggatccttcctgcagtggctcgggtgagatggtatgccgagcagacagctggaggatcccggggcagggacacctagcccggtgcgtctgcatgccctggcagggttccagcagcgagccctgtgccacgcgctcactttcccttccctgcagcggctcgtctactccatgtgctccctctgccaggaggagaatgaagacatggtaccagatgcgctgcagcagaacccgggcgccttcaggctagctcccgccctgcctgcccggccccaccgaggcctgagcacgttcccgggtgccgagcactgcctccgggcttcccccaagaccacgcttagcggtggcttcttcgttgctgtaattgaacgggtcgagatgccgacctcagcctcacaggccaaagcatcagcaccagaacgcacacccagcccagccccaaagagaaagaagagacagcaaagagccgcagccggtgcttgcacaccgccttgcacatagcagaggctccaggctgactccttcctggtgggaaaggaagatgcctgtcctctccgtggaggaccctgggccctcaccgcaggcagcagtttgcattttgaaaggttattgggtcccttcctcgggctgtgttcttgctggtgagcaaaagtgttgcctgcagaaataaaatgcagaacgtactct

SEQ ID NO: 889 - DNA, 3763 bp, Homo sapiens
actgcgcgcatgcgcggcggccgccgaaggggcgggatccgaggcaagcgttggttctgtgcgcctcagagttggagcacacagctgtattaaaaaggcaaatcgaaggccgggcgcggtgactcacgcctgtcatcctagcactttgggaggccgaggcggctgaatcacttgaggttaggagtttgagatcagcccgggcaacatggtgaaaccccgtctctacaaaaatagaaaaattagccgagcgtgatggtggatgcctgtaatcctagctcctcgggaggctaaggagtataatgtctcaggaaggcgattatgggaggtggaccatatctagtagtgatgaaagtgaggaagaaaagccaaaaccagacaagccatctacctcttctcttctctgtgccaggcaaggagcagcaaatgagcccaggtacacctgttccgaggcccagaaagctgcacacaagaggaaaatatcacctgtgaaattcagcaatacagattcagttttacctcccaaaaggcagaaaagcggttcccaggaggacctcggctggtgtctgtccagcagtgatgatgagctgcaaccagaaatgccgcagaagcaggctgagaaagtggtgatcaaaaaggagaaagacatctctgctcccaatgacggcactgcccaaagaactgaaaatcatggcgctcccgcctgccacaggctcaaagaggaggaagacgagtatgagacatcaggggagggccaggacatttgggacatgctggataaagggaaccccttccagttttacctcactagagtctctggagttaagccaaagtataactctggagccctccacatcaaggatattttatctcctttatttgggacgcttgtttcttcagctcagtttaactactgctttgacgtggactggctcgtaaaacagtatccaccagagttcaggaagaagccaatcctgcttgtgcatggtgataagcgagaggctaaggctcacctccatgcccaggccaagccttacgagaacatctctctctgccaggcaaagttggatattgcgtttggaacacaccacacgaaaatgatgctgctgctctatgaagaaggcctccgggttgtcatacacacctccaacctcatccatgctgactggcaccagaaaactcaaggaatatggttgagccccttatacccacgaattgctgatggaacccacaaatctggagagtcgccaacacattttaaagctgatctcatcagttacttgatggcttataatgccccttctctcaaggagtggatagatgtcattcacaagcacgatctctctgaaacaaatgtttatcttattggttcaaccccaggacgctttcaaggaagtcaaaaagataattggggacattttagacttaagaagcttctgaaagaccatgcctcatccatgcctaacgcagagtcctggcctgtcgtaggtcagttttcaagcgttggctccttgggagccgatgaatcaaagtggttatgttctgagtttaaagagagcatgctgacactggggaaggaaagcaagactccaggaaaaagctctgttcctctttacttgatctatccttctgtggaaaatgtgcggaccagtttagaaggatatcctgctgggggctctcttccctatagcatccagacagctgaaaaacagaattggctgcattcctattttcacaaatggtcagctgagacttctggccgcagcaatgccatgccacatattaagacatatatgaggccttctccagacttcagtaaaattgcttggttccttgtcacaagcgcaaatctgtccaaggctgcctggggagcattggagaagaatggcacccagctgatgatccgctcctacgagctcggggtccttttcctcccttcagcatttggtctagacagtttcaaagtgaaacagaagttcttcgctggcagccaggagccaatggccacctttcctgtgccatatgatttgcctccagaactgtatggaagtaaagatcggccatggatatggaacattccttatgtcaaagcaccggatacgcatgggaacatgtgggtgccctcctgagaatcttgaggcactgtgaaatttaagtgtaagacattgagccacaaacatggaatctcttctttgtactggatgtccacttcccttaaagtcttatttgcacccttacaaaatctttccaaaggtcactcttatgaatggatgttggttatacttttaatggacattaacattcctaataaagtattagtttcttaattcacttttatatgttttggaaagaaaattagtgaacttctctatgttaaaaatacgtactgcttgagtatcccctgtctgaaatgcttgggaccagaagtgtttcagcttttggatttttttgaattttggaatatttgcatagcataatgagatatcttgggaatgggacccaaatctaaacacaaaattcatttatgtttcatatacaccttatatacaataacctaaaggtgattttatatgatattttgagtaattttatgcatgaaacaaagttttgacaggcttttgaccgtgattcatcacatgagttcaggcatggaaattttcatttggagcatcatgtcagcactcaaaaagttctggatcttggagcagttcagattttcagattagggatgctcaaatctatatagatataaaattatcctcacagtaacatagaatctcttggtgctgtcagctgttgggaattgaagattgactttgtgcttccaccctccatccagaaaggcacccttcattccaccagaactttacccaggaagaacacgatcatttcctttttcaccgatgccctctctcagctttctgagtacgtctcttggggtcgctggaggtgatcctaggatctgtctctgagaccaatgtgctgtttcagccccctgcagctaagaattgtattgactgtcctcacagcggcttttcatagctttcagcttcagctttacgaggcttctcctctctccctggcaccctgctggctgcctcactgcttacagacaggtcccaccaaacccaaacacctgcctagggtaaatgggtctctcttctatccccagaaactttcagaggaagcagctcatagaaacatacaaaagcacacaagtattttgggaaaaaatcctaaaaggtgacttaatttgatgccttaaattcacaagtgaggaagctaaggcctagaaggttaaggatgtccccagggtcacacagtgagcggggctcagagcttgagtgtctttgtgctttgtgtacattgtgttctccctagggtgctttagaccctgtttgttttcttctgcatgaggctgatttccagtttgtcatcaacctctttatcttataatttaggatagagttgaacgttagtcttgaaagattttctaaagtagtctttcaaactgttcctcagaggcctaggattttccaaaagtaccttaggaaccttgtaggctgcagtgggggtgtggcgatagagcaggaggcagggagacagggctgcagggcctcccaccttccaacagacaggctctgctgtatctgttgtacatactgggattctgtaaaggacattatctggggtgttgtatgtatttttgtgtgttctgctttttttaaataaacttgaaaagctactgaaaaaaaaaaaaaaaaaa

SEQ ID NO: 890 - DNA, 4119 bp, Homo sapiens
agacgcgacggtgctgggatcccgggagggagcggagcggacctgggcttggtcgcctccaagccggcgggaccgagtgctttaggccgcttgaaagaaagttgctccgacccgggaaaaggagaagatgaaggaagccaaggatgcccgctataccaatgggcacctcttcaccaccatttcagtttcaggcatgaccatgtgctatgcctgtaacaagagcatcacagccaaggaagccctcatctgcccaacctgcaatgtgactatccacaaccgctgtaaagacaccctcgccaactgtaccaaggtcaagcagaagcaacagaaagcggccctgctgaagaacaacaccgccttgcagtccgtttctcttcgaagtaagacaaccatccgggagcggccaagctcggccatctacccctccgacagcttccggcagtccctcctgggctcccgccgtggccgctcctccttgtctttagccaagagtgtttctaccaccaacattgctggacatttcaatgatgagtctcccctggggctgcgccggatcctctcacagtccacagactccctcaacatgcggaaccgaaccctatccgtggaatccctcattgacgaagaggtaatctacagtgagctgatgagtgactttgagatggatgagaaggactttgcagctgactcttggagtcttgctgtggacagcagcttcctgcagcagcataaaaaggaggtgatgaagcagcaagatgtcatctatgagctaatccagacagagctgcaccatgtgaggacactgaagatcatgacccgcctcttccgcacggggatgctggaagagctacacttggagccaggagtggtccagggcctgttcccctgcgtggacgagctcagtgacatccatacacgcttcctcagccagctattagaacgccgacgccaggccctgtgccctggcagcacccggaactttgtcatccatcgcttgggtgatctgctcatcagccagttctcaggtcctagtgcggagcagatgtgtaagacctactcggagttctgcagccgccacagcaaggccttaaagctctataaggagctgtacgcccgagacaaacgcttccagcaattcatccggaaagtgacccgccccgccgtgctcaagcggcacggggtacaggagtgcatcctgctggtgactcagcgcatcaccaagtacccgttactcatcagccgcatcctgcagcattcccacgggatcgaggaggagcgccaggacctgaccacagcactggggctagtgaaggagctgctgtccaatgtggacgagggtatttatcagctggagaaaggggcccgtctgcaggagatctacaaccgcatggaccctcgggcccaaaccccagtgcctggcaagggcccctttggccgagaggaacttctgaggcgcaaactcatccacgatggctgcctgctctggaagacagcgacggggcgcttcaaagatgtgctagtgctgctgatgacagatgtactggtgtttctccaggaaaaggaccagaagtacatctttcctaccctggacaagccttcagtggtatcgctgcagaatctaatcgtacgagacattgccaaccaggagaaagggatgtttctgatcagcgcagccccacctgagatgtacgaggtgcacacagcatcccgggatgaccggagcacctggatccgggtcattcagcagagcgtgcgcacatgcccatccagggaggacttccccctgattgagacagaggatgaggcttacctgcggcgaattaagatggagttgcagcagaaggaccgggcactggtggagctgctgcgagagaaggtcgggctgtttgctgagatgacccatttccaggccgaagaggatggtggcagtgggatggccctgcccaccctgcccaggggccttttccgctctgagtcccttgagtcccctcgtggcgagcggctgctgcaggatgccatccgtgaggtggagggtctgaaagacctgctggtggggccaggagtggaactgctcttgacaccccgagagccagccctgcccttggaaccagacagcggtggtaacacgagtcctggggtcactgccaatggtgaggccagaaccttcaatggctccattgaactctgcagagctgactcagactctagccagagggatcgaaatggaaatcagctgagatcaccgcaagaggaggcgttacagcgattggtcaatctctatggacttctacatggcctacaggcagctgtggcccagcaggacactctgatggaagcccggttccctgagggccctgagcggcgggagaagctgtgccgagccaactctcgggatggggaggctggcagggctggggctgcccctgtggcccctgaaaagcaggccacggaactggcattactgcagcggcaacatgcgctgctgcaggaggagctacggcgctgccggcggctaggtgaagaacgggcaaccgaagctggcagcctggaggcccggctccgggagagtgagcaggcccgggcactgctggagcgtgaggccgaagaggctcgaaggcagctggccgccctgggccagaccgagccactcccagctgaggccccctgggcccgcagacctgtggatcctcggcggcgcagcctccccgcaggcgatgccctgtacttgagtttcaaccccccacagcccagccgaggcactgaccgcctggatctacctgtcactactcgctctgtccatcgaaactttgaggaccgagagaggcaggaactggggagccccgaagagcggctgcaagacagcagtgaccctgacactggcagcgaggaggaaggtagcagccgtctgtctccgccccacagtccacgagactttaccagaatgcaggacatcccggaggagacggagagccgcgacggggaggctgtagcctccgagagctaagggggcccctcccccctgccccgtgccccactgaagaacattactgagggggctaaccttggggactccaatttgccaatgatgagggaacatttgaaagaactgcaaattgtccttgccagctcttgggatccttggatacctggggccatttaagaagctaggggaattaggccacaacaccccctgggacatccgaaagctacaccacagatgccagtggttcatgccttcttcccgcaactttaggaaaatttatttatttattgtttattagttatggggggagaggggagatttaaaggaccagggacatgggaaccaagccatagggatcagagggccttgtccttgaacactactggggtatattcaggctcatccacgcagctgctgggttcttgccctaacggccctcccctgcaacatccgtcttggaggagaggctgcagccacagcaccctactgccctttaaataaaggagggctgtgggcagggccatgtccctttctcctctcccctcaacctcttactgctgttctccctttctccgtccttcatggaagccctgggagataacctggcttcctggagttgatggaataaaggttggggtggccataatggtttgttgggggtgagggaaaaaacccacagggaccagaatgttttgttgttcttttgttttcttttttgtaccaaagtcaactgcacgtgttttatatttttaagagatcgtaggcaattagagatcgaagcctcctatctccacatctctgaagaagttgaggggtgggggagagaatgacttctgccttcatctgcagtaacggggggacctatactgacctcttccccagccatttagaaacaagttctagggtgggttggaaaatctccaagagccctgacctcatcttccacctcagcaaccatgacctgaaacctcagcgtgaatttgggggatttttcagtggaacccttgcccccaaatgtcgaccagcccccaaatgtcgaagaattttcttcttgccaattttgttgtttaaaaaaaaaattcagggaaaattaaaaacctggaactccataaggtactgtcttcaaaaaaaaaaaa

SEQ ID NO: 891 - DNA, 2783 bp, Homo sapiens
ggaggaagcgcggaatcaggaactggccggggtccgcaccgggcctgagtcggtccgaggccgtcccaggagcagctgcccgtgcggaacagcactatgggcttctcttccgagctgtgcagcccccagggccacggggtcctgcagcaaatgcaggaggccgagcttcgtctactggagggcatgagaaagtggatggcccagcgggtcaagagtgacagggagtatgcaggactgcttcaccacatgtccctgcaggacagtgggggccagagccgggccatcagccctgacagccccatcagtcagtcctgggctgagatcaccagccaaactgagggcctgagccgcttgctgcggcagcacgcagaggatctgaactcagggcccctgagcaagctgagcctgctcatccgggaacggcagcagcttcgcaagacctacagcgagcagtggcagcagctgcagcaggagctcaccaagacccacagccaggacattgagaagctgaagagccagtaccgagctctggcacgggacagtgcccaagccaagcgcaagtaccaggaggccagcaaagacaaggaccgtgacaaggctaaggacaagtatgtgcgcagcctgtggaagctctttgctcaccacaaccgctatgtgctgggcgtgcgggctgcgcagctacaccaccagcaccaccaccagctcctgctgcccggcctgctgcggtcactgcaggacctgcacgaggagatggcttgcatcctgaaggagatcctgcaggaatacctggagattagcagcctggtgcaggatgaggtggtggccattcaccgggagatggctgcagctgctgcccgcatccagcctgaggctgagtaccaaggcttcctgcgacagtatgggtccgcacctgacgtcccaccctgtgtcacgttcgatgagtcactgcttgaggagggtgaaccgctggagcctggggagctccagctgaacgagctgactgtggagagcgtgcagcacacgctgacctcagtgacagatgagctggctgtggccaccgagatggtgttcaggcggcaggagatggttacgcagctgcaacaggagctccggaatgaagaggagaacacccacccccgggagcgggtgcagctgctgggcaagaggcaagtgctgcaagaagcactgcaggggctgcaggtagcgctgtgcagccaggccaagctgcaggcccagcaggagttgctgcagaccaagctggagcacctgggccccggcgagcccccgcctgtgctgctcctgcaggatgaccgccactccacgtcgtcctcggagcaggagcgagaggggggaaggacacccacgctggagatccttaagagccacatctcaggaatcttccgccccaagttctcgctccctccaccgctgcagctcattccggaggtgcagaagcccctgcatgagcagctgtggtaccacggggccatcccgagggcagaggtggctgagctgctggtgcactctggggacttcctggtgcgggagagccagggcaagcaggagtacgtgctgtcggtgctgtgggatggtctgccccggcacttcatcatccagtccttggataacctgtaccgactggaaggggaaggctttcctagcattcctttgctcatcgaccacctactgagcacccagcagcccctcaccaagaagagtggtgttgtcctgcacagggctgtgcccaaggacaagtgggtgctgaaccatgaggacctggtgttgggtgagcagattggacgggggaactttggcgaagtgttcagcggacgcctgcgagccgacaacaccctggtggcggtgaagtcttgtcgagagacgctcccacctgacctcaaggccaagtttctacaggaagcgaggatcctgaagcagtacagccaccccaacatcgtgcgtctcattggtgtctgcacccagaagcagcccatctacatcgtcatggagcttgtgcaggggggcgacttcctgaccttcctccgcacggagggggcccgcctgcgggtgaagactctgctgcagatggtgggggatgcagctgctggcatggagtacctggagagcaagtgctgcatccaccgggacctggctgctcggaactgcctggtgacagagaagaatgtcctgaagatcagtgactttgggatgtcccgagaggaagccgatggggtctatgcagcctcagggggcctcagacaagtccccgtgaagtggaccgcacctgaggcccttaactacggccgctactcctccgaaagcgacgtgtggagctttggcatcttgctctgggagaccttcagcctgggggcctccccctatcccaacctcagcaatcagcagacacgggagtttgtggagaaggggggccgtctgccctgcccagagctgtgtcctgatgccgtgttcaggctcatggagcagtgctgggcctatgagcctgggcagcggcccagcttcagcaccatctaccaggagctgcagagcatccgaaagcggcatcggtgaggctgggacccccttctcaagctggtggcctctgcaggcctaggtgcagctcctcagcggctccagctcatatgctgacagctcttcacagtcctggactcctgccaccagcatccacactgccggcaggatgcagcgccgtgtcctctctgtgtccctgctgctgccagggcttcctcttccgggcagaaacaataaaaccacttgtgcccactgaa

SEQ ID NO: 892 - DNA, 3023 bp, Homo sapiens
tgaattcaaaacagttactctgaatggtctttgctaagaacaatttaatgattaagtaaggtcagtgtccttggaagtccaaactctagccagatttccctggtctacacccctagggataaggtaaatgtttaagcacacagtgaacttcctgaggcccccaaatctaatggaactagctattgagggctaaaagaggatggtttttttagaaaactcgaagcaaatctctcaggctggggatatttcaaagactactactattattattaataacaattgcaatatttgttgagtccctaaatgaagctaaaactttgttctaataaatttaatctttacagcaacctatgaggtagataatattgtcattcccatgagggagctaaggatcagagaaggtaagtcacttgtctaaggtcacatagctagcatgttatgcaatcaggagtcaaacctggtttgtctgaatctgaagtccatctgctctgtgcacttttataccgtctgctttttcctttattcctaaccttcttccattctgattcccactgagtagtggacaggaaccactgaagtttgcctgacaccatcaaccaggccctagtcacctggctttgcctttgccctgctgtgtgatcttagctccctgcccaggcccacagccatggccatggcccagaaactcagccacctcctgccgagtctgcggcaggtcatccaggagcctcagctatctctgcagccagagcctgtcttcacggtggatcgagctgaggtgccgccgctcttctggaagccgtacatctatgcgggctaccggccgctgcatcagacctggcgcttctatttccgcacgctgttccagcagcacaacgaggccgtgaatgtctggacccacctgctggcggccctggtactgctgctgcggctggccctctttgtggagaccgtggacttctggggagacccacacgccctgcccctcttcatcattgtccttgcctctttcacctacctctccttcagtgccttggctcacctcctgcaggccaagtctgagttctggcattacagcttcttcttcctggactatgtgggggtggccgtgtaccagtttggcagtgccttggcacacttctactatgctatcgagcccgcctggcatgcccaggtgcaggctgtttttctgcccatggctgcctttctcgcctggctttcctgcattggctcctgctataacaagtacatccagaaaccaggcctgctgggccgcacatgccaggaggtgccctccgtcctggcctacgcactggacattagtcctgtggtgcatcgtatcttcgtgtcctccgaccccaccacggatgatccagctcttctctaccacaagtgccaggtggtcttctttctgctggctgctgccttcttctctaccttcatgcccgagcgctggttccctggcagctgccatgtcttcgggcagggccaccaacttttccacatcttcttggtgctgtgcacgctggctcagctggaggctgtggcactggactatgaggcccgacggcccatctatgagcctctgcacacgcactggcctcacaacttttctggcctcttcctgctcacggtgggcagcagcatcctcactgcattcctcctgagccagctggtacagcgcaaacttgatcagaagaccaagtgaagggggatggcatctggtagggagggaggtatagttgggggacaggggtctgggtttggctccaggtgggaacaaggcctggtaaagttgtttgtgtctggcccacagtgactctctgtgcacgactcaactgccaagggcatcactggccaattcttggatttagggattggctaggagttgctggggtccactcctgggcctgccccagctccttgcccagggagagggaaagagttaacggtgtgggccactccagcttgcccttccactgccactcactggggtgaggctgggggtcagcttggtgaggattggggcttctagattgtctaggcaggaggtgaaacttaggccagagtcagatttgagctgagccaggggaggccttggcaacctacttctactcagatttcattgctggatgcggaaggggtaggcccaaaatatatacaggatcttactgtcccttgaagcccagccacaagtgttggagctgcagagagaccccaaaggtagtagattgtgccagatacaaatgggtcccatccagtgcttcatactccttcagtcactatcccagacagtgagccccagatctcctagctctggcttctgtgtcccacacggcctgttcccagcttctctcctggttcccttgttacggattcatttatccattcagtgtttcctgggcctctgctcagaggcaggtcaccactgggccctgtggatcaatgcaagatgacaaaggctttttttttttttttttttttttttttttttgaggagtttcgctcttgttggctaggctggagtaaaatggtgcgatctcggctcactgcacctccgcctcccaggttcaagcgattttcctgcctcagcctcccgagtagctggggttacaggcatgcaccaccatgcctggctaattttctgtatttttagtagagacggggtttctccatgttggtcaggctggtcttgaactcctgacctcaggtgatctgcccgtctcggcctcccaaagtgctgggattaccggcatgagccactgcgcctggccgacaaaggctttgatatcagaatgaactgtcaagggaggtgctggagagggattaacctgtgctgcctgggaccctcagggtcttaggttggggagtgtgaataggagtttgcagatggagaataggaagggcattccaggcagagggaaacctgtgcagagaccaagaggtgtggaaggaaaagtggggttggggctgggtggtctggattatggcctggatgcaataaagtactgtgacagtagcca

SEQ ID NO: 893 - DNA, 662 bp, Homo sapiens
accgccgacgcagacccctctctgcacgccagcccgcccgcacccaccatggccacagttcagcagctggaaggaagatggcgcctggtggacagcaaaggctttgatgaatacatgaaggagctaggagtgggaatagctttgcgaaaaatgggcgcaatggccaagccagattgtatcatcacttgtgatggtaaaaacctcaccataaaaactgagagcactttgaaaacaacacagttttcttgtaccctgggagagaagtttgaagaaaccacagctgatggcagaaaaactcagactgtctgcaactttacagatggtgcattggttcagcatcaggagtgggatgggaaggaaagcacaataacaagaaaattgaaagatgggaaattagtggtggagtgtgtcatgaacaatgtcacctgtactcggatctatgaaaaagtagaataaaaattccatcatcactttggacaggagttaattaagagaatgaccaagctcagttcaatgagcaaatctccatactgtttctttcttttttttttcattactgtgttcaattatctttatcataaacattttacatgcagctatttcaaagtgtgttggattaattaggatcatccctttggttaataaataaatgtgtttgtgct

SEQ ID NO: 894 - DNA, 1782 bp, Homo sapiens
ggagagatgatgtttaggtccgggactgtcagtcagtgcgcggccaggtacgggccgacgggcccgcggggccggcgccgccatggcggccgtgtttgatttggatttggagacggaggaaggcagcgagggcgagggcgagccagagctcagccccgcggacgcatgtccccttgccgagttgagggcagctggcctagagcctgtgggacactatgaagaggtggagctgactgagaccagcgtgaacgttggcccagagcgcatcgggccccactgctttgagctgctgcgtgtgctgggcaaggggggctatggcaaggtgttccaggtgcgaaaggtgcaaggcaccaacttgggcaaaatatatgccatgaaagtcctaaggaaggccaaaattgtgcgcaatgccaaggacacagcacacacacgggctgagcggaacattctagagtcagtgaagcacccctttattgtggaactggcctatgccttccagactggtggcaaactctacctcatccttgagtgcctcagtggtggcgagctcttcacgcatctggagcgagagggcatcttcctggaagatacggcctgcttctacctggctgagatcacgctggccctgggccatctccactcccagggcatcatctaccgggacctcaagcccgagaacatcatgctcagcagccagggccacatcaaactgaccgactttggactctgcaaggagtctatccatgagggcgccgtcactcacaccttctgcggcaccattgagtacatggcccctgagattctggtgcgcagtggccacaaccgggctgtggactggtggagcctgggggccctgatgtacgacatgctcactggatcgccgcccttcaccgcagagaaccggaagaaaaccatggataagatcatcaggggcaagctggcactgcccccctacctcaccccagatgcccgggaccttgtcaaaaagtttctgaaacggaatcccagccagcggattgggggtggcccaggggatgctgctgatgtgcagagacatccctttttccggcacatgaattgggacgaccttctggcctggcgtgtggacccccctttcaggccctgtctgcagtcagaggaggacgtgagccagtttgatacccgcttcacacggcagacgccggtggacagtcctgatgacacagccctcagcgagagtgccaaccaggccttcctgggcttcacatacgtggcgccgtctgtcctggacagcatcaaggagggcttctccttccagcccaagctgcgctcacccaggcgcctcaacagtagcccccgggcccccgtcagccccctcaagttctccccttttgaggggtttcggcccagccccagcctgccggagcccacggagctacctctacctccactcctgccaccgccgccgccctcgaccaccgcccctctccccatccgtcccccctcagggaccaagaagtccaagaggggccgtgggcgtccagggcgctaggaagccgggtgggggtgagggtagcccttgagccctgtccctgcggctgtgagagcagcaggaccctgggccagttccagagacctgggggtgtgtctgggggtggggtgtgagtgcgtatgaaagtgtgtgtctgctggggcagctgtgcccctgaatcatgggcacggagggccgcccgccacgccccgcgctcaactgctcccgtggaagattaaagggctgaatcatggtgctgaaaaaaaaaaaaa

SEQ ID NO: 895 - DNA, 1730 bp, Homo sapiens
ggcggtgccggccgaacccagacccgaggttttagaagcagagtcaggcgaagctgggccagaaccgcgacctccgcaaccttgagcggcatccgtggagtgcgcctgcgcagctacgaccgcagcaggaaagcgccgccggccaggcccagctgtggccggacagggactggaagagaggacgcggtcgagtaggtgtgcaccagccctggcaacgagagcgtctaccccgaactctgctggccttgaggtggggaagccggggagggcagttgaggaccccgcggaggcgcgtgactggttgagcgggcaggccagcctccgagccgggtggacacaggttttaaaacatgaatcctacactcatccttgctgccttttgcctgggaattgcctcagctactctaacatttgatcacagtttagaggcacagtggaccaagtggaaggcgatgcacaacagattatacggcatgaatgaagaaggatggaggagagcagtgtgggagaagaacatgaagatgattgaactgcacaatcaggaatacagggaagggaaacacagcttcacaatggccatgaacgcctttggagacatgaccagtgaagaattcaggcaggtgatgaatggctttcaaaaccgtaagcccaggaaggggaaagtgttccaggaacctctgttttatgaggcccccagatctgtggattggagagagaaaggctacgtgactcctgtgaagaatcagggtcagtgtggttcttgttgggcttttagtgctactggtgctcttgaaggacagatgttccggaaaactgggaggcttatctcactgagtgagcagaatctggtagactgctctgggcctcaaggcaatgaaggctgcaatggtggcctaatggattatgctttccagtatgttcaggataatggaggcctggactctgaggaatcctatccatatgaggcaacagaagaatcctgtaagtacaatcccaagtattctgttgctaatgacaccggctttgtggacatccctaagcaggagaaggccctgatgaaggcagttgcaactgtggggcccatttctgttgctattgatgcaggtcatgagtccttcctgttctataaagaaggcatttattttgagccagactgtagcagtgaagacatggatcatggtgtgctggtggttggctacggatttgaaagcacagaatcagataacaataaatattggctggtgaagaacagctggggtgaagaatggggcatgggtggctacgtaaagatggccaaagaccggagaaaccattgtggaattgcctcagcagccagctaccccactgtgtgagctggtggacggtgatgaggaaggacttgactggggatggcgcatgcatgggaggaattcatcttcagtctaccagcccccgctgtgtcggatacacactcgaatcattgaagatccgagtgtgatttgaattctgtgatattttcacactggtaaatgttacctctattttaattactgctataaataggtttatattattgattcacttactgactttgcattttcgtttttaaaaggatgtataaatttttacctgtttaaataaaatttaatttcaaatgtagtggtggggcttctttctatttttgatgcactgaatttttgtgtaataaagaacataattgggctctaagccataaaaaaaaaaaaaaaaaa

SEQ ID NO: 896 - DNA, 1613 bp, Homo sapiens
aagctactcagataagaggctccaagaggacatttttggatgtgaaaaacaatgagaaggaggacaacacacatttacaatcgtcttaattttgtactcagaaaaaggatgtgaagacaatgcacagggaatacaatagtttcagatctgtgtacagtttccttttgcttcatctcctgcaacaatgtaatgaagacaccatgatatcattaacatttcacacaaaaggaaaatgaggctgaaatggtgtgggcaaggcccaggaatctggagcatccctaaccaagcagcagagcacctgggatagagaaagtgctcaagaatgttcacttactgattactacaatcaaaaaaagatacgacactaatttaccacattcttcttacttattttatgagatactattcttccaaggtggagaaagtggagaaagtagagtgacgcagctaagggagtaaatcgaccctcagccaacaagtggcaaaagcctgaagaaagtgatcaagatcactgatgaccccgcggcccatctccaagggggcgggtatcacaaccccgacgccacaccacgtatcattccgcaaaactcccgcgcctcccacgcagaactggcaagagggaaggcgagacagcagtgaacagctggtacgcagcacccacagcaccgcggcagcagctagtgccgactcccgcctagctcttttgactctgttcgcgggaagaatggggaaacagtaaggttgcggcgcctcccgcgagacgaggtacctgaggctggccccgcagtcccccgccgcaccagcaccggagcttcacaccccacttccggggtcaagtcaccgccgggaatcctgtgatcgcagaaaggtagtctcaggttccgcccctatccaagtcccgcctccactgcctctcgccctgtatctgtcaacttccgggacgccgcgcgtcactaagcagccaatctccacttccggactcatccagccccttctccacccctttcagagacagcgcgattgcgatttaggtttccgcgcatttaattggcgaagctggagcgctagtcttcgctgattggtgccgagaaatctgccccatagacacccgcggggcgcacagtttcagtcgtccgtgggtttcccgccagccgcagtcttggaccataatcatggtggacatgatggacttgcccaggtcgcgcatcaacgccggcatgctagctcaattcatcgacaagcctgtctgcttcgtagggaggctggaaaagattcatcccaccggaaaaatgtttattctttcagatggagaaggaaaaaatggaaccatcgagttgatggaaccccttgatgaagaaatctctggaattgtggaagtggttggaagagtaaccgccaaggccaccatcttgtgtacatcttatgtccagtttaaagaagatagccatccttttgatcttggactttacaatgaagctgtgaaaattatccatgacttccctcagttttatcctttagggattgtgcaacatgattgatcttgatggattttcatacgattgtaaatgagctatattaaagtctattaaaggaaaaaaaaaaaaaaaaaaaaa

SEQ ID NO: 897 - DNA, 5639 bp, Homo sapiens
agaagggagacagtggcggtcgcggcggggccgatccgagagttccccttagagaacggagctcacgggcggggaggcctcacctgctagtaggacgcagaaagacagaaggcgaaggagaccccgacttcccgggtcagccccagagccaccccctgccgtagccatcttgcctctctgctgagcggaagcccccgttcggctcctgtctgttagcggcctctctaggctaccactgacaccgtctctgtggcccggagcctaagagaccggaagttcgtgtttccaggcgcttccggaaaccgcgggagagggtcgctgacgtggaggcgtccgaagggcagcagggtgtgtcggggctcggattaagacatcggagtcggagacctgagagatgttaaccaaattcgagaccaagagcgcgcgggtcaaagggctcagctttcaccccaaaagaccttggatcctgactagtttacataatggggtcatccagttatgggactatcggatgtgcactctcattgacaagtttgatgaacatgatggtccagtgcgaggcattgacttccataagcagcagccactgttcgtctctggaggagatgactataagattaaggtttggaattacaagcttcggcgctgtcttttcacattgcttgggcacttagattatattcgcaccacgttttttcatcatgaatatccctggattctgagtgcctccgatgatcagaccatccgagtgtggaactggcaatctagaacctgtgtttgtgtgttaacagggcacaaccattatgtgatgtgtgctcagttccaccccacagaagacttggtagtatcagccagcctggaccagactgtgcgcgtttgggatatttctggtctgaggaaaaaaaacctgtcccctggtgcggtggaatcggatgtgagaggaataactggggttgatctatttggaactacagatgcagtggtgaagcatgtactagagggtcacgatcgtggagtaaactgggctgccttccaccccactatgccccttattgtatctggggcagatgatcgtcaagtgaagatctggcgcatgaatgaatcaaaggcatgggaggttgatacctgccggggccattacaacaatgtatcttgtgccgtcttccaccctcgccaagagttgatcctcagcaattctgaggacaagagtattcgagtctgggatatgtctaagcggactggggttcagactttccgcagagaccatgatcgtttctgggtcctagctgctcaccctaaccttaacctctttgcagcaggccatgatggtggtatgattgtgtttaagctggaacgggaacggccagcctatgctgttcatggcaatatgctacactatgtcaaggaccgattcttacgacagctggatttcaacagctccaaagatgtagctgtgatgcagttgcggagtggttccaagtttccagtattcaatatgtcatacaatccagcagaaaatgcagtcctgctttgtacaagagctagcaatctagagaatagtacctatgacctgtacaccatccctaaagatgctgactcccagaatcctgatgcgcctgaagggaaacgatcctcaggcctgacagccgtttgggtcgctcgaaatcggtttgctgtcctagatcggatgcattcgcttctgatcaagaatctgaagaatgagatcaccaaaaaggtacaggtgcccaactgtgatgagatcttctatgctggcacaggcaatctcctgcttcgagatgcggactctatcacactctttgacgtacagcagaagcggactctggcatctgtgaagatttctaaagtgaaatacgttatctggtcagcagacatgtcacatgtagcactactagccaaacacgccattgtgatctgtaaccgcaaactggatgctttatgtaacattcatgagaacattcgtgtcaagagtggggcctgggatgagagtggggtatttatctataccacaagcaaccacatcaaatatgctgtcaccactggggaccacgggatcattcgaactctggatttacccatctatgtcacacgggtgaagggcaacaatgtatactgcctagacagggagtgtcgtccccgggtactcaccattgatcccactgagttcaaattcaagctggccctgatcaacagaaaatatgatgaggtactgcacatggtgaggaatgccaaactagttggccagtctattattgcttatctccagaagaagggctatcctgaagtggcactgcattttgtcaaggatgagaaaactcgctttagtctggcactggagtgtggaaacattgagattgctctggaagcagccaaagcactggatgacaagaactgctgggaaaagctgggagaagtggccctgctgcaggggaaccaccagattgtggaaatgtgctatcagcgtaccaaaaactttgacaaactttccttcctgtatcttatcactggcaacttagaaaaacttcgcaagatgatgaagattgctgagatcagaaaggacatgagtggccactatcagaatgccctatacctgggtgatgtgtcagagcgtgtgcggatcctgaagaactgtggacagaagtccctggcctatctcacagctgctacccatggcttagatgaagaagctgagagcctaaaggagacatttgacccagagaaggagacaatcccagacattgaccctaatgccaagctgctccagccacctgcacctatcatgccattggataccaattggcctttattgactgtatccaaaggattttttgaaggcaccattgccagcaaagggaagggaggagcactggctgctgacattgacattgacactgttggtacagagggctggggagaggatgcagagctgcagttggatgaagatgggtttgtggaggctacagaaggtttgggggatgatgctcttggcaagggacaggaagaaggaggtggctgggatgtagaagaagatctggagctccctcctgagctggatatatcccctggggcagctggtggggctgaagatggtttctttgtgcccccaaccaagggaacaagtccaactcagatctggtgtaataactctcagcttccagttgatcacatcctggcaggctctttcgaaacagccatgcggctccttcatgaccaagtaggggtaatccagtttggcccctacaagcaactgttcctacagacatacgcccgaggccgcacaacctatcaggctctgccctgcctaccctccatgtatggctatcctaatcgcaactggaaggatgcagggctgaagaatggtgtaccagctgtgggcctgaagcttaatgacctcatccaacggttgcagctgtgctaccagctcaccacagttggcaaatttgaggaggctgtggaaaaattccgttccatccttctcagtgtgccacttcttgttgtggacaataaacaagagattgcagaggcccagcagctcatcaccatttgccgtgagtacattgtgggtttgtccgtggagacagaaaggaagaagctgcccaaagagactctagaacagcagaagcgcatctgtgagatggcagcctatttcacccactcaaacctgcagcctgtgcacatgatcctggtgctgcgtacagccctcaatctgttcttcaagctcaagaacttcaagacagctgccacctttgctcggcgcctactagaactcgggcccaagcctgaggtggcccaacagacccgaaaaatcctgtctgcctgtgagaagaatcccacagatgcctaccagctcaattatgacatgcacaacccctttgacatttgtgctgcatcatatcggcccatctaccgtggaaagccagtagaaaagtgtccactcagtggggcctgctattcccctgagttcaaaggtcaaatctgcagggtcaccacagtgacagagattggcaaagatgtgattggtttaaggatcagtcctctgcagtttcgctaaggccccctttgtgtgcatgggtcagtcaccatatgttccccccagagaatgtgtctatatcctccttctaacagcaccttccccctgcagctactcttcagatctggctctctgtaccctaaaacctagtatctttttctcttctatggaaaatccgaaggtctaaacttgacttttttgaggtcttctcaacttgactacagttgtgctcataattgtccttgcctttccagcttaattattttaaggaacaaatgaaaactctgggctgggtggagtggctcatacctgtaatcccagcactttgggaggctacggtgggcagatcatctgaggccaggagttcgagacctgcctggccaacatggcaacaccccgtctctaataaaaatataaaaattagcctggcatggtagcatgcgcctatagtcccagctgctcaggaggctgaggcatgagaatcgcttgaacctaggaggtggaggttgcattcaactgagatcataccacttcattccagcctgggtgacagagcaagactctgtctcaaaaaaaaaaaaaaggaaaactctgtgatggacatttgtttagtaaatcccttcagtatttatccctcctttccccacagcagctttctttcctgtcaactagaaaggagcaggatgtaataaatacattttggtgtgactaggccacaccaactcttaatcatctcccattttccttagacatttaaatttcaaggcaggtaccctctgtgtactcagaaatttgaagaagttatttggttttccaaaatgcacactgcgggttattgatttgttctttacaactattgttctcatatttctcacactaaataaatctctatgagagcttcttgacttggccatttatttcttggacactctcatgttcttgttcacccatgcaggcaccccaccaaagtacatatcttccttccagtaataatttttaattacaaaataaacatccactattggaaaaaaaaaaaaaaagctagccgggcatggtggtgggtgcctgtaatcccagctactctggaggctgaggcagaggattgcttgaacccgggaggcggaggttgcagtaagctgagatcgcgccaccgcactccagcctgggcgacagagtgagactccatctcaaaaaaaaagaaagaaaaaaagaagcacatgtttttcatagggtatatatgaggacctaaactgctgtgaaaatgatagaaagcaagtagctcccttattctgtttttgattgcagccttttatcttttgctaattatagcaatatttattgagcacctgccatgtgactgtcactgttctagatattttacatgtaatatacagataaaagaatagtactttatatatattacaatgatacaatgattacattaacaatacaatattttgcttgtcatatgctaagaataattgggtagagtgacattactgtgccttcgattaaaataagtacttttttgcgtgttaaattcatgttttcaataaataataaatgcatatagttgaaaaatcagtaaata

SEQ ID NO: 898 - DNA, 509 bp, Homo sapiens
cgccggggaagcgaagtaggcaggggcgaggcggctggggaccgcggggcggacgggagcgagtatgtccgctctgactcggctggcgtctttcgctcgcgttggaggccgccttttcagaagcggctgcgcacggactgctggagatggtggagtccgtcatgccggtggtggtgtgcacattgagccccggtatagacagttcccccagctgaccagatcccaggtgttccagagcgagttcttcagcggactcatgtggttctggattctctggcgcttttggcatgactcagaagaggtgctgggtcactttccgtatcctgatccttcccagtggacagatgaagaattaggtatccctcctgatgatgaagactgaaggtgtagactcagcctcactctgtacaagagccaggtgagaatttcaaggattatcgacttcatattgcacattaaagttacaaattaaagtggcttggtcaagaatgagaaaaaaaaaaaaaaaa

SEQ ID NO: 899 - DNA, 4607 bp, Homo sapiens
acccactcgcatcccagggcgtctccggctgctcctattgagctgtctgctcgctgtgcccgctgtgcctgctgtgcccgcgctgtcgccgctgctaccgcgtctgctggacgcgggagacgccagcgagctggtgattggagccctgcggagagctcaagcgcccagctctgcccgaggagcccaggctgccccgtgagtcccatagttgctgcaggagtggagccatgagctgcgtcctgggtggtgtcatccccttggggctgctgttcctggtctgcggatcccaaggctacctcctgcccaacgtcactctcttagaggagctgctcagcaaataccagcacaacgagtctcactcccgggtccgcagagccatccccagggaggacaaggaggagatcctcatgctgcacaacaagcttcggggccaggtgcagcctcaggcctccaacatggagtacatgacctgggatgacgaactggagaagtctgctgcagcgtgggccagtcagtgcatctgggagcacgggcccaccagtctgctggtgtccatcgggcagaacctgggcgctcactggggcaggtatcgctctccggggttccatgtgcagtcctggtatgacgaggtgaaggactacacctacccctacccgagcgagtgcaacccctggtgtccagagaggtgctcggggcccatgtgcacgcactacacacagatagtttgggccaccaccaacaagatcggttgtgctgtgaacacctgccggaagatgactgtctggggagaagtttgggagaacgcggtctactttgtctgcaattattctccaaaggggaactggattggagaagccccctacaagaatggccggccctgctctgagtgcccacccagctatggaggcagctgcaggaacaacttgtgttaccgagaagaaacctacactccaaaacctgaaacggacgagatgaatgaggtggaaacggctcccattcctgaagaaaaccatgtttggctccaaccgagggtgatgagacccaccaagcccaagaaaacctctgcggtcaactacatgacccaagtcgtcagatgtgacaccaagatgaaggacaggtgcaaagggtccacgtgtaacaggtaccagtgcccagcaggctgcctgaaccacaaggcgaagatctttggaactctgttctatgaaagctcgtctagcatatgccgcgccgccatccactacgggatcctggatgacaagggaggcctggtggatatcaccaggaacgggaaggtccccttcttcgtgaagtctgagagacacggcgtgcagtccctcagcaaatacaaaccttccagctcattcatggtgtcaaaagtgaaagtgcaggatttggactgctacacgaccgttgctcagctgtgcccgtttgaaaagccagcaactcactgcccaagaatccattgtccggcacactgcaaagacgaaccttcctactgggctccggtgtttggaaccaacatctatgcagatacctcaagcatctgcaagacagccgtgcacgcgggagtcatcagcaacgagagtgggggtgacgtggacgtgatgcccgtggataaaaagaagacctacgtgggctcgctcaggaatggagttcagtctgaaagcctggggactcctcgggatggaaaggccttccggatctttgctgtcaggcagtgaatttccagcaccaggggagaaggggcgtcttcaggagggcttcggggttttgcttttatttttattttgtcattgcggggtatatggagagtcaggaaacttcctttgactgatgttcagtgtccatcactttgtggcctgtgggtgaggtgacatctcatcccctcactgaagcaacagcatcccaaggtgctcagccggactccctggtgcctgatcctgctggggcctgggggtctccatctggacgtcctctctcctttagagatctgagctgtctcttaaaggggacagttgcccaaaatgttccttgctatgtgttcttctgttggtggaggaagttgatttcaacctccctgccaaaagaacaaaccatttgaagctcacaattgtgaagcattcacggcgtcggaagaggccttttgagcaagcgccaatgagtttcaggaatgaagtagaaggtagttatttaaaaataaaaaacacagtccgtccctaccaatagaggaaaatggttttaatgtttgctggtcagacagacaaatgggctagagtaagagggctgcgggtatgagagaccccggctccgccctggcacgtgtccttgctggcggcccgccacaggcccccttcaatggccgcattcaggatggctctatacacagcagtgctggtttatgtagagttcagcagtcacttcagagatgtatcttgtctttgtcaggcccttcgtcttcatggcccacctgttttctgccgtgacctttggtcccattgaggactaaggatcgggaccctttctttaccccctacccgttgtggctcccaccctgcctcggactggtttacgtgtcctggttcacacccaggacttttctttgcaagcgaacctgtttgaagcccaagtcttaactcctggtctcgtaaggttccactgagacgagatgtctgagaacaaccaaagaaggcctgctctttgctgcttttaaaaaatgacaattaaatgtgcagattccccacgcacccgatgacctattttttcagccgtgggaggaatggagtctttggtacattcctcaccgaggttagcagctcagtttgtggttatgaaaccgtctgtggcctcatgacagcgagagatgggaatacactagaaggatctcttttcctgttttcgtgaaacgactcttgccaaacgttcccgaggcgccaaggagtgtagtacaccctggctgccatcactctataaaagtgcttcatgagcccagaccaaaagcccacagtgaaatgaagtacccttttgtaaatagcatttttttgcagaaggtgaaaattccactctctaccaccgggccagccaatagatcactttggtgaatgctagtttcaaatttgattcaaaatatttcttaggtgaaagaactagcagaaagtcaaaaactaagatactgtagactggacaagaaattctacctgggcacctaggtgatgccttctttctttgattgcctttctaataaatgcagaatctgaaggtaaataggtttaaaacaaaacaaaaacccacccctttaaggagttggtaaaaagcagttcaactcttagcttgactgagctaaaattcacaggactacgtgctttgtgcattgtagtctagtcgtaattcataggtactgactcctcagccccaaatgtcggagaggaagaattcggtcagcctgtcaggtcgtgagtccagttaccaccaaacatctgggaaacttctgggtgctgggtgctctgctgctggacttttgtggctgtgtctgtgtctgcaagataaattagatcgccctgtggggtttgcagaattagtgaagggtccaggacgatcccagtgggctcgcttccaaagcatcccactcaagggagacttgaaacttccagtgtgagttgaccccatcatttaaaaataaagtccccgggttccttaatgcctccttcactgggccttcctagcaggatagaaagtccttgcccagagcaggacctggctgtctttttttttttttttttttttttcccgagaccaagtttcactctgttgcccaaggtagagtgcagtggcgtgatctctgctcattgcaactgccgcctcccgggttcaagcaattctcatgcatcagcctcccaagtacctgggactacaggcgtgagctaccatgcccggctaatttttgtatttttagtagagatggggtttcattatgttggccaggctggtctcgaactccttacctcaggtgatccacccaccttggcctcccgaagtgctgggattacaggcatgagccactgcgcccggccatggacctggctgtctttatcatccccacaaacattttgaaactggaatatttgtcttcagaaaatggaaacaagactataaatgataagccctgtccctagcaccacctctcctgtgtgtggaatagaggcccctcgtgctaccaacacttaccctgtgtttaaaaagatcttgtaccaagccaacggcgttcctggctctcctgcccacaggatgaacattttcggcttccttaggagttttgccctaccgtattccaaagcgtgtgctggtttctcatattgtctgtaggctcactcagcccgcagtttatgtgtgtgcttttttctatgaaaaatgatgtattttgctacttcctgtgtacaaagttttattgtaaatgttttttgtgctttgcatgaacaggggccacgttgttgcaattgtttcagtagaactggtttgatttctaaaatgttcctgtaacatatcttttatgaacaaatctgaacaatttgtgaaataaaacattgaaaaccatcaaaaaaaaaaaaaaaaaa

SEQ ID NO: 900 - DNA, 4605 bp, Homo sapiens
atggcagctccaaccaaatgccagctccgcggaagattagtcctgctatgctcgctcctggggatgctatgggaggccagggccagtcagattcgctactcagtgcctgaagagacagaaaagggctatattgtgggcaacatctccaaggacctggctctggagccccgggagctggcggagcgccgagtccgcatcgtctctagaggtaggacgcagcttttctctctgaacccgcgcagcggcaccttggtcaccgcgggtaggatagaccgggaggagctctgtgctcagagcccgcggtgtctggtgaactttaaagtcctggttgaagacagagtgaaactgtacggaatagaaatagaagtaactgatattaacgacagcgccccaaagttccaggccgaaagtctggaagtaaaaattaacgaaatcgcggttcctggagcacgttatccacttccagaagctattgatccggatgttggcgtgaactccctccagagctaccagctcagccccaatcaccacttctccctgaacgtgcagactggagacaatggagccataaacccagagctggtgctggagcgcgccctggacagggaggaggcaactgcccaccacctggtcctcacggcctcggatggcggcgagccgcgtcgctccagcacagtgcgcatccatgtgacagtgttggatacaaatgataatgccccggtttttgctcaacggatttaccgagttaaagtccttgagaacgtgcccccaggcacctggctgcttactgcaacagccagcgacctggatgagggaatcaacggaaaagtggcatacaaattctggaaaattaatgaaaaacaatctctgctattccagcttaatgaaaatactggggaaatatcaacagcaaaaagtctagattatgaagaatgttcattttatgaaatggaaatacaagctgaagatggtgggggattgaaagggtggacaaaagtgctcatttcggtggaagatgtaaatgacaatagacctgaagtgaccattacatctctgtttagcccagtgagagaagacgcacctcagggaacagtaattcttcttttcaatgctcatgaccgagactccgggaagaatggtcaagttgtctgttctatccaggagaatctatcttttacattagaaaattcagaagaagattattacagattgttgacggcccaaattcttgaccgagaaaaagcctcagaatataatatcacggtgactgcaacagacagaggaactccgcccctgtccacagaaattcacatcaccctgcaagtgactgacatcaatgataatccacctgctttctctcaagcctcctactcagtctacctcccggaaaacaacgccagaggtacttccatcttctccgtgattgcctatgaccctgatagcaatgagaattctagagttatttactccttggcagaggataccatccaagggtctcctctctccacctatgtctctattaactcagacactggtgtgctgtatgctctgtgctcctttgactatgagcagtttagagatttgcaaatgcaggtgacggcaagtgacagtggaagcccaccacttagcagcaatgtgtcattgagactgtttgttttggaccagaatgacaatgccccagaaatcctgtaccctgccctccccactgatggttctactggtgtggagctggcaccccgctctgcagagcctggctacctggtgaccaaggtggtggcagtggacagagactcaggccagaatgcttggctctcctaccgcctattcaaggccagtgagccagggctcttctcggtggggctgcacacaggtgaagtgcgcacagctcgggccctgctagatagagatgcgctcaaacagagccttgtggtggctgtacaggaccatggccagccccctctctcggccactgtcacgctcacagtagccatagctgacagcatcccagacatcctggctgacctgggcagtcttcagatccctgcagacctggaggcctcagaccttaccctctacctcgttgtggctgtggcagtcgtctcctgtgtcttcctcaccttcgttatcacgctgctggccctcaggctgaggcactggcactcctcgcatctgctgcgggctaccagtgatgggttggctggtgtgcccacctcacactttgtgggtgtagatggggttcgagctttcctacagacctattctcaggagttctccctcaccgctgactcaaggaagagtcacctgatcttcccccagcccaactatgcagacacactcatcagccagcagagctgtgagaaaaatgagcctttgtgcgtctctgttgattccaagtttcctatagaagacacccctttggttccgcaagccccgcccaacacggactggcgtttctctcaggcccagagacccggcaccagcggctcccaaaatggcgatgacaccggcacctggcccaacaaccagtttgacacagagatgctgcaagccatgatcttggcgtccgccagtgaagctgctgatgggagctccaccctgggagggggtgccggcaccatgggattgagcgcccgctacggaccccagttcaccctgcagcacgtgcccgactaccgccagaatgtctacatcccaggcagcaatgccacactgaccaacgcagctggcaagcgggatggcaaggccccagcaggtggcaatggcaacaagaagaagtcgggcaagaaggagaagaagtaacatggaggccaggccaagagccacagggcggcctctccccaaccagcccagcttctccttacctgcacccaggcctcagagtttcagggctaacccccagaatactggtaggggccaaggccatgctccccttgggaaacagaaacaagtgcccagtcagcacctaccccttcccccccagggggttgaatatgcaaaagcagttccgctgggaacccccatccaatcaactgctgtacccatgggggtagtggggttactgtagacaccaagaaccatttgccacaccccgtttagttacagctgaactcctccatcttccaaatcaatcaggcccatccatcccatgcctccctcctccccaccccactccaacagttcctctttcccgagtaaggtggttggggtgttgaagtaccaagtaacctacaagcctcctagttctgaaaagttggaagggcatcatgacctcttggcctctcctttgattctcaatcttcccccaaagcatggtttggtgccagccccttcacctccttccagagcccaagatcaatgctcaagttttggaggacatgatcaccatccccatggtactgatgcttgctggatttagggagggcattttgctaccaagcctcttcccaacgccctggggaccagtcttctgttttgtttttcattgtttgacgtttccactgcatgccttgacttcccccacctcctcctcaaacaagagactccactgcatgttccaagacagtatggggtggtaagataaggaagggaagtgtgtggatgtggatggtgggggcatggacaaagcttgacacatcaagttatcaaggccttggaggaggctctgtatgtcctcaggggactgacaacatcctccagattccagccataaaccaataactaggctggacccttcccactacataatagggctcagcccaggcagccagctttgggctgagctaacaggaccaatggattaaactggcatttcagtccaaggaagctcgaagcaggtttaggaccaggtccccttgagaggtcagaggggcctctgtgggtgctgggtactccagaggtgccactggtggaagggtcagcggagccccagcaggaagggtgggccagccaggccattcttagtccctgggttggggaggcagggagctagggcagggaccaaatgaacagaaagtctcagcccaggatggggcttcttcaacagggcccctgccctcctgaagcctcagtccttcaccttgccaggtgccgtttctcttccgtgaaggccactgcccaggtccccagtgcgccccctagtggccatagcctggttaaagttccccagtgcctccttgtgcatagaccttcttctcccacccccttctgcccctgggtccccggccatccagcggggctgccagagaaccccagacctgcccttacagtagtgtagcgccccctccctctttcggctggtgtagaatagccagtagtgtagtgcggtgtgcttttacgtgatggcgggtgggcagcgggcggcgggctccgcgcagccgtctgtccttgatctgcccgcggcggcccgtgttgtgttttgtgctgtgtccacgcgctaaggcgaccccctcccccgtactgacttctcctataagcgcttctcttcgcatagtcacgtagctcccaccccaccctcttcctgtgtctcacgcaagttttatactctaatatttatatggctttttttcttcgacaaaaaaataataaaacgtttcttctgaaaagctg

SEQ ID NO: 901 - DNA, 4525 bp, Homo sapiens
cgcgggcggcgcggaagcggcggcggcgcggccggggcagccatgtcgccattgtctgcggcgcgggcggccctgcgggtctacgcggtaggcgccgcggtgatcctggcgcagctgctgcggcgctgccgcgggggcttcctggagccaggtccccacgcatgagcagccgtccagcaggcaggctccggtggagaagcaatggagaataaaagcctggagagctcccagacagacctgaagctggtggcccacccccgcgccaagagcaaggtgtggaagtatttcggcttcgacaccaacgccgagggatgcatcctgcagtggaagaaaatctactgccgcatctgcatggcccagatcgcctactccggaaacacctccaacctgtcctaccacctggagaagaaccaccccgaggaattctgcgagttcgtcaagagcaacacggagcagatgcgtgaagccttcgccaccgccttctccaagctgaagcccgagtcgtcccagcagcccgggcaggacgcgctggccgtcaaggccggccacggctacgacagcaagaagcagcaggagctgacggccgccgtgctgggcctcatctgcgaggggctgtacccagcctccatcgtggacgagcccaccttcaaggtgctgctgaagacggccgacccccggtatgagctgcccagccggaagtacatctctaccaaggccatccctgagaagtacggggccgtccgggaggtgatcctgaaggagctggccgaggccacctggtgtggcatctccaccgacatgtggaggagtgagaatcagaaccgcgcctacgtcacgctggccgcccacttcctgggcctgggcgcccccaactgcctgtccatgggctcccgctgcctgaagaccttcgaggtgcccgaagagaacacggcggagaccatcacgcgagtgctctatgaggtcttcatcgagtggggcatcagcgccaaggtcttcggggccaccaccaactatggcaaggacatcgtgaaggcgtgctccctgctggacgtcgcagtgcacatgccctgcctgggccacaccttcaatgccggcatccagcaggccttccagctcccgaagctgggggcgctgctgtcgcgctgccgcaaactggtggagtacttccagcagtctgccgtggccatgtacatgctctatgagaagcagaagcagcagaacgtggcccactgcatgctggtgagcaaccgcgtctcctggtgggggagcacgctggccatgctgcagcgcctcaaggagcagcagttcgtcatcgccggggtcttggtggaggacagcaacaaccaccacctcatgctggaggccagcgagtgggccaccatcgaggggctggtggagctcctgcagcccttcaagcaggtggccgagatgctgtcggcctccaggtaccccaccatcagcatggtgaagccgctgctgcacatgctcctgaacaccacgctcaacatcaaggagaccgactccaaggagctcagcatggccaaggaggtcatcgccaaggagctttccaagacctaccaggagacgcccgagatcgacatgtttctcaacgtggccaccttcctggacccccgctacaagaggctgcccttcctctccgccttcgagcggcagcaggtggagaatcgcgtggtggaagaggccaagggcctgctggacaaggtcaaagacggcggctaccggccggctgaggacaagatcttcccggtgcccgaggagcctcccgtcaagaagctcatgcggacatccacgccgccgcccgccagcgtcatcaacaacatgctggccgagatcttctgccagacaggcggcgtggaggaccaggaagagtggcatgcccaggtggtggaggagctgagcaacttcaagtcccagaaggtgcttggcctcaacgaagaccccctcaagtggtggtcagaccgcctggccctcttccccctgctgcccaaggtgctgcagaagtactggtgcgtgacggccacgcgcgtcgcccctgagcgtctcttcggatccgccgccaacgtggtcagcgccaagaggaaccggctggctcccgcgcacgtggacgagcaggtgtttctgtatgagaacgcccggagtggggcagaggcggaacccgaggaccaggacgagggggagtggggcctggaccaggagcaggtgttctccttgggggatggcgtcagcggcggtttctttggcattagggacagcagcttcctgtagcgaggaagcgtgttgtcttacaagtcatccccgcagcagcccattggatgctttgctgtaaatacttacccggtcagcttggttttgaacctcagagaccatccactgtctttgacacctagaaggtggaaaaaggaaagagatttgagaagtgagagagggtcgggggcggtggctcctgtctataatcgcagcactttgggaggccgaggtgggcagatcagctgaggtcaggagatcgagaccagcctggccaacatggcgaaaccccgtctctactaaaaatacaaaaattagccaggactgatggcatgtgcctgtaatcccagcttctggaggctgaggccagagaatcgcttgaacctgggaggtggaggttgcagtaagctgagatcgctgcactccagcctgggcgacaagagcgagactctctcaaaaagaaaaaagaagacacaagagaggtggctttgagtgggtttcctttcctcccctattcccggggcccggacgacttctgcttgggaactgccaacgcttctgcttgggaattgcgtgcagcagagcctagaggagctgttccttccttcacagatacttaagacctccaccatgtctgattcgagttctccctgggagggtttagaagaaacgcaggaacattctgggtggcgtcgaaggagcctttcccgatcatcatgtgtgacttctgcgaggtccagatcactgaattcatgtttacattctcgtgcaagcagggacctcttgcttctgagaaatggggaagagaccttttagccaaaatgcccttcttaaaaagagagacctttttttttaatgttcggttaaaaatgtgacagatgagtacaaaaatgcagacacttaacaaaaagcaaacagaaaaaaaagtgtggaatgtgttgtattttcgacaggttgctgccagagagcctgcttcctgctgcctgccgaaatttcactttgcggagttggtccttaaaactgggcggtggccgggcgtggtggctcacgctgaggtcaggagttcgagaccagcctggccaaccaacatggtgaaacctcgtgtctactaaaaatacaagaaactagccagatgcggtggcacccgcctgtaatcccagctactcgggaggctgaggcggaagattcgcttgagcccaggaggtggaggttgcagtgagccaagactacgccactgcactccagcctggaggccagagtgagactccgtctcaaaacaaaacaaaagtgggtggctcacgggtccggaggttatgtcttcggtgtctcagccctaaaagtccagttcccccgtgcggccagcttttccacataaggtgtttttgatttgattaccggaaaggactcttgattcttctcttttaaactgaataccataggggaaatgaattttaaaatattgcccccggaggggttttccgtggctggattcctgcgagttgctttcagtcattcagggaaacagaaagacgttttccaacatgtagaactgctttttaactggaggaaaaatacttcaggaggcttagcatattgcttggattctacgtgcagcgggttctctgcctccgtgaagacaagctgggctggggagaacggtgtctaggagggatgaccccactcagctccaggcagtgttctgccgagaccccaagaactcggggtgtcagagggcaaaggaactacctgcctttcacggctgctgacttctcagggctgcaagcagcacagaatgttatccttacgtcctgagccggtttaagtctgtggaaaaggaagcacgggagaaatccacgtaacctttgctttctttttaagggaagcggttccgccgtgaacttggaaccctcagctccgggtgttctcggcagaagggcagctggaagggacacagtggggcaggctttggggttgctccctgttctgccccgaggccggggacgcagggcagcccacgcctccgtgggctccattctgtagcattgccagcgttctcttcacgtctctaacaatccttcgcttttcctcactcacgtggaaatgtgaactgtcccggctctgtcttcatttttatttttaagccatcgttcccctcctgaacggttgccccttatttaatgctgtaaagttggactgttgttcaataaaccagagcaatgcattagctcctcattcatttgtcaaaaaaaaaaaaaaaaaa

SEQ ID NO: 902 - DNA, 6363 bp, Homo sapiens
ggctgacatcacttaggaaagcgaagggggtagggctgccagatcagtttgtcaccacccaggctcccttgcctttggctgggtgcaacttccattttaggtgttggatctgagggggaaaaaaaagagagagggagagagagagaaagaagagcaggaaagatcccgaaaggaggaagaggtggcgaaaaatcaactgccctgctggatttgtctttctcagcaccttggcgaagccttgggtttctttcttaaaggactgatttttagaactccacatttgaggtgtgtggcttttgaagaaaatgtatgtactgacgggaaaaggaggataagcaagtcgaatttttgtcttacgctctctccttcctgcttcctccttgctgtggtggctgggatgcttcttccatgattttttgaatctagactgggctgttctctgtgttaaaccaatcagttgcgaccttctcttaacagtgtgaagtgagggggtctctctccctccttctccttcctctgtgattcaccttcctttttaccctgccctgcggcggctccgccccttaccttcatggacgactcagaggtggagtcgaccgccagcatcttggcctctgtgaaggaacaagaggcccagtttgagaagctgacccgggcgctggaggaggaacggcgccacgtctcggcgcagctggaacgcgtccgggtctcaccacaagatgccaacccactcatggccaacggcacactcacccgccggcatcagaacggccggtttgtgggcgatgctgaccttgaaagacagaaattttcagatttgaaactcaacggaccccaggatcacagtcaccttctatatagcaccatccccaggatgcaggagccggggcagattgtggagacctacacggaggaggatcctgagggagccatgtctgtagtctctgtggagacctcagatgatgggaccactcggcgcacagagaccacggtcaagaaagtagtgaagactgtgacaacacggacagtacagccagtcgctatgggaccagacgggttgcctgtggatgcttcatcagtttctaacaactatatccagactttgggtcgtgatttccgcaagaatggcaatgggggacctggtccctatgtggggcaagctggcactgctacccttcctaggaacttccactaccctcctgatggttatagtcgccactatgaagatggttatccaggtggcagtgataactatggcagtctgtcccgggtgacccgcattgaggagcggtataggcccagcatggaaggctaccgggcacctagtagacaggatgtgtatgggccccaaccccaggttcgggtaggtgggagcagcgtggatctgcatcgctttcatccagagccttatgggctagaggatgaccagcgtagtatgggctatgatgacctggattatggtatgatgtctgattatggcactgcccgtcggactgggacaccctctgaccctcgtcggcgcctcaggagctatgaagacatgattggtgaggaggtgccatcggatcaatactactgggctcctttggcccagcatgagcgaggaagtttagcaagcttggatagcctgcgcaaaggagggcctccacctcctaattggagacagccagagctgccagaggtgatcgccatgcttggattccgcttggatgctgtcaagtccaatgcagctgcatacctgcaacacttatgctaccgcaatgacaaggtgaagactgacgtgcggaagctcaagggcatcccagtactggtgggattgttagaccatcccaaaaaggaagtgcaccttggagcctgtggagctctcaagaatatctcttttggacgtgaccaggataacaagattgccataaaaaactgtgatggtgtgcctgcccttgtgcgattgcttcgaaaggctcgtgatatggaccttactgaagttattaccggaaccctgtggaatctttcatcccatgactcaatcaaaatggagattgtggaccatgcactgcatgccttgacagatgaagtgatcattcctcattctggttgggagcgggaacctaatgaagactgtaagccacgccatattgagtgggaatcggtgctcaccaacacagctggctgccttaggaatgtaagctcagagaggagtgaagctcgccggaaacttcgggaatgtgatggtttagttgatgccctcattttcattgttcaggctgagattgggcagaaggattcagacagcaagcttgtagagaactgtgtttgccttcttcggaacttatcatatcaagttcaccgggagatcccacaggcagagcgttaccaagaggcagctcccaatgttgccaacaatactgggccacatgctgccagttgctttggggccaagaagggcaaagatgagtggttctccagagggaaaaaacctatagaggatccagcaaacgatacagtggatttccctaaaagaacgagtccagctcgaggctatgagctcttatttcagccagaggtggttcggatatacatctcacttcttaaggagagcaagactcctgccatcctagaagcctcagctggagctatccagaacttgtgtgctgggcgctggacgtatggtcgatacatccgctctgctctgcgtcaagagaaggctctttctgccatagctgacctcctgactaatgaacatgaacgggtggtgaaagctgcatctggagcactgagaaacctggctgtggatgctcgcaacaaagaattaattggtaaacatgctattcctaacttggtaaagaatctgccaggaggacagcagaactcctcttggaatttctctgaggacactgtcatctctattttgaacactatcaacgaggttatcgctgagaacttggaggctgccaaaaagcttcgagagacacagggtattgagaagctggtgttgatcaacaaatcagggaaccgctcagaaaaagaagttcgagcagcagcacttgtattacagacaatctggggatataaggaactgcggaagccactggaaaaagaaggatggaagaaatcagactttcaggtgaatctaaacaatgcttcccgaagccagagcagtcattcatatgatgatagtactctccctctcattgaccggaaccaaaaatcagataagaaacctgatcgggaagaaattcagatgagcaatatgggatcaaacacaaaatcactagataacaactattccacaccaaatgagagaggagaccacaatagaacactggatcgatcgggggatctaggcgacatggagccattgaagggaacaacacccttgatgcaggacgaggggcaggaatctctggaggaagagttggatgtgttggttttggatgatgaggggggccaagtgtcttacccctccatgcagaagatttagcaccactatctccgttccatctgggcttatatgtacttttattttttggtggtgaaattgactgatgattttcctttttcttcgctggactattgtgccaactgccaggctgcctcctgcccttacagccctaagtggctgccttctttccatcaactcccaacttcttcctgtgaagtttaattgtctcaacgcctccccctcccccattccctccatttttctcccaagaaacctgactcaattatttgcatattttgagaaactgctgcagattagttctttttgccagttttccctggaactcctggccttttgtggaggggagggatggagagaataggaatcttcactagaagccgtgggaagaattggaagttacatgctgtatatgcaatgtccagcagtctgataaactgacgattcttaatcaagatttttttcctgatggggaagggacttttattttcttttagagaggggaaagtgtgagctcttcccttattcctaatggctatttttgaagcaaagaaggccagcaacattggcacatgccacctggcaaaggacccttgagtaagtgaaggtctcctaaaactgggattaagaaaccttgctctcctcatctccaaggcagggaccatcaagaacctacagactccatctcttctgcaagcctcatgccaaccctgggctattgctgctgccccttaaacacaggctgtccttaacccacctctcctgccctgtgatatgtctgctgagttggcctggccatttccaagaggctgtagaaaggggagaatgtcaaggaagacttttggtagagaaggagcagaaagatgtgtttttgggaagaagaagacctctaggaggagctagtaggaatgtacatgaagcaattagtctgaaactggcttccccactcccccgtttctccttttcctatccttataggcctgtcccttgcctctgccctggattggttggcaaactaaaggacttgatgtacataactcctgtcccttttcccttacaaggtggggattgcccctggctttgcctcttctttgtgcctttggcctggggtgcatctcctcccgcccttccatgtgcctttctttgcctctgcagtctcatttctcataattttgcaaattatattttgttgctttcttacctactattggccctaaatagcagaaagaagagaagtgaccgagagaacctcagattcttcattgaggattggtatagccatgatttcagtcatagcaagcttttgctcaacagcatatgggtgggattttgcaaaaatcctattctgatgaatctcaaagtaaggctggtaagagaagtgagtggtgtgactcttactccttaggtgcccagaatttaccatcatctctgaaggagttacagggaagtggtctccccaattctcccctccctccagtattgccccctctcactttagcatatattaattagcaggttgggctagagaaatcagctgctatgcgggttgattattattattatttctaatccttttccttatttgccttctactccccttaatctaatctaaaagctctgttccatgcaactggagttccttatccctctcttccccttcccttatatattgaggctatggggtaggagaaaagtgcacaacccaccaccccctttactcgtgcattaaaatttcttatttacccttttcccccttcccatttcttcccactttcatctaccttttctggcaaaaaggagccttttgctctctgtgaccctaagagcacactgcacagggaaaattgccccatccagacctggctccactcttgatctctcttgtcctcttctgctcttttcctggtgctcttttttctcggtggggtgtgggtaatagaacagccgtgggcttttggggacctttaacttttttttctctcttttgtttataaaaaacactaaacattcaattccagagaaccaaaaatcccaccttcccaccgaacactactaaggggcttgtgttctgctccataccttttctcttttctttctgtcttgttaatgcttttaaaaacaaatgagttttttatataaataaagtttttaaagtgtgtatgtggggggtctgtgtcatttcttcacttcaagctgttatttcttccctgctttgcatctttgttacttccttatgtatcagtgtcctttccagagcaaccagaaggaggttataccaggatttattttgagctcagccccaactctttatcaagcaacattcttgttaactatatgtgaaacattttttcttctgaagattcttaaaaattgaatgtggctgaagttgaacatgggagcttattgctaatttagagataggaaactgaagcataaagaattaatgacttactttaattactggaattcttctgcaacatttgacaaaactaaccttgaataaggcccactgtaatacgtagctctcttaaatataacacttaggactagaagattagaaactaccaatcccaactacgtaataggaaaatgtaggatcaaaaggcccatgtatataagtactgaccactgggccataatgttgcttctcaggctatatgcagtcctttagtcagaagtcaataggcctatttattaatattttacagaccatattacctggattaccagggactatctttgctgcagagatcaagggttaagatctatgggaagatacttatttttctgaggtccttatgtcctgtcatataattaaagactcaagagaatttatgtgaaatgctttctgtatgcccaaatctttagattaaaattatatagctgctcctgaaaaaaaaaaaaaa

SEQ ID NO: 903 - DNA, 957 bp, Homo sapiens
tctccacgtgggtaccggcgctctcggcgcccgtagccacccgcccgccggaagccgacatctcgagttctggcagaagcaatttgcgcggcgaggagcggagcggcaggaacccaataagctgcttcgcctcggagctgaagcccgtactcaagatggcggctccgggcgggcgtggccagtgactagaaggcgaggcgccgcgggaccatggcggcggcggcggacgagcggagtccagaggacggagaagacgaggaagaggaggagcagttggttctggtggaattatcaggaattattgattcagacttcctctcaaaatgtgaaaataaatgcaaggttttgggcattgacactgagaggcccattctgcaagtggacagctgtgtctttgctggggagtatgaagacactctagggacctgtgttatatttgaagaaaatgttgaacatgctgatacagaaggcaataataaaacagtgctaaaatataaatgccatacaatgaagaagctcagcatgacaagaactctcctgacagagaagaaggaaggagaagaaaacataggtggggtggaatggctgcaaataaaggataatgatttctcctatcgacccaacatgatttgtaactttctacatgaaaatgaagacgaagaagtggtagcttcagccccagataaatctttggaattggaagaggaagagattcaaatgaacgacagttcaaacctgagttgtgaacaggagaaaccaatgcacttggaaatagaagattctggtcctcttattgatataccttctgagacagaaggttctgtttttatggaaactcaaatgctgccttagaaatcactcctagatgaaatgtttctcataataacttgtcaagaactttttagagttgttacataaaaataattgctgtgtagctttcagtcttttaaaaaaaaa

SEQ ID NO: 904 - DNA, 1629 bp, Homo sapiens
agcctatcaagtgtctgtaattaattaaccaactgagatccagttcaggggtgaaagttcttcaggtacgaggagggcattgttgtcagtctggaccgagcccgcagagcccctcctcggcgtcctggtcccggccgtgcccgcggtgtcccgggaggaaggggcgggccgggggtcgggaggagtcacgtgccccctcccgccccaggtcgtcctctcagcatgggggtcccgcggcctcagccctgggcgctggggctcctgctctttctccttcctgggagcctgggcgcagaaagccacctctccctcctgtaccaccttaccgcggtgtcctcgcctgccccggggactcctgccttctgggtgtccggctggctgggcccgcagcagtacctgagctacaatagcctgcggggcgaggcggagccctgtggagcttgggtctgggaaaaccaggtgtcctggtattgggagaaagagaccacagatctgaggatcaaggagaagctctttctggaagctttcaaagctttggggggaaaaggtccctacactctgcagggcctgctgggctgtgaactgggccctgacaacacctcggtgcccaccgccaagttcgccctgaacggcgaggagttcatgaatttcgacctcaagcagggcacctggggtggggactggcccgaggccctggctatcagtcagcggtggcagcagcaggacaaggcggccaacaaggagctcaccttcctgctattctcctgcccgcaccgcctgcgggagcacctggagaggggccgcggaaacctggagtggaaggagcccccctccatgcgcctgaaggcccgacccagcagccctggcttttccgtgcttacctgcagcgccttctccttctaccctccggagctgcaacttcggttcctgcggaatgggctggccgctggcaccggccagggtgacttcggccccaacagtgacggatccttccacgcctcgtcgtcactaacagtcaaaagtggcgatgagcaccactactgctgcattgtgcagcacgcggggctggcgcagcccctcagggtggagctggaatctccagccaagtcctccgtgctcgtggtgggaatcgtcatcggtgtcttgctactcacggcagcggctgtaggaggagctctgttgtggagaaggatgaggagtgggctgccagccccttggatctcccttcgtggagacgacaccggggtcctcctgcccaccccaggggaggcccaggatgctgatttgaaggatgtaaatgtgattccagccaccgcctgaccatccgccattccgactgctaaaagcgaatgtagtcaggcccctttcatgctgtgagacctcctggaacactggcatctctgagcctccagaaggggttctgggcctagttgtcctccctctggagccccgtcctgtggtctgcctcagtttcccctcctaatacatatggctgttttccacctcgataatataacacgagtttgggcccgaatcagtgtgttctcatcatttttcaggcaggggaggtaagggaataagtcgggggactgaatggcggctgggcctcggatctctcctacaggtaac

SEQ ID NO: 905 - DNA, 1235 bp, Homo sapiens
gaatacagaatgtgggcaaactcgcttctgtgccggccgccagaaggtttgctgagggcaatcactccctggtgccgggctccttgaggttatgcactgggacatctagagcctattgtttgaggaatgcagtcttgcaagcctgctctggatcaagccacagactgaaacacccccgaagagcaagcacgtttcttggagcaggctaagtgtgagtgtcatatcttcaatgggatgaagcgggtgcagtacctgaacagatacatccataaacgggaggagaacctgcgcttcgacagcaacgtggaggagttccaggcagttacggaactggggcggcctgtcgcagagaactggaacagccagaagggcatcccggaggagaagcgggacaagatggacgactactgcagatacaattacggggttttttgagagcttcacagtgcagccgcgagtccatcctaaggtgactgtgtatcctgcaaagacccagcccctgcatcaccgcaaccccctggtcggctctgtgagtggtttctatccaggcagcattaaagtcaggtggttccagaatggtcaggaagagaaggctgcggtggtctccataggcctgatccagaatggagattggaccttccagaccctggtgatgctggaaacagttcctcggagtggagaggtttacacctgccaagtggagcatccaagcgtgacgagccctctcacagtggaatggagtacacggactgaatctgcacagagcaagatgctgagtggagtcgggggctttgtgctgggcctgctcttccttgggacagggctgttcatctacttcaggaatcagaaaggacactctggacttcagccaacaggactcctgcgctggactcctgagctgaagtgcacatgaccacattcaaggaagaaccttctgccacagctttgcaggatgaaaagctttcccacttggctcttattcttccacaagagctctctcaggaccaggttgttactcgttcagcaactctgcagaaaatgccctcccttgtggcttcctcagctcctgttcttggcctgaaaccccacagccttgatggcagcgcctcgtcttcaacttttgtgcttccttttacctaaattttcctgcctcccctgggtctgtattccccttgtgccacaaacacattgcattattcaatgtttctcaaacatggagttaaaaattatctggt

SEQ ID NO: 906 - DNA, 8843 bp, Homo sapiens
agcagacttgggtggctctgcgccgcggaggccacagccgcagacttccccagtagtaccgcgccgctccgccccggagtgacgccctccgcccatgggcctggccgagggcaaccggcgggcggcgcggaggaggcggcgacaggtggcgcgcagcagggccggagccgggccgggccatggccgcctcggagcggctgtacgagttgtggctgctctactacgcgcagaaggacctgggttacctgcagcagtggctgaaggcctttgtaggtgccttcaagaagagcatctcactgtcctctctggagccacgaaggccagaggaggcaggtgcagaggtcccgctgctaccactggatgagctgcatgtgctggccgaacagctgcaccaggctgacctggagcaagccctcctgctgctcaagctcttcatcattctctgcaggaacctggagaacatagaggcaggccggggccaagtgctagtgccccgagtgctggcactgttgaccaagttggtggcggagctgaaaggatgcccaccaccccagggccgaggcacgcagttggagaatgtggccctacatgctctgcttctctgcgagggcctctttgacccttaccaaacctggcggcgccagcgcagtggggaagtcatcagctccaaggagaagagcaaatacaagttccctcctgctgctttgccccaggaattcagcgccttcttccaagagagcctacagaatgcagaccacttgcctcccatactgctgttacgtctcatccacctcttctgcgccgtcctcgctggaggaaaggagaacgggcagatggctgtaagtgatggctctgtgaagggcctgctgagtgtggtgcggggctggagccgtgggccagccccggacccgtgcctagtgccactggctctagaggcactggtaggtgcagtccatgtcttgcatgccagccgcgcacctcctcgtggcccagagcttcgtgccctgcttgagagctacttccatgtccttaatgctgactggccagctggtctgagctcaggccccgaagaggcccttgtcaccctccgggtcagcatgctcgacgccatccccatgatgctggcatgtgaagaccggccagtgctgcaagccaccttcctcagcaacaattgctttgaacacctcactcggctcattcagaacagcaagctgtacctgcagtcccgggcgccccccgagggggacagtgacctggctacccggttactgactgagcccgatgtccaaaaggtcctggaccaagacacagacgccattgcagtccatgtagtcagagtgctgacctgcatcatgagtgactccccctcggccaaggaggtgtttaaggagcgcatcggctaccctcacctgcaggaggttctgcagagccatggtccccccacccatcggctgttgcaagagctgctcaacatggctgtggagggtgaccacagcatgtgcccacctccaccaatccgcaacgagcagccggtactggtgctggcgcagtggctgccgtcattgcccaccgctgagctgcggctcttcctagcgcaacgcctcaggtggctctgtgacagctgccctgccagccgtgccacctgtgtgcaggcaggcctggtgggctgcctgttggagacactcagcacagggctagccctggaggcccgctgccaagagcagctgctggcactgctacaagcactgggccgtgtatcaataaggcccatggagctgcgtcacctgctgcgcccccggccaggattggactcggaaccaggcggagctgaggctggaaaggcccgacacgcaggtgctgtcatccgcacattatcaggcatggccaggcaccagggtcctgcacgtgctctgcgctactttgacctcacgcccagcatggcgggcatcatggtaccccctgtacagcgatggccagggcctggcttcacctttcatgcctggctctgtctgcaccctatggatacagcacctacccctgcccccacccgaccactccagcgaaagcagctgtacagcttctttaccagcagcggctcagggtttgaggccttcttcacggcggccgggaccctggtggtggctgtgtgcacacggaaggagtatttgaccatgagtttgcccgaagtgtcctttgccgactctgcctggcactgcgtggctatcgtccatgtgcctgggcgccggcccttcagccagaacctggtccatgtctacaaagacggccatctggtcaagacagcaccccttcgctgcccctccctcagtgagcctttctcctcctgctgtatcggctccgctggataccgcacaacgaccaccaccacagggctgcccacaccaccagtccccgccaccctggcctacactcaccccgccctcacccgctcccagtcagtcccagcctccacagggcttggctgggggtccgggctggtggcccccctgcaggagggcagcatcgactctaccctcgcaggcacccaggacactcggtggggcagccccacatccctggagggtgagctgggggctgtggccatctttcacgaagccctgcaggcgacggctctgaggaccctgtgcaccctggggcccaatgagacggcacccttcaagcctgagggggagctgcatgagctcagcaccaggctgctcctccattactcacctcaggcttgtaagaacaacatctgcctggacctgtcccccagtcatgggcttgatgggcgcctgacgggccacagagtggagacctgggatgtgaaggatgtggtgaactgcgttgggggtatgggtgccctgctgcccctgctggagcgagtagctgcacagcccaaagaggctgaagcaggtccagctgaaacgcatgacctcgtgggtcctgaactgacctctggtcacaacacccagggcctggttctcccattgggtaaatcttcagaggaacggatggagaggaacgcagtggctgcttttctgctgatgctgcggaacttccttcagggtcacatggtgaaccaagagagcctggtgcagtgccaggggcctgccatcatcggggccctcctgcgaaaggtcccaagctgggccatggacatgaacgtgctcatgtccgcccagctgctgatggagcaggtggcagctgagggcagcgggcccctcctgtacctactctaccagcatttgctcttcaactttcacctctggaccctcagtgacttcgccgtgcgcctcggtcacatccagtacatgtccagcatagttcgggagcacagacagaagctgcggaagaagtacggcgtccagtttatcttggatgctctgcgcacccactacagcccgcagcgggagcgccccctggctgctgacgacctacgcaccgtgcagacctccctcctgggcctggcgagggagttcctggtgcggagtctctcagcagatgacgtgcaggtcacgcagaccatgctgagctttttggcggccacaggcgatgacggtcaggcggtgggtgcgctggacctgctgctggccctgctgcacggttccctggtgcaggagtccttggctgtctttctgttggagccagggaacctcgaagtgctactggccctgctagtgcggccagggtcactgcccctgctgcccgatcgagtctgcaagatcctgcgcagactgcagcagaatgagcggctacctgagcggagccgccagcgcctccggctgcgggagtgtggtctccagggtctggttgcctgcttgcctgaggggactgtttccccccagctctgccagggcctctacaagctgttcctgggggcagattgcctgaacctctcagatctgctggctgtggtacagctgtccctccaggctgacctcagcgttcgcctagacatctgtcgccagcttttccacctcatctacggacagccagatgtagtgcggcttctggcccgacaggctggctggcaagatgtgctgacccggctatatgtcctggaggctgccacagccggcagcccccctccgtcttccccagagtcacctacctcccccaagccagccccacccaagccacccactgagtcacctgctgagccttcagatgtcttcctgccctcagaggccccctgccctgaccctgatggcttttaccatgctctctccccattctgcacgccctttgacctgggcctggaacggtctagtgtaggatcaggcaacactgctggtggtggcggcagcagtgggactcttactccagccagccagcccggcactccttcgccactggatgggccgcggccctttcctgctgctcctggccgccacagctccagtctctccaatgtgctggaggacggcagcctcccggagcccaccattagcggggatgatacctcgaacaccagcaacccacagcaaacctctgaggaagagttgtgcaatctgctcaccaacgtgctgttctcggtgacgtggcgtggcgtggaaggcagcgatgaggctgcctggcgggagcgtggccaggttttctcagtgctcacccagctgggggcctcagccacacttgtgcgcccaccagactgcatcaagcgcagcctcctggagatgatgctggagtcagccctgaccgacatcaaagaggcccccgtgggggtcctggccagcctcacccagcaagcgctttggctgctgcgtctgctgcaggacttcctgtgtgctgaaggccatggtaaccaggaactgtggagtgagaagctctttgaaggtgtatgcagcctacttgatcgcctgggagcctggccccacctggccaacggcacagctgatctccgtgagatggcgcagattggcctacggcttgtacttggctacatcctgctggaagacccacagctgcatgcccaggcctacgtgagattgcacatgctgctacagactgcagtgccagcccgccgcgaggaggcctgctatgtgctctccaagctggaggctgcactggggcgggtgctgaacacctcttccttggagtcagccactgatgaggcagggtccccacttgcagctgcagcagctgcagcagctgcagagcgctgctcctggctggtgccactggtgcgcacgctgctagaccgtgcctatgagccgctggggctgcagtggggactgccctccctgccacccaccaatggcagccccaccttctttgaagacttccaggctttttgtgccacacccgaatggcgccacttcatcgacaaacaggtacagccaaccatgtcccagttcgaaatggacacgtatgctaagagccacgaccttatgtcaggtttctggaatgcctgctatgacatgcttatgagcagtgggcagcggcgccagtgggagcgcgcccagagtcgtcgggccttccaggagctggtgctggaacctgcgcagaggcgggcgcgcctggaggggctacgctacacggcagtgctgaagcagcaggcaacgcagcactccatggccctgctgcactggggggcgctgtggcgccagctcgccagcccatgtggggcctgggcgctgagggacactcccatcccccgctggaaactgtccagcgccgagacatattcacgcatgcgtctgaagctggtgcccaaccatcacttcgaccctcacctggaagccagcgctctccgagacaatctgggtgaggttcccctgacacccaccgaggaggcctcactgcctctggcagtgaccaaagaggccaaagtgagcaccccacccgagttgctgcaggaggaccagctcggcgaggacgagctggctgagctggagaccccgatggaggcagcagaactggatgagcagcgtgagaagctggtgctgtcggccgagtgccagctggtgacggtagtggccgtggtcccagggctgctggaggtcaccacacagaatgtatacttctacgatggcagcactgagcgcgtggaaaccgaggagggcatcggctatgatttccggcgcccactggcccagctgcgtgaggtccacctgcggcgtttcaacctgcgccgttcagcacttgagctcttctttatcgatcaggccaactacttcctcaacttcccatgcaaggtgggcacgaccccagtctcatctcctagccagactcccagaccccagcctggccccatcccaccccatacccaggtacggaaccaggtgtactcgtggctcctgcgcctacggcccccctctcaaggctacctaagcagccgctccccccaggagatgctgcgtgcctcaggccttacccagaaatgggtacagcgtgagatatccaacttcgagtacttgatgcaactcaacaccattgcggggcggacctacaatgacctgtctcagtaccctgtgttcccctgggtcctgcaggactacgtgtccccaaccctggacctcagcaacccagccgtcttccgggacctgtctaagcccatcggtgtggtgaaccccaagcatgcccagctcgtgagggagaagtatgaaagctttgaggacccagcagggaccattgacaagttccactatggcacccactactccaatgcagcaggcgtgatgcactacctcatccgcgtggagcccttcacctccctgcacgtccagctgcaaagtggccgctttgactgctccgaccggcagttccactcggtggcggcagcctggcaggcacgcctggagagccctgccgatgtgaaggagctcatcccggaattcttctactttcctgacttcctggagaaccagaacggttttgacctgggctgtctccagctgaccaacgagaaggtaggcgatgtggtgctacccccgtgggccagctctcctgaggacttcatccagcagcaccgccaggctctggagtcggagtatgtgtctgcacacctacacgagtggatcgacctcatctttggctacaagcagcgggggccagccgccgaggaggccctcaatgtcttctattactgcacctatgagggggctgtagacctggaccatgtgacagatgagcgggaacggaaggctctggagggcattatcagcaactttgggcagactccctgtcagctgctgaaggagccacatccaactcggctctcagctgaggaagcagcccatcgccttgcacgcctggacactaactcacctagcatcttccagcacctggacgaactcaaggcattcttcgcagaggttgtcagtgatggtgtacccctggtgctagccctggtcccccaccggcagccccactccttcatcacccagggttccccagacctgttggtgactgtgagtgccagtgggctgctgggcacccacagctggttgccctatgaccgcaacataagcaactacttcagcttcagcaaagaccccaccatgggcagccacaagacgcagcgactgctgagtggcccgtgggtgccaggcagtggtgtgagtggacaagcactggcagtggccccggatggaaagctgctattcagcggtggccactgggatggcagcctgcgggtgactgcactaccccgtggcaagctgttgagccagctcagctgccaccttgatgtagtaacctgccttgcactggacacctgtggcatctacctcatctcaggctcccgggacaccacgtgcatggtgtggcggctcctgcatcagggtggtctgtcagtaggcctggcaccaaagcctgtgcaggtcctgtatgggcatggggctgcagtgagctgtgtggccatcagcactgaacttgacatggctgtgtctggatctgaggatggaactgtgatcatacacactgtacgccgcggacagtttgtagcggcactacggcctctgggtgccacattccctggacctattttccacctggcattggggtccgaaggccagattgtggtacagagctcagcgtgggaacgtcctggggcccaggtcacctactccttgcacctgtattcagtcaatgggaagttgcgggcttcactgcccctggcagagcagcctacagccctgacggtgacagaggactttgtgttgctgggcaccgcccagtgcgccctgcacatcctccaactaaacacactgctcccggccgcgcctcccttgcccatgaaggtggccatccgcagcgtggccgtgaccaaggagcgcagccacgtgctggtgggcctggaggatggcaagctcatcgtggtggtcgcggggcagccctctgaggtgcgcagcagccagttcgcgcggaagctgtggcggtcctcgcggcgcatctcccaggtgtcctcgggagagacggaatacaaccctactgaggcgcgctgaacctggccagtccggctgctcgggccccgcccccggcaggcctggcccgggaggccccgcccagaagtcggcgggaacaccccggggtgggcagcccaggggggtgagcggggcccaccctgcccagctcagggattggcgggcgatgttaccccctcagggattggcgggcggaagtcccgcccctcgccggctgaggggccgccctgagggccagcactggcgtctgcggccgcagcagcactttttgcacagtctggggcggggttccccggcttccaagtcgctgtttcgtcaaagcacgagggccgcctgtggccttaattcctaacggcggccccggttctcccttctcggcaataaaccaggcctagttttgtagcaaaaaaaaaaaaaaaa

SEQ ID NO: 907 - DNA, 98 bp, Homo sapiens
gtagggtgatgaaaaagaatccttaggcgtggttgtggccgtcttggtcacctgtgtgccacttgccaatgcaaggacttgtcatagttacactgact

SEQ ID NO: 908 - DNA, 921 bp, Homo sapiens
gctggatccagcgtagcggggcggccgggcggatccagcgcagccgggagacagatgcgaggcggcggtcagcaggtgccgaacccacggccaggcttccgtggccagcagccctagaggaatggccatcctgtccctgcgagcccctgggccctggcaggcgatgcaggtgggatgctatggaatatgatgagaagctggcccgtttccggcaggcccacctcaaccccttcaacaagcagtctgggccgagacagcatgagcagggccctggggaggaggtcccggacgtcactcctgaagaggccctgcctgagctgccccctggggagccggaattccgctgccctgaacgcgtgatggatctcggcctgtctgaggaccacttctcccgccctgtgggtctgttcctggcctctgacgtccagcagctgcggcaggcgatcgaggagtgcaagcaggtgattctggagctgcccgagcagtcggagaagcagaaggatgccgtggtgcgactcatccacctccggctgaagctccaggagctgaaggaccccaatgaggatgagccaaacatccgagtgctccttgagcaccgcttttacaaggagaagagcaagagcgtcaagcagacctgtgacaagtgtaacaccatcatctgggggctcattcagacctggtacacctgcacaggtgggccgagacccagacgaggagtgaggaatgagagagaccaaagttcctgcctccgctgggctcacattcagatgtgagctatccagtgtggtggccactagccaaacatggccagtcaaagttaaattaactaaatatgcatttcctcgttgtactgtctacattggacagggctgttctggatgagaaattaaactagtgaattacaaaaaaaaaaaaaaaaaa

SEQ ID NO: 909 - DNA, 894 bp, Homo sapiens
cggaaactcagagccgggttcctcccgggtttctgccgggtttctccctgcggctcctgggttgttgagactcttgtgaagatggcttgcgctgccgcgcggtccccggccgaccaggacaggtttatttgtatctatcctgcttatttaaataataagaagaccatcgcagagggaaggcgaatccccataagtaaggctgttgaaaatcctacagctacagagattcaagatgtatgttcagcagttggacttaacgtatttcttgagaaaaataaaatgtactctagagaatggaatcgtgatgtccaatacagaggcagagtccgggtccagctcaaacaggaagatgggagcctctgccttgtacagttcccatcacgtaagtcagtaatgttgtatgcagcagaaatgatacctaaactaaaaacaaggacacaaaaaacaggaggtgctgaccaaagtcttcaacaaggagagggaagtaaaaaagggaaaggaaagaaaaagaagtaacctagtatcagcatcaagtatgtggtactactgtaagagacatgaatggagacttctaatttgtatcggagggaaacagaagctttttgtttgcatcatttaactgaactgtgaacccttgtgcctctcatctttatcatcggagttgacagtgaaacaaatttacatcagaagtttgcatctcgcgtatatgccgtataaaagaatttttttgtctttcaatgcagttttttggaagaaaatatttttaaatggacaatggactgtacaataagttacttgaaataagttgtttcagataaatttcaattagatttaaaataaacattatgtccaccttttaagttaatgaaataaaatttgaaactgaaaaaaaaa

SEQ ID NO: 910 - DNA, 2874 bp, Homo sapiens
ggatccggcgtccgagttctggtgggcaggcctgggcgaggatctggctctggctgcgggtcctggcccgggtcagggttgggcctcctatccagcccgccccaggcgagggttcaatcccgcacttgccgaagtccctggggctggcaagggtgcaagacgcggagggctctatgtcgggaaaggggctctgaagaccacgtgggggccgctctaaggggtctggggccaccctgctctctgggtcaaaggtcatcgcaatggccgggaagaacttcctcttccttggctctccccacttacttcctgataacctggtacgggtctcccgcgggcgtcggggcttggggggaggcgtagcaacttcagggaacttcccaaaggtgtgcgcaggttggggggcgcgcggcgccccgggaggtggcggcctctgcgacacgggaagtataagagtggacctgcaggccggtcgcgaggaggtggagtgggtggcgcccgctttgtgcctgggatcggcatgctggggcaggagggcagccgcgtgtcaggtgaccagaaccatgtccagccaggtggtgggcagtgagcctctctacatcatggcagagcggccaggcctgacagtccaaagggctcctcggagacggagacccgagcctcctgtggccctggcccctggtccagctcccacccactgccctcccaggccacaaggaagaggaggatgggaaggggctgggcctggcgagctgggcggtgggaagctggtgctcagcttcctgtccaagagcctctgcctggtctgtggggacgtggcctccggctaccactacggtgtgtcatcctgtgaggactgcaaagccttcttcaagaggaccatccaggggagcatcaagtacagctgtccggcctccaacaagtgtgagatcatcaagcggagacgcaaggcctgtcaggcctgccgcttcaccaagtgcctgcgggagtgcgcctggatcgcgtccggggtgggcggaagaagtacaagcggtgccagaggtggacccgctgcccttcccgggcgccttccctgctgggcccctggcagtcgctggaggcccccagaagacaccccagtgaatgcgctggtgtctcatctgctggtggttgagcctgagaagctctatgccatgcccgaccccgtggccgctgatgggcacctttaagccgtggctaccctctgtgacctctttgaccgagagatcgtatttaccgtcagctgggccaagagcatcccaggcttctcattgctgtcgctgtctgaccagatgtcagtactgcagagcgtgtggatggaggtgctggtgcccggtgtggcccagcgctcactgccactgcaggatgagctggccttcactgaggacagagtcctggatgaagagggggcacgggcagctggcctgggggaactggggactgccctgctgcaactggtgcggcggctgcagtccctgcggctggagcgaggggagtacgttctactgaaggccctggcccttgccaattcagactctgtgcccatcgaagatgccgaggctgtggagcagctgccagaagctccgcacgaggccctgctggagtatgaagccggccgggctggcaccggagggggtgctgagcggcggcggccaggcaggctgctgttcacgctaccgctcctccaccagacagcgggcaaagttgctggcccatttctatggggtgaagctggagggcaggtgcccatgcacaagctgttcttggagatgctcgaggccatgatggactgaggcgaggggtgggactggtgggggttctggcaggacctgcctagcatggggtcagccccaagggctggggcggagctggggtctgggcagtgccacagcctgctggcagggccagggcaatgccatcagcccctgggagcaggccccactccctcccctccccctcctaggggatgtcagaagctggaaacgtgtgtccgggctctgggcacagtgctgccccttgcaagccatagcgtgccccaagagtgtagggggccttgccgaaggccacagggggctgcaggggatgtgtgggaggcaggaagcctatctcagggagggaaggggatgcaggccacagtctcccagtgggtgatgcttttgctgctgcttaatcctgccgcctcttcagagcagagtgggactcggagagcaaaggcccatgctccctttgctcctcctctcatcatttgcactgggcattagtgcccccccttgaagcaataactccaagcaggctccagcccctggacccctggggtggccagggcttccccatcagctcccacccagcctcctcagggggtaggagagcactgcctctatgccctgcagagcagtaacactatatttatttttgggtttggccagggaggcgcacggacatggggcaagccagggcccagagcctttggctgtacagagactctattttaatgtatatttgctgcaaagagaaaccgcttttggttttgaatctttaatgagaaaaaatatatatactatcgagctcaaaaagaaaattgtggaatgcatgattgacaatgtattttttatttctattttttcaagtaacatcagtattgtttaactatagccagcactgactaaaatttttatattttcagagttgaagtcggtgaagacattcatgatttaaacaccagatcctgaaaggcattaaatctactttgaaatgaatctgcaatcagtatttcaaagcttttctggtaattttagtgatcttatttgactagactttttcagaagtactaaataaggaattttaacaggttttattaat

SEQ ID NO: 911 - DNA, 767 bp, Homo sapiens
ttaatacttctatttcttacaaaacaaccgtataggggttaaagtatcagtgcaaagtcccgttcaaatattgactcagtaatgagctctacaagccagcctttgtggcatgttaaattcaaaacaagcttagcatttttttttttttttttggatagaaactggtgggggtggggaaagaaagagggaactgggaagagaaggaggggaacttaaaccttgcttcctgctctgtctttctcagaaaaccaaatatggcatcttccatgaggagcttgttttctgaccacgggaaatatgttgaatctttccggaggtttctcaaccattccacggaacaccagtgcatgcaggaattcatggacaagaagctgccaggcataataggaagataccagaattgctgttaacaaataaaatactggccagatgtgttggttcacgcctgtaatcctagcacttcgggaggctgaggcgggaggattacttgagcctaggagtttgagaccagcctgggcaacatagcaagatcccatctctacaaaaaagtgaaaaagttagctgaacaaggcggcatgcacatgctactccagacgctgaagtgggaagatcacttaagtccgagagatcgaggcttcagtgagatatggctgagacactgctctcagcctggatgacagagtgagaacctgtctcaaacaagagaaaaaaataaatcaaatgctactcaaaattctcaaaaaaaaaaaaaaaaaaaaaaaaaaaaa

SEQ ID NO: 912 - DNA, 6914 bp, Homo sapiens
gcggccgccgcccagccaggtgcaaaatgccgtgtcattgggagactccgcagccggagcattagattacagctcgacggagctcgggaagggcggcgggggtggaagatgagcagaagcccctgttctcggaacgccggctgacaagcggggtgagcgcagccggggcggggacccagcctagcccactggagcagccgggggtggcccgttcccctttaagagcaactgctctaagccaggagccagagattcgagccggcctcgcccagccagccctctccagcgaggggacccacaagcggcgcctcggccctcccgacctttccgagccctctttgcgccctgggcgcacggggccctacacgcgccaagcatgctgagggtcttcatcctctatgccgagaacgtccacacacccgacaccgacatcagcgatgcctactgctccgcggtgtttgcaggggtgaagaagagaaccaaagtcatcaagaacagcgtgaaccctgtatggaatgagggatttgaatgggacctcaagggcatccccctggaccagggctctgagcttcatgtggtggtcaaagaccatgagacgatggggaggaacaggttcctgggggaagccaaggtcccactccgagaggtcctcgccacccctagtctgtccgccagcttcaatgcccccctgctggacaccaagaagcagcccacaggggcctcgctggtcctgcaggtgtcctacacaccgctgcctggagctgtgcccctgttcccgccccctactcctctggagccctccccgactctgcctgacctggatgtagtggcagacacaggaggagaggaagacacagaggaccagggactcactggagatgaggcggagccattcctggatcaaagcggaggcccgggggctcccaccaccccaaggaaactaccttcacgtcctccgccccactaccccgggatcaaaagaaagcgaagtgcgcctacatctagaaagctgctgtcagacaaaccgcaggatttccagatcagggtccaggtgatcgaggggcgccagctgccgggggtgaacatcaagcctgtggtcaaggttaccgctgcagggcagaccaagcggacgcggatccacaagggaaacagcccactcttcaatgagactcttttcttcaacttgtttgactctcctggggagctgtttgatgagcccatctttatcacggtggtagactctcgttctctcaggacagatgctctcctcggggagttccggatggacgtgggcaccatttacagagagccccggcacgcctatctcaggaagtggctgctgctctcagaccctgatgacttctctgctggggccagaggctacctgaaaacaagcctttgtgtgctggggcctggggacgaagcgcctctggagagaaaagacccctctgaagacaaggaggacattgaaagcaacctgctccggcccacaggcgtagccctgcgaggagcccacttctgcctgaaggtcttccgggccgaggacttgccgcagatggacgatgccgtgatggacaacgtgaaacagatctttggcttcgagagtaacaagaagaacttggtggacccctttgtggaggtcagctttgcggggaaaatgctgtgcagcaagatcttggagaagacggccaaccctcagtggaaccagaacatcacactgcctgccatgtttccctccatgtgcgaaaaaatgaggattcgtatcatagactgggaccgcctgactcacaatgacatcgtggctaccacctacctgagtatgtcgaaaatctctgcccctggaggagaaatagaagaggagcctgcaggtgctgtcaagccttcgaaagcctcagacttggatgactacctgggcttcctccccacttttgggccctgctacatcaacctctatggcagtcccagagagttcacaggcttcccagacccctacacagagctcaacacaggcaagggggaaggtgtggcttatcgtggccggcttctgctctccctggagaccaagctggtggagcacagtgaacagaaggtggaggaccttcctgcggatgacatcctccgggtggagaagtaccttaggaggcgcaagtactccctgtttgcggccttctactcagccaccatgctgcaggatgtggatgatgccatccagtttgaggtcagcatcgggaactacgggaacaagttcgacatgacctgcctgccgctggcctccaccactcagtacagccgtgcagtctttgacgggtgccactactactacctaccctggggtaacgtgaaacctgtggtggtgctgtcatcctactgggaggacatcagccatagaatcgagactcagaaccagctgcttgggattgctgaccggctggaagctggcctggagcaggtccacctggccctgaaggcgcagtgctccacggaggacgtggactcgctggtggctcagctgacggatgagctcatcgcaggctgcagccagcctctgggtgacatccatgagacaccctctgccacccacctggaccagtacctgtaccagctgcgcacccatcacctgagccaaatcactgaggctgccctggccctgaagctcggccacagtgagctccctgcagctctggagcaggcggaggactggctcctgcgtctgcgtgccctggcagaggagccccagaacagcctgccggacatcgtcatctggatgctgcagggagacaagcgtgtggcataccagcgggtgcccgcccaccaagtcctcttctcccggcggggtgccaactactgtggcaagaattgtgggaagctacagacaatctttctgaaatatccgatggagaaggtgcctggcgcccggatgccagtgcagatacgggtcaagctgtggtttgggctctcagtggatgagaaggagttcaaccagtttgctgaggggaagctgtctgtctttgctgaaacctatgagaacgagactaagttggcccttgttgggaactggggcacaacgggcctcacctaccccaagttttctgacgtcacgggcaagatcaagctacccaaggacagcttccgcccctcggccggctggacctgggctggagattggttcgtgtgtccggagaagactctgctccatgacatggacgccggtcacctgagcttcgtggaagaggtgtttgagaaccagacccggcttcccggaggccagtggatctacatgagtgacaactacaccgatgtgaacggggagaaggtgcttcccaaggatgacattgagtgcccactgggctggaagtgggaagatgaggaatggtccacagacctcaaccgggctgtcgatgagcaaggctgggagtatagcatcaccatccccccggagcggaagccgaagcactgggtccctgctgagaagatgtactacacacaccgacggcggcgctgggtgcgcctgcgcaggagggatctcagccaaatggaagcactgaaaaggcacaggcaggcggaggcggagggcgagggctgggagtacgcctctctttttggctggaagttccacctcgagtaccgcaagacagatgccttccgccgccgccgctggcgccgtcgcatggagccactggagaagacggggcctgcagctgtgtttgcccttgagggggccctgggcggcgtgatggatgacaagagtgaagattccatgtccgtctccaccttgagcttcggtgtgaacagacccacgatttcctgcatattcgactatgggaaccgctaccatctacgctgctacatgtaccaggcccgggacctggctgcgatggacaaggactctttttctgatccctatgccatcgtctccttcctgcaccagagccagaagacggtggtggtgaagaacacccttaaccccacctgggaccagacgctcatcttctacgagatcgagatctttggcgagccggccacagttgctgagcaaccgcccagcattgtggtggagctgtacgaccatgacacttatggtgcagacgagtttatgggtcgctgcatctgtcaaccgagtctggaacggatgccacggctggcctggttcccactgacgaggggcagccagccgtcgggggagctgctggcctcttttgagctcatccagagagagaagccggccatccaccatattcctggttttgaggtgcaggagacatcaaggatcctggatgagtctgaggacacagacctgccctacccaccaccccagagggaggccaacatctacatggttcctcagaacatcaagccagcgctccagcgtaccgccatcgagatcctggcatggggcctgcggaacatgaagagttaccagctggccaacatctcctcccccagcctcgtggtagagtgtgggggccagacggtgcagtcctgtgtcatcaggaacctccggaagaaccccaactttgacatctgcaccctcttcatggaagtgatgctgcccagggaggagctctactgcccccccatcaccgtcaaggtcatcgataaccgccagtttggccgccggcctgtggtgggccagtgtaccatccgctccctggagagcttcctgtgtgacccctactcggcggagagtccatccccacagggtggcccagacgatgtgagcctactcagtcctggggaagacgtgctcatcgacattgatgacaaggagcccctcatccccatccaggaggaagagttcatcgattggtggagcaaattctttgcctccataggggagagggaaaagtgcggctcctacctggagaaggattttgacaccctgaaggtctatgacacacagctggagaatgtggaggcctttgagggcctgtctgacttttgtaacaccttcaagctgtaccggggcaagacgcaggaggagacagaagatccatctgtgattggtgaatttaagggcctcttcaaaatttatcccctcccagaagacccagccatccccatgcccccaagacagttccaccagctggccgcccagggaccccaggagtgcttggtccgtatctacattgtccgagcatttggcctgcagcccaaggaccccaatggaaagtgtgatccttacatcaagatctccatagggaagaaatcagtgagtgaccaggataactacatcccctgcacgctggagcccgtatttggaaagatgttcgagctgacctgcactctgcctctggagaaggacctaaagatcactctctatgactatgacctcctctccaaggacgaaaagatcggtgagacggtcgtcgacctggagaacaggctgctgtccaagtttggggctcgctgtggactcccacagacctactgtgtctctggaccgaaccagtggcgggaccagctccgcccctcccagctcctccacctcttctgccagcagcatagagtcaaggcacctgtgtaccggacagaccgtgtaatgtttcaggataaagaatattccattgaagagatagaggctggcaggatcccaaacccacacctgggcccagtggaggagcgtctggctctgcatgtgcttcagcagcagggcctggtcccggagcacgtggagtcacggcccctctacagccccctgcagccagacatcgagcaggggaagctgcagatgtgggtcgacctatttccgaaggccctggggcggcctggacctcccttcaacatcaccccacggagagccagaaggtttttcctgcgttgtattatctggaataccagagatgtgatcctggatgacctgagcctcacgggggagaagatgagcgacatttatgtgaaaggttggatgattggctttgaagaacacaagcaaaagacagacgtgcattatcgttccctgggaggtgaaggcaacttcaactggaggttcattttccccttcgactacctgccagctgagcaagtctgtaccattgccaagaaggatgccttctggaggctggacaagactgagagcaaaatcccagcacgagtggtgttccagatctgggacaatgacaagttctcctttgatgattttctgggctccctgcagctcgatctcaaccgcatgcccaagccagccaagacagccaagaagtgctccttggaccagctggatgatgctttccacccagaatggtttgtgtccctttttgagcagaaaacagtgaagggctggtggccctgtgtagcagaagagggtgagaagaaaatactggcgggcaagctggaaatgaccttggagattgtagcagagagtgagcatgaggagcggcctgctggccagggccgggatgagcccaacatgaaccctaagcttgaggacccaaggcgccccgacacctccttcctgtggtttacctccccatacaagaccatgaagttcatcctgtggcggcgtttccggtgggccatcatcctcttcatcatcctcttcatcctgctgctgttcctggccatcttcatctacgccttcccgaactatgctgccatgaagctggtgaagcccttcagctgaggactctcctgccctgtagaaggggccgtggggtcccctccagcatgggactggcctgcctcctccgcccagctcggcgagctcctccagacctcctaggcctgattgtcctgccagggtgggcagacagacagatggaccggcccacactcccagagttgctaacatggagctctgagatcaccccacttccatcatttccttctcccccaacccaacgcttttttggatcagctcagacatatttcagtataaaacagttggaaccacaaaaaaaaaaaaaaaaaaaaaaaaa

SEQ ID NO: 913 - DNA, 1517 bp, Homo sapiens
aaagtgcggggtcggccgggtgctgggccgaggccgaggccggggcgggatccagagcgggagccggcgcgggatctgggactcggagcgggatccggagcgggacccaggagccggcgcggggccatggcgaggcgcgggccagggtggcggccgcttctgctgctcgtgctgctggcgggcgcggcgcagggcggcctctacttccgccggggacagacctgctaccggcctctgcggggggacgggctggctccgctggggcgcagcacatacccccggcctcatgagtacctgtccccagcggatctgcccaagagctgggactggcgcaatgtggatggtgtcaactatgccagcatcacccggaaccagcacatcccccaatactgcggctcctgctgggcccacgccagcaccagcgctatggcggatcggatcaacatcaagaggaagggagcgtggccctccaccctcctgtccgtgcagaacgtcatcgactgcggtaacgctggctcctgtgaagggggtaatgacctgtccgtgtgggactacgcccaccagcacggcatccctgacgagacctgcaacaactaccaggccaaggaccaggagtgtgacaagtttaaccaatgtgggacatgcaatgaattcaaagagtgccacgccatccggaactacaccctctggagggtgggagactacggctccctctctgggagggagaagatgatggcagaaatctacgcaaatggtcccatcagctgtggaataatggcaacagaaagactggctaactacaccggaggcatctatgccgaataccaggacaccacatatataaaccatgtcgtttctgtggctgggtggggcatcagtgatgggactgagtactggattgtccggaattcatggggtgaaccatggggcgagagaggctggctgaggatcgtgaccagcacctataaggatgggaagggcgccagatacaaccttgccatcgaggagcactgtacatttggggaccccatcgtttaaggccatgtcactagaagcgcagtttaagaaaaggcatggtgacccatgaccagaggggatcctatggttatgtgtgccaggctggctggcaggaactggggtggctatcaatattggatggcgaggacagcgtggcactggctgcgagtgttcctgagagttgaaagtgggatgacttatgacacttgcacagcatggctctgcctcacaatgatgcagtcagccacctggtgaagaagtgacctgcgacacaggaaacgatgggacctcagtcttcttcagcagaggacttgatattttgtatttggcaactgtgggcaataatatggcatttaagaggtgaaagagttcagacttatcaccattcttatgtcactttagaatcaagggtgggggagggagggagggagttggcagtttcaaatcgcccaagtgatgaataaagtatctggctctgcacgaaaaaaaaaaaaaaaaaa

SEQ ID NO: 914 - DNA, 1423 bp, Homo sapiens
gactatctcccagcggcaggcccttcgataaaatcaggaacttgtgctggccctgcaatgtcaagggagggggctcacccagggctcctgtagctcagggggcaggcctgagccctgcacccgccccacgaccgtccagcccctgacggggcaccccatcctgaggggctctgcattggcccccaccgaggcaggggatctgaccgactcggagcccggctggatgttacaggcgtgcaaaatggaagggtttcccctcgtcccccctccatcagaagacctggtgccctatgacacggatctataccaacgccaaacgcacgagtattacccctatctcagcagtgatggggagagccatagcgaccattactgggacttccacccccaccacgtgcacagcgagttcgagagcttcgccgagaacaacttcacggagctccagagcgtgcagcccccgcagctgcagcagctctaccgccacatggagctggagcagatgcacgtcctcgatacccccatggtgccaccccatcccagtcttggccaccaggtctcctacctgccccggatgtgcctccagtacccatccctgtccccagcccagcccagctcagatgaggaggagggcgagcggcagagccccccactggaggtgtctgacggcgaggcggatggcctggagcccgggcctgggctcctgcctggggagacaggcagcaagaagaagatccgcctgtaccagttcctgttggacctgctccgcagcggcgacatgaaggacagcatctggtgggtggacaaggacaagggcaccttccagttctcgtccaagcacaaggaggcgctggcgcaccgctggggcatccagaagggcaaccgcaagaagatgacctaccagaagatggcgcgcgcgctgcgcaactacggcaagacgggcgaggtcaagaaggtgaagaagaagctcacctaccagttcagcggcgaagtgctgggccgcgggggcctggccgagcggcgccacccgccccactgagcccgcagcccccgccgggccccgccaggcctccccgctggccatagcattaagccctcgcccggcccggacacagggaggacgctcccggggcccagaggcaggactgtggcgggccgggcctcgcctcacccgccccctccccccactccaggccccctccacatcccgcttcgcctccctccaggactccaccccggctcccggacgccagctgggcgtcagaccccaccggggcaaccttgcagaggacgacccggggtactgccttgggagtctcaagtccgtatgtaaatcagatctcccctctcacccctcccacccattaacctcctcccaaaaaacaagtaaagttattctcaatccatcaaaaaaaaaaaaaaaaaa

SEQ ID NO: 915 - DNA, 3311 bp, Homo sapiens
aaagcctcggctacttccgagggggtgagtggcttcaccgccggtcccttgcagcgctgcctttcgatctctccacatctcggtggcgcgggatctcaagatgcgcctccacctgctcctgctgctcgcgctgtgcggtgcaggcaccaccgccgcggagctcagttacagcttgcgtggcaactggagcatctgcaatgggaacggctcgctggagctgcccggggcggtccctggctgcgtgcacagcgccttgttccagcagggcctgatccaggattcttactacagatttaatgaccttaactacagatgggtctctttggataactggacctatagcaaagaatttaaaatcccctttgaaattagcaaatggcaaaaagtaaatttgattcttgagggagtggatacggtttcaaaaatcctgttcaatgaagtcactattggggaaacagacaatatgttcaatagatatagctttgatattaccaacgtggtcagggacgtgaactccattgagctgcgtttccagtcagcggtgttgtatgcagcacagcagagcaaagctcacactcgctaccaggttcccccagactgccctccacttgtgcagaagggtgaatgccatgtcaactttgttcggaaggagcaatgttcctttagttgggactgggggccttcctttcctacccagggaatctggaaagatgttagaattgaagcctataatatttgtcacctgaactacttcacattttccccaatatatgataagagtgcccaggagtggaatctggaaatagagtctacatttgatgttgtcagctcaaagccagttggtggtcaagtgatcgtagccatccctaagttgcaaacacaacagacatacagcattgaacttcaacctgggaaaaggattgttgagctatttgtgaacattagcaagaatattactgtagaaacttggtggcctcatggacatggaaaccagactgggtacaacatgactgttctttttgaactggatggaggcttaaatattgaaaaatcagctaaggtttattttaggacagtggaacttatagaagagcctataaaagggtctcctggtttgagtttctatttcaaaattaatggatttcccatatttctaaaaggctcaaactggatcccagcagattcattccaggaccgagtaacctctgagttgttacggctccttttacagtctgttgtggatgctaatatgaatactcttcgggtttggggaggaggaatttatgagcaggatgaattctatgaactctgtgatgaactaggaataatggtatggcaggattttatgtttgcctgtgccctttatccaactgatcagggcttcctggattcagtgacagcagaagttgcctaccagatcaagagactgaaatctcatccttctatcatcatatggagtggcaataatgaaaatgaggaggcgctgatgatgaattggtatcatatcagtttcactgaccggccaatctacatcaaggactatgtgacactctatgtgaaaaacatcagagagctcgtactggcaggagacaagagtcgtccttttattacgtccagtcctacaaatggggctgaaactgttgcagaagcctgggtctctcaaaaccctaatagcaattattttggtgatgtacatttttatgactatatcagtgattgctggaactggaaagttttcccaaaagctcgatttgcatctgaatatggatatcagtcctggccgtccttcagtacattagaaaaggtctcgtctacagaggactggtctttcaatagcaagttttcacttcatcgacaacatcacgaaggtggtaacaaacaaatgctttatcaggctggacttcatttcaaactcccccaaagcacagatccattacgcacatttaaagataccatctaccttactcaggtgatgcaggcccagtgtgtcaaaacagaaactgaattctaccgccgtagtcgcagcgagatagtggatcagcaagggcacacgatgggggcactttattggcagttgaatgacatctggcaagctccttcctgggcttctcttgagtacggaggaaagtggaaaatgcttcattactttgctcagaatttctttgctccactgttgccagtaggctttgagaatgaaaacacgttctatatctatggtgtgtcagatcttcactcggattattcgatgacactcagtgtgagagtccatacatggagctccctggagcccgtgtgctctcgtgtgactgaacgttttgtgatgaaaggaggagaggctgtctgcctttatgaggagccagtgtctgaattgctgaggagatgtgggaattgcacacgggaaagctgtgtggtttccttttacctttcagctgaccatgaactcctgagcccgaccaactaccacttcttgtcctcaccgaaggaggccgtggggctctgcaaggcgcagatcactgccatcatctctcagcaaggtgacatatttgtttttgacctggagacctcagctgtcgctccctttgtttggttggatgtaggaagcatcccagggagatttagtgacaatggtttcctcatgactgagaagacacgaactatattattttacccttgggagcccaccagcaagaatgagttggagcaatcttttcatgtgacctccttaacagatatttactgaaggaatctaggttgtattttcagtggacaatgggaataaagcatttctaaagcaccgactggagaggaaggcaacagagacaaggagagaagccgagagacatgtctgcgtgctgccacgcatttgagcgattgctctgtgaagagttgtacactgaacactttcaggggaggctgtttacccaggcaatgtcctcaaacaagcctgtgccggggtgtcctggaatctgtgccaggactgtgtttttagcccttcacctctcagctttagcaggacatgaaccagttataacaagatggccctgcagctggttacaagaatgtgacatggcaggatctatggaaccaaatggaaggttttgaggtgatgtaggtctttcacagctagctttggggaatacggaatactcaaataaagtgctttgttattatttcagagggaatggcgattgaaatgttacaacagagatttcttggtggtagctatttgggtaaaggtatatgggtatttttctgtacatgtgaaattatataaaaataaaagttatataaattacattgacaacttgata

SEQ ID NO: 916 - DNA, 733 bp, Homo sapiens
ggcgggagcagggcggggcctgagcactaggcggcggcggctggcgtggggctgcttagatgcgccacggtttcggtagcgacggtatctctagccgggcctgagctgtgctagcacctcccccaggagaccgttgcagtcggccagcccccttctccacggtaaccatgtgcgaccgaaaggccgtgatcaaaaatgcggacatgtcggaagagatgcaacaggactcggtggagtgcgctactcaggcgctggagaaatacaacatagagaaggacattgcggctcatatcaagaaggaatttgacaagaagtacaatcccacctggcattgcatcgtggggaggaacttcggtagttatgtgacacatgaaaccaaacacttcatctacttctacctgggccaagtggccattcttctgttcaaatctggttaaaagcatggactgtgccacacacccagtgatccatccaaaaacaaggactgcagcctaaattccaaataccagagactgaaattttcagccttgctaagggaacatctcgatgtttgaacctttgttgtgttttgtacagggcattctctgtactagtttgtcgtggttataaaacaattagcagaatagcctacatttgtatttattttctattccatacttctgcccacgttgttttctctcaaaatccattcctttaaaaaataaatctgatgcagatgtgtaaaaaaaaaaaa

SEQ ID NO: 917 - DNA, 1171 bp, Homo sapiens
gttgagggcgagccggcgcaccgtacgctgggacgtgtggtttcagctcgtgcgcctccccgtgggtttgcgacgtttagcgactattgcgcctgcgccagcgccggctgcgagactggggccgtggctgctggtcccgggtgatgctaggcggctccctgggctccaggctgttgcggggtgtaggtgggagtcacggacggttcggggcccgaggtgtccgcgaaggtggcgcagccatggcggcaggggagagcatggctcagcggatggtctgggtggacctggagatgacaggattggacattgagaaggaccagattattgagatggcctgtctgataactgactctgatctcaacattttggctgaaggtcctaacctgattataaaacaaccagatgagttgctggacagcatgtcagattggtgtaaggagcatcacgggaagtctggccttaccaaggcagtgaaggagagtacaattacattgcagcaggcagagtatgaatttctgtcctttgtacgacagcagactcctccagggctctgtccacttgcaggaaattcagttcatgaagataagaagtttcttgacaaatacatgccccagttcatgaaacatcttcattatagaataattgatgtgagcactgttaaagaactgtgcagacgctggtatccagaagaatatgaatttgcaccaaagaaggctgcttctcatagggcacttgatgacattagtgaaagcatcaaagagcttcagttttaccgaaataacatcttcaagaaaaaaatagatgaaaagaagaggaaaattatagaaaatggggaaaatgagaagaccgtgagttgatgccagttatcatgctgccactacatcgttatctggaggcaacttctggtggtttttttttctcacgctgatggcttggcagagcaccttcggttaacttgcatctccagattgattactcaagcagacagcacacgaaatactatttttctcctaatatgctgtttccattatgacacagcagctcctttgtaagtaccaggtcatgtccatcccttggtacatatatgcatttgcttttaaaccatttcttttgtttaaataaataaataagtaaataaagctagttctattgaaatgcaaaaaaaaaaaaa

SEQ ID NO: 918 - DNA, 2850 bp, Homo sapiens
tcgcacttccgtgtgccgcggcgccggagcccgaggcggctgtagcccacatctcccgagcgacccccggcgcccgcccgccgcgcggaggcccgggccacacctcactggccgcttggcccatcccagtcagcgccgcgccgaaccccgtccgcgcgcgccggggagcggcgcccccgccgctgccgccgcgacccttggcgcctgcccctgcaacgggaggtctgcagggaactggccaggcaagggggcaggcccgtttctcctggtggttggtgcgttgtagcagcagcgggagccaggactaaggacaagcaggagctgggagccccagccccactgcaggccccaccatggcgccgttcctgcgcatcgccttcaactcctatgagctgggctccctgcaggccgaggacgaggcgaaccagcccttctgtgccgtgaagatgaaggaggcgctcagcacagagcgtgggaaaacactggtgcagaagaagccgaccatgtatcctgagtggaagtcgacgttcgatgcccacatctatgaggggcgcgtcatccagattgtgctaatgcgggcagcagaggagccagtgtctgaggtgaccgtgggtgtgtcggtgctggccgagcgctgcaagaagaacaatggcaaggctgagttctggctggacctgcagcctcaggccaaggtgttgatgtctgttcagtatttcctggaggacgtggattgcaaacagtctatgcgcagtgaggacgaggccaagttcccaacgatgaaccgccgcggagccatcaaacaggccaaaatccactacatcaagaaccatgagtttatcgccaccttctttgggcaacccaccttctgttctgtgtgcaaagactttgtctggggcctcaacaagcaaggctacaaatgcaggcaatgtaacgctgccatccacaagaaatgcatcgacaagatcatcggcagatgcactggcaccgcggccaacagccgggacactatattccagaaagaacgcttcaacatcgacatgccgcaccgcttcaaggttcacaactacatgagccccaccttctgtgaccactgcggcagcctgctctggggactggtgaagcagggattaaagtgtgaagactgcggcatgaatgtgcaccataaatgccgggagaaggtggccaacctctgcggcatcaaccagaagcttttggctgaggccttgaaccaagtcacccagagagcctcccggagatcagactcagcctcctcagagcctgttgggatatatcagggtttcgagaagaagaccggagttgctggggaggacatgcaagacaacagtgggacctacggcaagatctgggagggcagcagcaagtgcaacatcaacaacttcatcttccacaaggtcctgggcaaaggcagcttcgggaaggtgctgcttggagagctgaagggcagaggagagtactttgccatcaaggccctcaagaaggatgtggtcctgatcgacgacgacgtggagtgcaccatggttgagaagcgggtgctgacacttgccgcagagaatccctttctcacccacctcatctgcaccttccagaccaaggaccacctgttctttgtgatggagttcctcaacgggggggacctgatgtaccacatccaggacaaaggccgctttgaactctaccgtgccacgttttatgccgctgagataatgtgtggactgcagtttctacacagcaagggcatcatttacagggacctcaaactggacaatgtgctgctggaccgggatggccacatcaagattgccgactttgggatgtgcaaagagaacatattcggggagagccgggccagcaccttctgcggcacccctgactatatcgcccctgagatcctacagggcctgaagtacacattctctgtggactggtggtctttcggggtccttctgtacgagatgctcattggccagtcccccttccatggtgatgatgaggatgaactcttcgagtccatccgtgtggacacgccacattatccccgctggatcaccaaggagtccaaggacatcctggagaagctctttgaaagggaaccaaccaagaggctgggagtgaccggaaacatcaaaatccaccccttcttcaagaccataaactggactctgctggaaaagcggaggttggagccacctttcaggcccaaagtgaagtcacccagagactacagtaactttgaccaggagttcctgaacgagaaggcgcgcctctcctacagcgacaagaacctcatcgactccatggaccagtctgcattcgctggcttctcctttgtgaaccccaaattcgagcacctcctggaagattgaggttcctggacagatcaggctagccctgccctccacccacacctgcccgctccccacgataagcaccagtgggactgtggtgacttctgctgctggccccgcccctgcccccagagcgtccttggctgccgtctggccgggctctcatggtacttcctctgtgaactgtgtgtgaatctgcttttcctctgccttcggagggaaattgtaaatcctgtgtttcattacttgaatgtagttatctattgaaaatatatattatatacatagacatatatatatatataataggctgtatatattgctcagtagagaaaaaccatgggggactggtgatatgttgatctttttcaaaaaaatatatatatgacaaaaaaaaaaaaaaaggagcacaagctgtttgaaccaccaggtttatttgtgtgtctaaataaacaccaaatagtaccaaaaaaaaaaaaaaaaa

SEQ ID NO: 919 - DNA, 2210 bp, Homo sapiens
gctttgcaaccagctgcggatgcctggacgtctaattgctcaaaggtgttatctgagactgaagaaacagacttttcccctggattctttgaaaatccccctctcttattctctagcagaataaaaactccctgctttttcctttttacacacggatttgagagatcttgttctccctccttctggcttttactaaattgaatgtctttctctatccccaagcaccagtatgtcagtgtttgacatcaactgcaccactgatacacgagtcggaatttgagcttctacaagtacattccttcctaggccaaacactgacgctaagaaatacgagaacagatcatcgctaaacagcagctgaaggtcaggcgaactgactcgctgcggaatctgcctttgcacgtgatcagtcggacgtctacacccgcagccgtcttctgtctccgcctcaccctcaggcctgacggtccgagtggagctgcgggacagcccgaacctccaggtcagccccgcggccctccatggcgctggtgcgcgcactcgtctgctgcctgctgactgcctggcactgccgctccggcctcgggctgcccgtggcgcccgcaggcggcaggaatcctcctccggcgataggacagttttggcatgtgactgacttacacttagaccctacttaccacatcacagatgaccacacaaaagtgtgtgcttcatctaaaggtgcaaatgcctccaaccctggcccttttggagatgttctgtgtgattctccatatcaacttattttgtcagcatttgattttattaaaaattctggacaagaagcatctttcatgatatggacaggggatagcccacctcatgttcctgtacctgaactctcaacagacactgttataaatgtgatcactaatatgacaaccaccatccagagtctctttccaaatctccaggttttccctgcgctgggtaatcatgactattggccacaggatcaactgcctgtagtcaccagtaaagtgtacaatgcagtagcaaacctctggaaaccatggctagatgaagaagctattagtactttaaggaaaggtggtttttattcacagaaagttacaactaatccaaaccttaggatcatcagtctaaacacaaacttgtactacggcccaaatataatgacactgaacaagactgacccagccaaccagtttgaatggctagaaagtacattgaacaactctcagcagaataaggagaaggtgtatatcatagcacatgttccagtggggtatctgccatcttcacagaacatcacagcaatgagagaatactataatgagaaattgatagatatttttcaaaaatacagtgatgtcattgcaggacaattttatggacacactcacagagacagcattatggttctttcagataaaaaaggaagtccagtaaattctttgtttgtggctcctgctgttacaccagtgaagagtgttttagaaaaacagaccaacaatcctggtatcagactgtttcagtatgatcctcgtgattataaattattggatatgttgcagtattacttgaatctgacagaggcgaatctaaagggagagtccatctggaagctggagtatatcctgacccagacctacgacattgaagatttgcagccggaaagtttatatggattagctaaacaatttacaatcctagacagtaagcagtttataaaatactacaattacttctttgtgagttatgacagcagtgtaacatgtgataagacatgtaaggcctttcagatttgtgcaattatgaatcttgataatatttcctatgcagattgcctcaaacagctttatataaagcacaattactagtatttcacagtttttgctaatagaaaatgctgattctgattctgagatcaatttgtgggaattttacataaatctttgttaattactgagtgggcaagtagacttcctgtctttgctttctttttttttttctttttgatgccttaatgtagatatctttatcattctgaattgtattatatatttaaagtgctcattaatagaatgatggatgtaaattggatgtaaatattcagtttatataattatatctaatttgtacccttgttgaaattgtcatttatacaataaagcgaattctttatctctaaaaaaaaaaaaaaaaaa

SEQ ID NO: 920 - DNA, 2447 bp, Homo sapiens
gtgacagagctcaaagggccctgggccttccctccctggctcggctgtgcttgggagggttccccagtccagaatccctaaggagaatggggcagctgatccatccctggtgtacaaactgctgactgcagacagatgctgagctacccaaaccaacacctagcctctccctgaagatcctcccaggctgagagagttctgggtgtcctaggaccaaggacactggcagacttccagaagggcccccaaagccctaacctgtccagccagagcatgcgtctcagcagagctgtcttcccaagcctttgatgacaaaccaatttccctcgatgatgtgcttctgagtgctctgctgaggaacaatgggaagtctgcccagcagaagaaaatctctgccaagcccaagcttgagttcctctgtccaaggccagggacctgtgaccatggaagcagagagaagcaaggccacagccgtggccctgggcagtttcccggcaggtggcccggccgagctgtcgctgagactcggggagccattgaccatcgtctctgaggatggagactggtggacggtgctgtctgaagtctcaggcagagagtataacatccccagcgtccacgtggccaaagtctcccatgggtggctgtatgagggcctgagcagggagaaagcagaggaactgctgttgttacctgggaaccctggaggggccttcctcatccgggagagccagaccaggagaggctcttactctctgtcagtccgcctcagccgccctgcatcctgggaccggatcagacactacaggatccactgccttgacaatggctggctgtacatctcaccgcgcctcaccttcccctcactccaggccctggtggaccattactctgagggctggcccgctccctggcaaggatatacccctacctgtgactgtgcagaggacaccactcaactggaaagagctggacagctccctcctgttttctgaagctgccacaggggaggagtctcttctcagtgagggtctccgggagtccctcagcttctacatcagcctgaatgacgaggctgtctctttggatgatgcctaggcccaaaggagaggccaaaagggaaaccaaggctgcacacctagaaccccaattcagcctcctgggcaccccagaggcaaggctgtgcactcagggagggagggtgggacacagaggtgcatctagggtcccacctgtacccttgctctttcctctcttagcccttagaagtcacctacttccttccagtgccatgatcccacctgcgacctctagtgcgagtgcagagaaggtgggaccagggccagggttccaaaaagagaataagcctcctggggggtctgacctagttagttcttgagtttggggtttccagtaccatctggatgccctgcctgttgagccccattctacatccccaccattaaccaggccccacccacaaggtagaaacaacccctagagtcaacgagaaagtcattttcagaaaatctacaagtctcgttgagaccaccaccatacctcagaaggtaggactgtggcctagaagggaaaggaaagctgagatgatgtcttaccgtagcagcagatcttggatggtccaggctctatgtgacctccagagcaaagagaaagacttcggacagtctaggtcctcaaatgtcccccattgaggacaacagccccagctctttttcttttttttgagacggagtcttgccctgttgcccatgctggagtgcaatggcacgatctcagctcactgcaacctccatctcctggattcaaacaattctcctgcctcagcctccagaatagctgggattacaggcgtacaccaccatgcctggctaatttttttgtatttttagtagacatggggtttcaccacattggccaggctggtgtcgaactcctgacctcaggtgatccacccaccttggcctcccaaagtgctgggattacaggtgtgagccacggcacccagcctagctctcagatctctatttcattttgtggcttaccattccctagcacactggccttgccatcttgtggccgaataaaaaataacacctcttaagtctagcacactgcagtgaggccaggcacctcagtgctgggcaggggcatcagaaggtgctaagccctctctccacaatgccaagacggagaccacagcctacaccaaatccagcccttgatttccctgctgcctccataaacagaaagaggtctgctggatccgctaagggatcagggagaggaagaaagagggatggggtgggaggcaccccctccagtgctcctactggttcccaagctacaggtggggtgggaaaggctttatcaggtatcatcaacaggttctcaattaaagatttgatttattcaagtatgtgaaaaaa

SEQ ID NO: 921 - DNA, 3389 bp, Homo sapiens
ggagagcgcagagccagcgagccagcgagcgagcgagcgggagccggagcctcgcgccccccgctccactccgattctctccgcgccagagccagcgcgccaggagctgggtcccttcgcatctctcttcttgtctgtcctttcctggtccctgtttcctcctctctttgccttcgctgcttctaatctcatcccctggagacccaggtctgcgggacccatccatcccctttggggccatgggatcgctgcttgcgctcctggcactgctgctgctgtggggtgctgtggctgagggcccagccaagaaggtgctgaccctggagggagacttggtgctgggtgggctgttcccagtgcaccagaagggcggcccagcagaggactgtggtcctgtcaatgagcaccgtggcatccagcgcctggaggccatgctttttgcactggaccgcatcaaccgtgacccgcacctgctgcctggcgtgcgcctgggtgcacacatcctcgacagttgctccaaggacacacatgcgctggagcaggcactggactttgtgcgtgcctcactcagccgtggtgctgatggctcacgccacatctgccccgacggctcttatgcgacccatggtgatgctcccactgccatcactggtgttattggcggttcctacagtgatgtctccatccaggtggccaacctcttgaggctatttcagatcccacagattagctacgcctctaccagtgccaagctgagtgacaagtcccgctatgactactttgcccgcacagtgcctcctgacttcttccaagccaaggccatggctgagattctccgcttcttcaactggacctatgtgtccactgtggcgtctgagggcgactatggcgagacaggcattgaggcctttgagctagaggctcgtgcccgcaacatctgtgtggccacctcggagaaagtgggccgtgccatgagccgcgcggcctttgagggtgtggtgcgagccctgctgcagaagcccagtgcccgcgtggctgtcctgttcacccgttctgaggatgcccgggagctgcttgctgccagccagcgcctcaatgccagcttcacctgggtggccagtgatggttggggggccctggagagtgtggtggcaggcagtgagggggctgctgagggtgctatcaccatcgagctggcctcctaccccatcagtgactttgcctcctacttccagagcctggacccttggaacaacagccggaacccctggttccgtgaattctgggagcagaggttccgctgcagcttccggcagcgagactgcgcagcccactctctccgggctgtgccctttgagcaggagtccaagatcatgtttgtggtcaatgcagtgtacgccatggcccatgcgctccacaacatgcaccgtgccctctgccccaacaccacccggctctgtgacgcgatgcggccagttaacgggcgccgcctctacaaggactttgtgctcaacgtcaagtttgatgccccctttcgcccagctgacacccacaatgaggtccgctttgaccgctttggtgatggtattggccgctacaacatcttcacctatctgcgtgcaggcagtgggcgctatcgctaccagaaggtgggctactgggcagaaggcttgactctggacaccagcctcatcccatgggcctcaccctcagccggccccctgcccgcctctcgctgcagtgagccctgcctccagaatgaggtgaagagtgtgcagccgggcgaagtctgctgctggctctgcattccgtgccagccctatgagtaccgattggacgaattcacttgcgctgattgtggcctgggctactggcccaatgccagcctgactggctgcttcgaactgccccaggagtacatccgctggggcgatgcctgggctgtgggacctgtcaccatcgcctgcctcggtgccctggccaccctctttgtgctgggtgtctttgtgcggcacaatgccacaccagtggtcaaggcctcaggtcgggagctctgctacatcctgctgggtggtgtcttcctctgctactgcatgaccttcatcttcattgccaagccatccacggcagtgtgtaccttacggcgtcttggtttgggcactgccttctctgtctgctactcagccctgctcaccaagaccaaccgcattgcacgcatcttcggtggggcccgggagggtgcccagcggccacgcttcatcagtcctgcctcacaggtggccatctgcctggcacttatctcgggccagctgctcatcgtggtcgcctggctggtggtggaggcaccgggcacaggcaaggagacagcccccgaacggcgggaggtggtgacactgcgctgcaaccaccgcgatgcaagtatgttgggctcgctggcctacaatgtgctcctcatcgcgctctgcacgctttatgccttcaagactcgcaagtgccccgaaaacttcaacgaggccaagttcattggcttcaccatgtacaccacctgcatcatctggctggcattcctgcccatcttctatgtcacctccagtgactaccgggtacagaccaccaccatgtgcgtgtcagtcagcctcagcggctccgtggtgcttggctgcctctttgcgcccaagctgcacatcatcctcttccagccgcagaagaacgtggttagccaccgggcacccaccagccgctttggcagtgctgctgccagggccagctccagccttggccaagggtctggctcccagtttgtccccactgtttgcaatggccgtgaggtggtggactcgacaacgtcatcgctttgaagaccccatactcccgccctgacacagctgctcctgggaacctagtgcagacccacgtccagggccaggaggaagttggctggagcactgcaataatttattacccaccctatgtctgcccccaaagtcacttacccacctccttaccccagctcttcagactcagaagtcaggagccttggccaggagcctctgcagtggccactaactgcccttgtagctgtgtttcctcctggccaggcccagggctcagagaggagcaagccagggttcactctgccctggacccgggtggctgaggacggcaggccccagtcctaaccagcaaaggtgcttccagcccagcccctccccccaactagggccttttttattttttatataagttactctgggatggggagggtggttattgtgggggctgcccctccccctgcacagtagtttgtcctgtggtttattttgtattacctgtaaataaagtggctttattttaaaaaaaaaaaaaaaaaaaaaaaaaaaaaaaaaaaa

SEQ ID NO: 922 - DNA, 10389 bp, Homo sapiens
atgaccaatgggtctgtgttttggaccggcgaagcccaatggcgcgacagggaaggcgggcccgagatgggttagggtgtccttgcagggtgtctgagctaaacttcaccaaataatagctgtttgtattttggctgctgcaggagccattttagaaataaatatcttccttcaatagatgaaaatgaaaatacagaaaaaagagaagcagttgtcaaatttaaaagttttgaatcactccccaatgtctgatgcctctgtcaattttgactacaaatctccatccccatttgactgcagcactgatcaagaagagaaaattgaagatgttgctagtcactgtctgcctcagaaggacctgtatactgctgaagaggaagctgctaccctttttcctaggaaaatgacatcccataatgggatggaggacagtggaggaggaggtactggagtgaagaagaaacggaagaaaaaggagccaggagaccaagagggtgcagcaaagggaagcaaggacagagagcccaagccaaagaggaaacgagaaccgaaagagccaaaggaacccagaaaggccaaggagccgaagaaggccaaggagcacaaggagccgaagcaaaaagatggggcaaagaaggcacggaagccccgggaggcctcgggcaccaaggaggccaaagagaagaggagctgcactgactctgcagccaggacgaagtccaggaaggccagcaaggagcaaggaccaaccccagtggagaaaaagaagaaaggaaaaaggaaaagtgaaactacagtggagagtttagagctggatcagggcctgacgaacccatctctgcggagtcctgaggagtccactgagtctacagacagccagaaacgacgctcgggaaggcaagtaaagcgcagaaaatacaatgaggacctggacttcaaagtggtggatgatgatggggaaacaattgctgttcttggagctggtcgaacatctgcactctcagcctctacactggcctggcaggcggaggagcctccagaagatgatgcaaacatcattgagaagatcctggcatctaagactgtccaggaggttcacccaggagaacctccgttcgacttggagctgttctacgttaagtatagaaatttttcctacttacattgtaaatgggccacaatggaagagctcgaaaaggatcctcgcatcgcacagaagatcaagcgatttaggaataaacaagcccagatgaagcacatttttacggagcctgatgaagacttgttcaatccagactatgtagaagttgatcgcatcttggaggtggcccacaccaaggatgcagaaacaggggaggaggtaacacattacctggtgaagtggtgctcactaccatatgaagaaagcacgtgggagctagaggaagatgtagatcctgcaaaagttaaagaatttgaatctcttcaagttctccctgaaattaagcatgtggagcggcctgcttcagactcctggcagaaacttgagaagtctcgcgagtataagaacagtaaccagctccgggagtaccagctggaagggatgaactggcttctttttaactggtataacagaaaaaactgtattttggctgatgagatgggcctagggaaaaccatccagtccatcacattcctttcagaaatatttctgagaggaatccacggcccttttctcattatcgcccctctctccaccatcactaactgggagcgggagttccggacatggacagagatgaatgccattgtgtaccacggcagccagatcagcaggcagatgatccagcagtatgaaatggtgtacagagacgcccagggaaaccccctttcaggagtcttcaagttccacgtcgtcatcacaacatttgaaatgatcctagcagactgcccagagttgaagaagattcactggagctgtgtgataattgatgaagcccacagactgaagaataggaactgcaaacttctggagggtctaaagcttatggccctggaacataaagtgcttctcactggaacacccttgcagaactctgtggaggagctcttcagtttgttaaattttctggagccatcacagtttccttcagagaccgctttcttggaggaatttggagatctgaaaacagaggagcaggtaaagaaactgcagtctatcctaaaaccaatgatgcttcggcggctgaaagatgatgtggaaaagaaccttgctcccaaacaagagacgatcattgaggtggaactgaccaatatccagaaaaagtactaccgtgccatcctcgagaagaacttttccttcctgaccaagggggcaaatcagcacaacatgcccaatctcatcaacaccatgatggagctgaggaagtgctgtaaccatccctacctgatcaatggagcagaggagaaaattctagaagatttccgaaaaacccacagccctgatgcccctgactttcagctgcaggccatgattcaggcagcaggaaagcttgtgttgattgataaactactccctaagctgattgcaggtggccacaaagtactcatcttctcccagatggtgcgctgcctcgacatcctagaagattacctcatccagagaagatacacctatgagcgaattgatgggcgagtacggggaaacctgcgccaggcagccatcgaccggttctgtaagccagattcagaccgctttgtctttcttctgtgcaccagagcgggaggcctggggatcaatctcacagctgctgatacctgcatcatatttgattctgactggaacccacaaaatgacttgcaggctcaggcccgatgtcaccgcataggccagagcaaagctgtgaaggtgtatcgcctcatcactcgaaattcctacgagcgcgagatgtttgacaaggccagcctaaagctggggctggacaaggctgttcttcaggacatcaaccgaaagggcggcaccaatggggtacagcagctctcaaaaatggaggtggaggacctactccggaaaggtgcttatggagccttaatggatgaagaagatgaaggctccaagttctgtgaagaagacatagaccagattctgcagaggcgaacgcacaccatcaccatccagtctgaggggaaagggtccacttttgccaaggctagctttgtggcttcaggaaacagaacagatatttccttagatgatcctaacttttggcagaaatgggctaaaatagctgaactagacactgaagcaaagaatgaaaaggaaagcttagtgatcgaccgacctcgcgtgagaaagcagaccaaacactacaactcgtttgaggaagacgagctcatggagttttcagagttagacagcgactcagacgaaaggcccacgagatccaggcgcctcaatgacaaagccaggcgctacctccgagcggagtgcttccgggtagagaagaacctgctcatctttggctggggccggtggaaggacatcctgactcatggccgattcaagtggcatctgaacgagaaggacatggagatgatttgccgtgccctcctggtgtactgtgtcaagcattataagggggacgagaagatcaagagtttcatttgggaactgatcacacctaccaaagatgggcaagcccagaccctccagaaccactcaggcttatctgccccagtccccagagggaggaaggggaagaagacgaagaaccagttgctaatcccagagctaaaggatgcagattggctagccacctgcaaccccgaggtggtcttgcatgatgatggctataagaaacacctcaaacagcactgcaacaaagtacttttgcgagtccggatgctgtactacctaaaagctgaaatactgggagaagcagctgagaaagcatttgaaggatctcctgccagggagctggatgtacctctgcctgacatcgactacatggagatcccagtggactggtgggatgctgaagccgataagtcacttctcattggcgtgttcaagcatggttatgaaaggtacaatgccatgcgagcagacccagcactttgcttcctggagaaagttgggatgcccgatgagaagtccctttctgcagaacagggtgttacagatgggacctcagacattcctgaaagaggcaacacagataaagaagacaatgctgaggacaaagtagatggcctccagaaacaaacggagagttccagtgatggaggtgatggcgtttttagcgaaaagaaggatgacagccgggcagcccaggatggctccgacccagacaaatcgccctggccagtttcctccgccctcacagctcgtctcagacgtctggtcactgtttaccagcgctgcaaccgcaaggaactgtgccggcctgaaattctgggaccaggtaaccaaggatattgggttcaggaagagatgttcaggagaacctcagaaatggacctcatcaacaaggaagcccaaaagaggtggactaggagagaacaagcagacttctatagaacagtgtcttcctttggtgttgtttacgatcaagaaaagaaaacctttgactggacacagttccgcatcatttcccgtttggacaagaagtcggatgagagcctggaacagtatttttatagttttgtggccatgtgccggaatgtctgtcgtctacccacatggaaagatggcggtcccccagataccaccatctacgttgaacccatcactgaggaacgtgctgcaagaactctgtaccgcattgaactgttacggaaagtccgagagcaagtgctcaagtgccctcagctgcatgaacgcctccagctgtgcaggcccagcctctacctcccagtctggtgggagtgtgggaagcatgatcgagacctgctcatcggcactgccaaacatgggctgaaccgcactgactgttacatcatgaacgacccccagctgtccttcctggatgcctatagaaactatgcccagcataaaagatctggcacccaggcaccaggaaatctctgttgcctttaccagaccaactccaagttatatgaatctcttacatattctcaaatgagtaggacttcagagtcccttgaaaatgaacctgaaaatctagtgagagtagaaagcagagatgatcatctcagcctgcctgatgtgacatgtgaaaactttatttctaaagttcaggatgtcatttccatcaaccatgatgaaagtctgctgcctgagtccttagagagcatgatgtatggtaagaaggtgctcagccaagaaccaagctcttttcaggagagcccaagtaccaatactgaatctagaaaagatgttattaccatctcaataagcaaagatgggaactgccagtctggtggccctgaggcagaaatagcttctggccctacttttatgggtagcttagaagcaggaggagtagctcaagcaaacatcaaaaatggaaaacatttgttgatgtctatttcaaaggaaggggagctctgctgcagtgaggcaggacagagacctgaaaacattggccagctggaagccaagtgtttagcttccccttccttgaatccaggaaatgaaagtgggtttgtagatatgtgcagtcttagtgtctgtgactccaaaagaaacctgtcatcagatcagcaattaattgatttattggaaaacaaaagcttagaaagtaaattgattttgagtcagaaccacagtgatgaggaggaagaagaggaggaaaacgaggaggaaaacttagccatggcagtaggcatgggggaaaggccagaggtattgcatctcacggagcccactactaacatctcaagggaaaagaaccaaggcttccaagatgaaaccaagaaaggaagcttagaggtggcaaaccagactcctgggctacagagggctttccccgctccagcagcctgtcagtgccactgcaaacacatggagaggtggatgcatggcctcgagaatgatgaatttgaaatcgagaaacccaaggcttatatcccagatctgttcaaaagtaaaaccaatactatcgccatggagggtgaacccactgctattccatcacagccgtttaaagtgaagcatgagcttttaaaagaaccttggaaagaaagtgcagaggggcaaaacgttttccccacatatcctcttgaaggaagtgagctcaaatcagaagacatggattttgagaataaagatgattatgatagagacggaaactgccatagtcaagattatccagggaagtactctgaagaggagagcaagagctcaacatcgggcatcacaggagacattggggatgagctacaggaggctcgagctcccactattgctcagctgctacaggagaaaactctctattccttctctgagtggccaaaggaccgcgtgataattaaccgcctagataatatctgccacgtggtgttaaaggggaagtggccctctagccagcagtatgagccctcaggcacactgcccaccccggtattaaccagcagtgctggttctcgaaccagcctctcagagccggaagcagcagaacacagcttcagcaacggcgcagcattggcggcccagatccacaaggagagcttcttagctccagtattcacaaaggatgaacaaaagcacaggcgtccctatgagtttgaggtggagagggatgcaaaggctcggggcctggagcagttctctgccacccacgggcacacccctatcatcctcaatggctggcatggggagtcagctatggacctctcctgctcatcagaggggtccccaggagccacatcccctttcccagtgagcgccagcacccctaagattggggctatcagttcacttcagggagcccttggcatggacttgtctgggattctgcaagctggcctgatccatcctgtgactggacagattgtcaatggaagcctcagaagagatgatgcagccacgaggaggcggagagggaggcggaaacatgttgaaggagggatggacctcatctttttgaaggagcagacacttcaggcgggaatcttggaagtccatgaagacccagggcaggccaccttgagcaccacacaccctgaggggccagggcctgccacctcggctcctgagccagctacggcagccagcagccaagccgagaaatccattcccagcaagagtctgcttgactggctaaggcagcaggctgactactccttagaagttcctggctttggggcaaatttttcagacaaaccaaagcagaggaggccacgctgtaaagaacctggaaaattagatgtcagctccctgagcggggaagagagagttcctgccatccccaaggagccaggactgagggggtttcttccagaaaacaagttcaatcacactctggctgagcctattcttcgagatacgggcccccgcaggagggggaggcggcctcggagcgaactcctgaaggctccttccattgtggcagactctccctctggaatggggccactgttcatgaatggactgattgctgggatggacctggtaggacttcagaacatgagaaatatgccaggcatccccctcaccgggctggtggggtttccagctggctttgccacgatgccaacaggtgaagaggtcaaaagtaccctgagcatgctgcccatgatgctgccaggcatggctgctgtgccccagatgtttggtgttgggggactcctcagtccacccatggcaaccacctgcacttccactgctccggcgtctctatcaagcacaacgaaaagtggtacggcagtgactgaaaagactgcggaagacaagccgagtagccatgatgtgaaaacagacactttagctgaggacaagcctggtccaggtccattttctgatcagtctgaacctgcaataactactagtagtcctgtggcttttaacccatttctcatcccaggagtatctcctggactcatttacccatccatgttcctctcccctggtatgggcatggctctgccagccatgcagcaggccagacactcggaaatagtaggtctggagagccagaagaggaagaagaagaagacaaagggggacaaccccaactcccacccagagcctgctcccagctgtgaaagggagcccagcggtgatgagaactgtgccgaacccagtgcccctttgcccgcagagagagaacatggggcacaggctggggagggggcactcaaagactccaacaacgacaccaattagaacttttttcatttaagaaattattgtgacttgtaagtttcttatcccataaaggtttgttacttccctcacttcacctccataagaacctgtgtttccataagtaagattacgtacctgatttcctgtctgagaactatggtaacagatgttaatagttgcagggtctcaccacttcattagataagtgttgtctacctagtctaggaggcacagaattctcattctgttatccagttcattccagcaatcatagttaatacagtacttggtgacacgccctacccccttctcttccaagtttcccactcacttgaggaggaaaaatggcaaaagaaagctgtctagggttttaccattgaagggtggaagaacagagacaaagaggagctctttttctgtgagctgggttgcacaggaagaatgtcacagggaaccaaaaagcacagaaaaaggaagtgctggtgcatatttttgagttaaaatatttccctattttatcatgattactaagtgagtagtatagacagaagtatataactaatggttgaaaatacatatattcatttctttataaaaaacaaaaaccttaccggtagtaatataatttcccccttggtggtttttcagacacctgcagcaagaagaaatactgactgactaggcattattttctatacatccctctcaccagtgaaaagattcctcttgctgcgagaaagctttacccaccatgagttattgctgtcgacgggggtggggcaaggacccgcgctccgtagagctacacgctgcttcacaagcacacggctagcgctctgctctcacctggttcgcttacagatttctctagccattaatttgcctctctgtgtttaaagagcaccaggaccgaatggattttcacttcaggctttccttcaccaagaataaggttctttctggagcctgcaagaagacagttgcccaacactttgacacttgctagtaggtcctttgatcaagagtgtctgaggctgtcaaatgtgtgccaccctttataatacagctatgaaaagttacttctccattaatttctccattctgtttatatcttacagttggacccaaattccaaattatcagttaatcgaaactacattgcaagtcaacattattttctcttcttcctcagcttctccatgtttaggaactgagaaagaacctgcctaagcagcacttccccatgtcctttcaccttcatgttaacgtcccttctgatggtctcactcttcacaggtagttcacactctgagacttgaagtaagctcatggttcagtactctgggggcgcagggctgcgcaggacccttggaaatgttgcaagtgttactagtaccagtttcactttttgttgtcacaatttactgtattttttactttttctgttacagttttgctaatttatcagaaggtccaaaagtctgacataactatttcattttgcattatttatttatgatgcttttttcattgtcttttatacatttgggattataaattatgtaaatgttaaaatgagcatctcaaagaagtctgttaaatcatgactgaaaaaaatcaatcagatgtatcttcaaaaagtggagtcccagttttatgaatcagagatataaaccagaaattctataactgatcatagaagaagaatccagtaattgaacaaatcctatttaatgacatccttgtagcatagatggtctataatgctgaccacagatttcttagaaatgctgctctctctatttaactaacattttgttcagttttgcctccagtggaagcagaaagggttttttcagctgttaaatcctaaaaatcaatataatttatttatgtaagaaaaataactcaatcaatatatttttgaaccttttaagtactaattttctttttatcaagtagaaaaaaaaatgtatttgccctaaatccttaaaatacaaatgctataaaaattcctgtatcttgaaagccttactgcaaatgagtattatagacatccagcagagtctggttttctttgt

SEQ ID NO: 923 - DNA, 1415 bp, Homo sapiens
attgaaggctgggcagagtctgagtccacccgggtcgtgctccccccgctcgcccggctcctccgcagtccaggaatctccccgtggctctccccgacctggaggggtggacgcccctggcccccagtccccggcctgcggagggggccggtggctgcggccctgcgcggggccggggcgggccgagccaagggccgcccccggccgaccctccccctgccgggcccgccctccccgccgcggcgctggaggagggcggggcggggccctggggtcagtctgagcctccggcaccggccgcgcagctggaggcggcggagcggaagccttgacttcatctcagctccagagcccgccctctcttcctgcagcctgggaacttcagccggctggagccccaccatggctgcaatccgaaagaagctggtgatcgttggggatggtgcctgtgggaagacctgcctcctcatcgtcttcagcaaggatcagtttccggaggtctacgtccctactgtctttgagaactatattgcggacattgaggtggacggcaagcaggtggagctggctctgtgggacacagcagggcaggaagactatgatcgactgcggcctctctcctacccggacactgatgtcatcctcatgtgcttctccatcgacagccctgacagcctggaaaacattcctgagaagtggaccccagaggtgaagcacttctgccccaacgtgcccatcatcctggtggggaataagaaggacctgaggcaagacgagcacaccaggagagagctggccaagatgaagcaggagcccgttcggtctgaggaaggccgggacatggcgaaccggatcagtgcctttggctaccttgagtgctcagccaagaccaaggagggagtgcgggaggtgtttgagatggccactcgggctggcctccaggtccgcaagaacaagcgtcggaggggctgtcccattctctgagatccccaaggcctttcctacatgccccctcccttcacaggggtacagaaattatccccctacaaccccagcctcctgagggctccatgctgaaggctcccattttcagttccctcctgcccaggactgcattgttttctagccccgaggtggtggcacgggccctccctcccagcgctctgggagccacgcctatgccctgcccttcctcagggcccctggggatcttgccccctttgaccttccccaaaggatggtcacacaccagcactttatacacttctggctcacaggaaagtgtctgcagtaggggacccagagtcccaggcccctggagttgttttcggcaggggccttgtctctcactgcatttggtcaggggggcatgaataaaggctacaggctccaacgtgaaaaaaaaaaaaaaaaaa

SEQ ID NO: 924 - DNA, 3475 bp, Homo sapiens
gaggaggtcggctttgttctcgccccgccctctccccgcctcctccctagatatcgcgagagggcgggtccgcttggcttcggcgtcgcgtcgctcctgcgctggagctctaggccggcgtctctccgcgagccgcgggtcaagtggcagtggctaagggtgcgcgagtagccgccacccgttcggcgttggctctggcgtcggggtcgttgtgtcgtgacaaccgctgcggtagccgtttccgaggcagcagttgcggccgctttagccctgagcgggatctgcggctgcctgcgagtctctgctgtgccgacccttctcttcgcggaccccacgccaagcagcgaccctgagccgacagccggagcgcccggcaatggcggcctcgacggcctcgcaccggcccatcaaggggatcttgaagaacaagacctctacgacttcctctatggtggcgtcggccgaacagccccgcgggaatgtcgacgaggagctgagcaaaaaatcccagaagtgggatgaaatgaacatcttggcgacgtatcatccagcagacaaagactatggtttaatgaaaatagatgaaccaagcactccttaccatagtatgatgggggatgatgaagatgcctgtagtgacaccgaggccactgaagccatggcgccagacatcttagccaggaaattagctgcagctgaaggcttggagccaaagtatcggattcaggaacaagaaagcagtggagaggaggatagtgacctctcacctgaagaacgagaaaaaaagcgacaatttgaaatgaaaaggaagcttcactacaatgaaggactcaatatcaaactagccagacaattaatttcaaaagacctacatgatgatgatgaagatgaagaaatgttagagactgcagatggagaaagcatgaatacggaagaatcaaatcaaggatctactccaagtgaccaacagcaaaacaaattacgaagttcatagacgagatttgttcaacactgcaattgtttgttagatgtaaaccctgtgactatagtacgttgcttcttgttcttcacaattcatgacttaagtaccaaaatgcataccagttattatatattgccaagaattaaatgataaacttagagactgattagactgaaaatgcctaatcgatatatatattcttgtgcctagtactttaccacaaatacagtgtaatatcatcagtccaaaactgcattacttttgtaaaaacactggttaatttgtataagatattatagagctttttatgctttagaagttaaacaatatctttgggggggaactaatttattttcatcacttgaaatgtggtagctcttacaaagtttattgatttgatttttttaaaaatcaaaagccaattgaacaacaggatatatagactgataaatatttaggctgaatagtattttaacacttgtcttcaacttgatttgtctgtttaattgaaaagaattataagagttactgttgcattttctgacctactatttttaaaattcctgttgagtttctttgtgtttacaaggaaaggactgaactttttctcatcaaaactagcttttttccccacaaataaattatcaggttaaactttcaccaatgtctgctctgttttttgtttttggggggttttttgtttgtttttgttttttaatgtttttggtacactgggcagacttcagagcagttttttaaaaaaataaatattctaatgtagctatctcgccattccctttaaatacctgtcttaacctcctgcttttctttcctactcctttccacacatacgcacacaatcttctaccttttaaaggatcattaagactgtcaccacattaggagctctttctctcactcttctgtcatttgctgctatgttgaaattcttattttgaccatcaatgcctatgaattcttctaatacgtgaagaaaatagtttgagtagcagcagtgctataggtgggaaatacagtttagctgctgaatttctatacctctctgatttacagattgctaattaaatggctattattagtttggattaattagacttaagaaaacaactaactgagggttttttttgtttgttttttgagggttttctttgcatgagagttgtatgtaaccagtgatatgattattcctgaatgtacagacagaagtaagcctggacattgttaaatagtccctgctttaagggactacgataatgtgtactatgacaaacgtgctttattcttctaacgcagtaagaattaggtggaattttttccttcaaccaagtgcaggaaagccctgtgtgtcttggtttagttatggtttcatttctagccatacaattgatgaattgtgtacaacttttgttagtaccaaaataatctgttatatgaacagacttctaaaataacgtctgtatattttatatatagatacatatatgaaagaaggcttttattgaacagcttatcttccacttgcaggtttatggaaacagcagtatttgaaaataaataaaaagtgggagaattccttgctgttagaagaatgtggccattattttgattttttgaatgagatatataatcaaagtactgctgaactgtgagtgcagtattctaaacatttcagctaggaataccactgatttagaaacaaaactgtttgtctctggtttctgaatttaaaatgttgggattacctgtttaaatctgtcttgggggatgtagagattaagtctgtacatgtgcgtgcacatatattcatgcaccctctgattttggttttcttgtttctgagttcttagaaagtacccacatactcttttttttttttttgtagaagtagctgtcatagagtgaagaaaaggataagactttaaacagttgattctttttgtgttttctacaaactattttttgaaatttaaatcacaaactcattttctggtttttagaaagtagatgatgatttcagaggagtaaggcatgccaagcagcatgctcagtggggttttaggctgtcacatgcagctgagaaaaggtatgttcaagtcataagtaggtaattgatagggtatgaactagtcaaaatatgaaccattatgattcaagttagattttcctctggagagacagatctgaatgttcagttctagccaaggtagattttactttcaactttttaatcagtatcactttctgtgcttaactatttggtgttaccttgtctgttttcatttgtctaaaattctgcagagatgactaaaatttgacataatggtgtaaatggattgttaaggtaactttcagttgaagattaaagcaagatgccattttccccatgactttggttttgtttacatttttccctttcagttagtatacactacacgtactgtaataaaatacaataatatgacaaaaaaaaaa

SEQ ID NO: 925 - DNA, 1242 bp, Homo sapiens
atttcatgttatacttaataaaacaaaacatacctgtatacacacacattcactcacattgaagatgcaagatgaagaaagatacatgacattgaatgtacagtcaaagaaaaggagttctgcccaaacatctcaacttacatttaaagattattcagtgacgttgcactggtataaaatcttactgggaatatctggaaccgtgaatggtattctcactttgactttgatctccttgatcctgttggtttctcagggagtattgctaaaatgccaaaaaggaagttgttcaaatgccactcagtatgaggacactggagatctaaaagtgaataatggcacaagaagaaatataagtaataaggacctttgtgcttcgagatctgcagaccagacagtactatgccaatcagaatggctcaaataccaagggaagtgttattggttctctaatgagatgaaaagctggagtgacagttatgtgtattgtttggaaagaaaatctcatctactaatcatacatgaccaacttgaaatggcttttatacagaaaaacctaagacaattaaactacgtatggattgggcttaactttacctccttgaaaatgacatggacttgggtggatggttctccaatagattcaaagatattcttcataaagggaccagctaaagaaaacagctgtgctgccattaaggaaagcaaaattttctctgaaacctgcagcagtgttttcaaatggatttgtcagtattagagtttgacaaaattcacagtgaaataatcaatgatcactatttttggcctattagtttctaatattaatctccaggtgtaagattttaaagtgcaattaaatgccaaaatctcttctcccttctccctccatcatcgacactggtctagcctcagagtaacccctgttaacaaactaaaatgtacacttcaaaatttttacgtgatagtataaaccaatgtgacttcatgtgatcatatccaggatttttattcgtcgcttattttatgccaaatgtgatcaaattatgcctgtttttctgtatcttgcgttttaaattcttaataaggtcctaaacaaaatttcttatatttctaatggttgaattataatgtgggtttatacattttttacccttttgtcaaagagaattaactttgtttccaggcttttgctactcttcactcagctacaataaacatcctgaatgttttcttaaaaaa

SEQ ID NO: 926 - DNA, 3258 bp, Homo sapiens
aaggctgtggaccccagagaaggtggcaggtggcccccctaggagagctctgggcacattcgaatcttcccaaactccaataataaaaattcgaagactttggcagagagtgtgtgtgtgtgtgtatggttgttgggcgtaggacaggtttcggggatgcgcggtacgcggtaccacccctcggaggcccccacccccagacgcccaggccgcctccccactccccctcaagcagccccagccggggactttccgtcgcggggaaggggcggggaccctgagcgaaaggtgcggaggcggcctgccggggtggttcggcttcccgttgccgcctcgggcgctgtacccagagctcgaagaggagcagcgcggccgcgcggacccggcaaggctgggccggactcggggctcccgagggacgccatgcggggaggcaggggcgcccctttctggctgtggccgctgcccaagctggcgctgctgcctctgttgtgggtgcttttccagcggacgcgtccccagggcagcgccgggccactgcagtgctacggagttggacccttgggcgacttgaactgctcgtgggagcctcttggggacctgggagccccctccgagttacacctccagagccaaaagtaccgttccaacaaaacccagactgtggcagtggcagccggacggagctgggtggccattcctcgggaacagctcaccatgtctgacaaactccttgtctggggcactaaggcaggccagcctctctggccccccgtcttcgtgaacctagaaacccaaatgaagccaaacgccccccggctgggccctgacgtggacttttccgaggatgaccccctggaggccactgtccattgggccccacctacatggccatctcataaagttctgatctgccagttccactaccgaagatgtcaggaggcggcctggaccctgctggaaccggagctgaagaccatacccctgacccctgttgagatccaagatttggagctagccactggctacaaagtgtatggccgctgccggatggagaaagaagaggatttgtggggcgagtggagccccattttgtccttccagacaccgccttctgctccaaaagatgtgtgggtatcagggaacctctgtgggacgcctggaggagaggaacctttgcttctatggaaggccccagggccctgtgtgcaggtgagctacaaagtctggttctgggttggaggtcgtgagctgagtccagaaggaattacctgctgctgctccctaattcccagtggggcggagtgggccagggtgtccgctgtcaacgccacaagctgggagcctctcaccaacctctctttggtctgcttggattcagcctctgccccccgtagcgtggcagtcagcagcatcgctgggagcacggagctactggtgacctggcaaccggggcctggggaaccactggagcatgtagtggactgggctcgagatggggaccccctggagaaactcaactgggtccggcttccccctgggaacctcagtgctctgttaccagggaatttcactgtcggggtcccctatcgaatcactgtgaccgcagtctctgcttcaggcttggcctctgcatcctccgtctgggggttcagggaggaattagcacccctagtggggccaacgctttggcgactccaagatgcccctccagggacccccgccatagcgtggggagaggtcccaaggcaccagcttcgaggccacctcacccactacaccttgtgtgcacagagtggaaccagcccctccgtctgcatgaatgtgagtggcaacacacagagtgtcaccctgcctgaccttccttggggtccctgtgagctgtgggtgacagcatctaccatcgctggacagggccctcctggtcccatcctccggcttcatctaccagataacaccctgaggtggaaagttctgccgggcatcctattcttgtggggcttgttcctgttggggtgtggcctgagcctggccacctctggaaggtgctaccacctaaggcacaaagtgctgccccgctgggtctgggagaaagttcctgatcctgccaacagcagttcaggccagccccacatggagcaagtacctgaggcccagccccttggggacttgcccatcctggaagtggaggagatggagcccccgccggttatggagtcctcccagcccgcccaggccaccgccccgcttgactctgggtatgagaagcacttcctgcccacacctgaggagctgggccttctggggccccccaggccacaggttctggcctgaaccacacgtctggctgggggctgccagccaggctagagggatgctcatgcaggttgcaccccagtcctggattagccctcttgatggatgaagacactgaggactcagagaggctgagtcacttacctgaggacacccagccaggcagagctgggattgaaggacccctatagagaagggcttggcccccatggggaagacacggatggaaggtggagcaaaggaaaatacatgaaattgagagtggcagctgcctgccaaaatctgttccgctgtaacagaactgaatttggaccccagcacagtggctcacgcctgtaatcccagcactttggcaggccaaggtggaaggatcacttagagctaggagtttgagaccagcctgggcaatatagcaagacccctcactacaaaaataaaacatcaaaaacaaaaacaattagctgggcatgatggcacacacctgtagtccgagccacttgggaggctgaggtgggaggatcggttgagcccaggagttcgaagctgcagggacctctgattgcaccactgcactccaggctgggtaacagaatgagaccttatctcaaaaataaacaaactaataaaaagcaaaaaaaaaaaaaaaagaaaagaaaaaacactgcatttgggcaccatctcagctcccttgcatccaggtgcagcatggactgagttcttgacaacagaatgtggtcagaagtgacatatgccaacacggggtctgggtgggggctcccccacatcctttccttgcctatgagctggaacataacacatgcctatgatccagctttggtcatacccaaggggaaggtggagcaagaaatgaaaaggaacctgaatccctgaatgactgcatggatagaaccactaagaaaaataaacttttatatttttata

SEQ ID NO: 927 - DNA, 1782 bp, Homo sapiens
acttccgctgctgtttcgtagccgactgctgaaggctggtttgcgtcgacatggcggttaccctgagtctcttgctgggcgggcgcgtttgcgccgccgtcactcgctgtgggttcgcgacccggggggtggcgggcccaggccctattggccgggagccggaccccgattccgactgggagccggaggaacgggagctgcaggaggtggagaggtaccggcttctccccgggccctcagcttgaagcagggcctcgtgccccggcgctccaggccgcgcccccttggcgccgggtgtcctgccgctgcttgcgcagcggcccttgtttcttcttacccgttgttaggggcgcagcgtcaggtgttcagctcccctgggaccactggtcccttcattagtgacgtatttcatcatcagtttagagagttcggcatgcttacaggcagttattgttctaggtgttagctttctgggtgtacggagcagctctaagccggcaacatggcccggttgcccttgcgatcaaagagaagagggctgggcgctccatgatttagcctgaggctcttcaaacatccattctgcttccacgcatggcttctgccattggttctcttcccccagcaccctgaaacgacagaaacaagcaatccgattccagaaaattcggaggcaaatggaggcgcctggtgccccgcccaggaccctgacgtgggaagccatggagcagatacggtatttacatgaggaatttccagagtcctggtcagttcccaggttggctgaaggctttgatgtcagcactgatgtgatccgaagagttttaaaaagcaagtttttacccacattggagcagaagctgaagcaggatcaaaaagtccttaagaaagctgggcttgcccactcgctgcagcacctccggggctctggaaatacctcaaagctgctccctgcaggccactctgtatcaggctctttgcttatgccagggcatgaagcctcatctaaagacccaaatcacagcacagctttgaaagtgatagagtcagacactcacaggacaaatacaccaaggagaaggaagggaagaaataaagaaatccaggacctggaggagagctttgtgcctgttgctgcacccctaggtcatccaagagagctgcagaagtactccagtgattctgagagccccagaggaactggcagtggtgcgttgccaagtggtcagaagctggaggagttgaaggcagaggagccagataacttcagcagcaaagtagtgcagaggggccgagagttctttgacagcaacgggaacttcctgtacagaatttgagtcggggcttggcttatggagatgcctcgtgaaacacagctgggcaagtattaatgtatatggaacagcctggatttctgcatatggataagccaccttggaataggaagaggtgttgagcctggactgtgggaggaaagagctgcgtggatagattcaaacttcctgtggtagtgctcccagtctgacctctgtagaccttcagtactcactcttcttgcttaggctctctgtgtgttgaaagccatcccgtgttgcatgtgttgttacaattttctgtgatacttgcaatttatgtttgagaagaagtgaaaagtttgccttctgacctcatttccttcttgatcagtgaacactaacattttggggacaacttagtcaattggttttccttacaacaaaataaagtaaaatgtagcagtcaaaaaaaaaaaaaaaaaaaaaa

SEQ ID NO: 928 - DNA, 695 bp, Homo sapiens
aaaaactgcgggaagcaggaaagagcacaacaggtttctctctatttccggtgtattgtatcctcacgtttccggagattgacgttgctcttgtgttctcgcgagaggcgggaaagggcgcagggtttgaaacatggcggacgacgtagaccagcaacaaactaccaacactgtagaggagcccctggatcttatcaggctcagcctagatgagcgaatttatgtgaaaatgagaaatgaccgagagcttcgaggcagattacatgcttatgatcaacatttaaatatgatcttgggagatgtggaagaaactgtgactactatagaaattgatgaagaaacatatgaagagatatataaatcaacgaaacggaatattccaatgctctttgtccggggagatggcgttgtcctggttgcccctccactgagagttggctgaaacaaagaatttgtcctgtatggaaaacgggagactttgtacagtggcctctctaaaagtacaaaacattcataagagaaacctgcatacattttgatattaagaaataattccggggattcttccactcctgaaatgagttgatttgcagataactcacaacttcttaagctaaatggtattttcatttttctcaagctctccaataaatatgaccaccaagatgcagaactctttcaggacttcttttgct

SEQ ID NO: 929 - DNA, 2713 bp, Homo sapiens
gaagctgcagttctgccatcactcaagatggctgcccccatcaagatgaccggggtgtgccggggggaaaggggcagcatgatggtctgagatggtgtagcgtcggaccatgtggaagtttctgaggctggggagccggataatggggggtggggcccgttggggggtaaaggggcaatagcgtcctttcacaggctaacctcggctcttcccagtcctctggactaaaatggggaacacattgggcctggcaccaatggggactttgccccgccggagcccccgccgagaggaacccctgcccaaccctgggagcttcgatgagctgcaccgtctatgcaaagatgtattcccagcacagatggagggagtgaagctcgttgtcaacaaggttctgagcagccatttccaggtggcgcacactatacacatgagtgccctgggcttgccgggatatcacctccatgcggcctatgcaggggattggcagctcagtcccactgaggtgttccccactgtggtaggggatatggacagcagtggcagcctgaacgcccaggtcttgctcctcttggcagagcggctccgagctaaggctgtcttccagacgcagcaggccaagttcctgacatggcagtttgatggcgagtatcggggagatgactacacagccactctgaccctaggaaatcctgacctgattggggagtcggtgatcatggttgctcacttcctgcagagcctcactcatcggctggtgctgggaggagagctagtttatcaccggcggccaggcgaagagggggccatcttgacactggctgggaagtactcggctgtacactgggtagctacattgaatgtgggatcaggcggggcccatgcaagttactaccacagggcaaatgaacaggttcaggttggagtggagtttgaggcaaacacaaggctacaagacacaacattctcctttggttaccacctgactctgccccaggccaacatggtatttagaggcttggtggatagtaactggtgtgtaggtgctgtgctggagaagaagatgccccctctgcctgtcaccctagcccttggagccttcctcaatcactggcgcaacagattccattgtggcttcagcatcactgtgggctgaggttgtccagagccagcccccacagcagctggaacctctgagtcaggtgccctagggccaaagactaggcccctcttcagagcccaccttgctgggtgatctctaggacccaggagcagagtggtggacaggaccatgccctcctcagaactggagctgccacaggggcagttgatgaggcagaggtttgaggatcccccctctgctaccagccccagtatcaccttccccatgctcttgtggctgtggactaagggagaaggattaaggggtatggctgaattcccccggcaccccttgccctcaggcttccttcttcctttccctttggttaatcctgcatgggattagctgaccatcctgttttccatcccagagcctcccaaggctgggaaagtagggctgaagggctagatgtttggtctcaggaagtggggcccacccattcccagaaggagcttctttacctcttagccctgaggtttcctccttcccatcttctgtgcttccagagaacaactttgttcctatggtcacccccactatccccatgaccgcatgaagaggcagttattgctttagtctttcattgcaaccactgggctccctttgaacccggcccaatctttggtcccagcattttcccactccagtgtatccagggtgttccaggtgagctggggaaggaagtgagcatggcctcagctgcagatctcctggagcagcggcatcatggcagacaggccctggatgtgctggatttggtacccgtaggcctcattaatgctccggagctcagccagcaggcctagcaacttcgcatacagaaacctttggaggaagtagtggggttgccaggaaaacaggagggaaataaggcagttgggagtcttgtctctaggccctgatcccctgaactattcctcagtgaagccaggtctgaacattagagaaaatcatgctctggtatgacagactatcagaggttccaaaggtcctccagggggcctcggtctgacactgtcttctctcaccatgctcagttttttctgaacccagagctctgagagccgagtgtgaagaaagctccagacttggccagaactccaaccatgtggaatctgagggcctggccttctagagcaggttctagaaggtggatgtgttctatggtataaagcatcccctttctggccaaactagctcttggaggaacgagcaaaacagaagcggtgcatacctcagagcctggataaatcacagactattgaacctggaactggctttgaccatgaaactgtgaatggccctaacttcaagggaaatgagaaatcgaaggaattggcccaatggcgaggagaggaaaggccaagggaagagaaaagtctgcgttagtctggagaagttggactagtgaggtaatggatgtcatcaatctcaggaatgctattacccagagcctctgagctactactttgcatctgtactgaataaaaaaaaaatctggaaaaagtgagatgaaaaaaaaaaaaaaaaaaaaaaaaaaaaaaaaaaaaa

SEQ ID NO: 930 - DNA, 2598 bp, Homo sapiens
gccgggccgaggccgcggcggaggccgcggctggtactgggagggtggcagggagggacggggaaggaagatggcgacgtcgggggcgaacgggcctggttcggccacggcctcggcttccaatccgcgcaaatttagtgagaagattgcgctgcagaagcagcgtcaggccgaggagacggcggccttcgaggaggtgatgatggacatcggctccacccggttacaggcccaaaaactgcgactggcatacacaaggagctctcattatggtgggtctctgcccaatgttaaccagattggctctggcctggccgagttccagagccccctccactcacctttggattcatctcggagcactcggcaccatgggctggtggaacgggtgcagcgagatcctcgaagaatggtgtccccacttcgccgatacacccgccacattgacagctctccctatagtcctgcctacttatctcctcccccagagtctagctggcgaaggacgatggcctggggcaatttccctgcagagaaggggcagttgtttcgactaccatctgcacttaacaggacaagctctgactctgcccttcatacaagtgtgatgaaccccagtccccaggatacctacccaggccccacacctcccagcatcctgcccagccgacgtgggggtattctggatggtgaaatggaccccaaagtacctgctattgaggagaacttgctagatgacaagcatttgctgaagccatgggatgctaagaagctatcctcatcctcttcccgacctcggtcctgtgaagtccctggaattaacatctttccatctcctgaccagcctgccaatgtgcctgtcctcccacctgccatgaacacggggggctccctacctgacctcaccaacctgcactttcccccaccactgcccacccccctggaccctgaagagacagcctaccctagcctgagtgggggcaacagtacctccaatttgacccacaccatgactcacctgggcatcagcaggggcatgggcctgggcccaggctatgatgcaccaggacttcattcacctctcagccacccatccctgcagtcctccctaagcaatcccaacctccaggcttccctgagcagtcctcagccccagcttcagggctcccacagccacccctctctgcctgcctcctccttggcccgccatgtactgcccaccacctccctgggccacccctcactcagtgctccggctctttcctcctcctcttcctcctcctccacttcatctcctgttttgggcgccccctcttaccctgcttctacccctggggcctccccccaccaccgccgtgtgcccctcagccccctgagtttgctcgcgggcccagccgacgccagaaggtcccaacagcagctgcccaaacagttttcgccaacaatgtcacccaccttgtcttccatcactcagggcgtccccctggataccagtaaactgtccactgaccagcggttacccccatacccatacagctccccaagtctggttctgcctacccagccccacaccccaaagtctctacagcagccagggctgccctctcagtcttgttcagtgcagtcctcaggtgggcagcccccaggcaggcagtctcattatgggacaccgtacccacctgggcccagtgggcatgggcaacagtcttaccaccggccaatgagtgacttcaacctggggaatctggagcagttcagcatggagagcccatcagccagcctggtgctggatccccctggcttttctgaagggcctggatttttagggggtgaggggccaatgggtggcccccaggatccccacaccttcaaccaccagaacttgacccactgttcccgccatggctcagggcctaacatcatcctcacaggggactcctctccaggtttctctaaggagattgcagcagccctggccggagtgcctggctttgaggtgtcagcagctggattggagctagggcttgggctagaagatgagctgcgcatggagccactgggcctggaagggctaaacatgctgagtgacccctgtgccctgctgcctgatcctgctgtggaggagtcattccgcagtgaccggctccaatgagggcacctcatcaccatccctcttcttggccccatcccccaccaccattcctttcctcccttccccctggcaggtagagactctactctctgtccccagatcctctttctagcatgaatgaaggatgccaagaatgagaaaaagcaaggggtttgtccaggtggcccctgaattctgcgcaagggatgggcctgggggaactcaagggagggcctaaagcacttgtaactttgaaccgtctgtctggaggtcagagcctgttggaaagcaggggtagaggggagccctggaagcagggcttttccggatgcctaggggtgggcagtgccagcccctcctcaccactcttccccttgcagtggaggagagagccagagtggatactattttttattaaatatattattatatgttaataaaaaaatcatatcaaaaaaaaaaaaaaa

SEQ ID NO: 931 - DNA, 2771 bp, Homo sapiens
gtccagctgcgcctggaaagcgagctcggacccctctgccatgaaccagtccatcccagtggctcccaccccaccccgccgcgtgcggctgaagccctggctggtggcccaggtgaacagctgccagtacccagggcttcaatgggtcaacggggaaaagaaattattctgcatcccctggaggcatgccacaaggcatggtcccagccaggacggagataacaccatcttcaaggcctgggccaaggagacagggaaatacaccgaaggcgtggatgaagccgatccggccaagtggaaggccaacctgcgctgtgcccttaacaagagccgggacttccgcctcatctacgacgggccccgggacatgccacctcagccctacaagatctacgaggtctgctccaatggccctgctcccacagactcccagccccctgaggattactcttttggtgcaggagaggaggaggaagaagaggaagagctgcagaggatgttgccaagcctgagcctcacagaggatgtcaagtggccgcccactctgcagccgcccactctgcggccgcctactctgcagccgcccactctgcagccgcccgtggtgctgggtccccctgctccagaccccagccccctggctcctccccctggcaaccctgctggcttcagggagcttctctctgaggtcctggagcctgggcccctgcctgccagcctgccccctgcaggcgaacagctcctgccagacctgctgatcagcccccacatgctgcctctgaccgacctggagatcaagtttcagtaccgggggcggccaccccgggccctcaccatcagcaacccccatggctgccggctcttctacagccagctggaggccacccaggagcaggtggaactcttcggccccataagcctggagcaagtgcgcttccccagccctgaggacatccccagtgacaagcagcgcttctacacgaaccagctgctggatgtcctggaccgcgggctcatcctccagctacagggccaggacctttatgccatccgcctgtgtcagtgcaaggtgttctggagcgggccttgtgcctcagcccatgactcatgccccaaccccatccagcgggaggtcaagaccaagcttttcagcctggagcattttctcaatgagctcatcctgttccaaaagggccagaccaacaccccaccacccttcgagatcttcttctgctttggggaagaatggcctgaccgcaaaccccgagagaagaagctcattactgtacaggtggtgcctgtagcagctcgactgctgctggagatgttctcaggggagctatcttggtcagctgatagtatccggctacagatctcaaacccagacctcaaagaccgcatggtggagcaattcaaggagctccatcacatctggcagtcccagcagcggttgcagcctgtggcccaggcccctcctggagcaggccttggtgttggccaggggccctggcctatgcacccagctggcatgcaataacaaggctgcagacggtgactggccctggcttcctgggtggcggtgcggactgatgtggagatgtgacagccccgatgagcacctggctggctgcagggtcctacctctgggtttcctggaagtggatttgggccaagaaggagagggagaaaggcccgagcccctgccttcccgggcctttctctcctgggctgtctctggtctggtcagcctggctctcgggaaattcagccatgagcagggaaagaactctcccaaccctggggcctagctgtataggaggaattgcctaagggtggcccactcttgtgattgccccatttcctctggcaacaaaagccagagtgttgtgggccaagtccccccacagggcctctgcagggcatggccctgatttccctggtttgagactcacttcctcatctccctgtcctctgagataatatgagtgagcacttaggtatcatatcagatgctcaaggctggcagctacccccttcttgagagtccaagaacctggagcagaaataatttttatgtatttttggattaatgaatgttaaaaacagactcagctgtttctttccttttactactaccagttgctcccatgctgctccaccaggccctgtttcggatgccaactggcccactccccaagcacttgcccccagcttgcgaccattggcactgggagggcctggcttctgggctgatgggtcagttgggccttcataaacactcacctggctggctttgccttccaggaggaagctggctgaagcaagggtgtggaattttaaatgtgtgcacagtctggaaaactgtcagaatcagttttcccataaaagggtgggctagcattgcagctgcatttgggaccattcaaatctgtcactctcttgtgtatattcctgtgctattaaatatatcagggcagtgcatgtaaatcatcctgatatatttaatatatttattatattgtcccccgaggtggggacagtgagtgagttctcttagtccccccagagctggttgttaaagagcctggcacctacccgctctcacttcatctgtgtcatctctgcacactccagcccactttctgccttcagccattgagtggaagctgccccaggcccttaccaggtgcagatgcccaatcttgatgcccagccatcagaactgtgagccaaataaacctttttctgtataaaaaaaaaaaaaaaaaaaa

SEQ ID NO: 932 - DNA, 1587 bp, Homo sapiens
ggcggtgccggccgaacccagacccgaggttttagaagcagagtcaggcgaagctgggccagaaccgcgacctccgcaaccttgagcggcatccgtggagtgcgcctgcgcagctacgaccgcagcaggaaagcgccgccggccaggcccagctgtggccggacagggactggaagagaggacgcggtcgagtaggttttaaaacatgaatcctacactcatccttgctgccttttgcctgggaattgcctcagctactctaacatttgatcacagtttagaggcacagtggaccaagtggaaggcgatgcacaacagattatacggcatgaatgaagaaggatggaggagagcagtgtgggagaagaacatgaagatgattgaactgcacaatcaggaatacagggaagggaaacacagcttcacaatggccatgaacgcctttggagacatgaccagtgaagaattcaggcaggtgatgaatggctttcaaaaccgtaagcccaggaaggggaaagtgttccaggaacctctgttttatgaggcccccagatctgtggattggagagagaaaggctacgtgactcctgtgaagaatcagggtcagtgtggttcttgttgggcttttagtgctactggtgctcttgaaggacagatgttccggaaaactgggaggcttatctcactgagtgagcagaatctggtagactgctctgggcctcaaggcaatgaaggctgcaatggtggcctaatggattatgctttccagtatgttcaggataatggaggcctggactctgaggaatcctatccatatgaggcaacagaagaatcctgtaagtacaatcccaagtattctgttgctaatgacaccggctttgtggacatccctaagcaggagaaggccctgatgaaggcagttgcaactgtggggcccatttctgttgctattgatgcaggtcatgagtccttcctgttctataaagaaggcatttattttgagccagactgtagcagtgaagacatggatcatggtgtgctggtggttggctacggatttgaaagcacagaatcagataacaataaatattggctggtgaagaacagctggggtgaagaatggggcatgggtggctacgtaaagatggccaaagaccggagaaaccattgtggaattgcctcagcagccagctaccccactgtgtgagctggtggacggtgatgaggaaggacttgactggggatggcgcatgcatgggaggaattcatcttcagtctaccagcccccgctgtgtcggatacacactcgaatcattgaagatccgagtgtgatttgaattctgtgatattttcacactggtaaatgttacctctattttaattactgctataaataggtttatattattgattcacttactgactttgcattttcgtttttaaaaggatgtataaatttttacctgtttaaataaaatttaatttcaaatgtagtggtggggcttctttctatttttgatgcactgaatttttgtgtaataaagaacataattgggctctaagccataaaaaaaaaaaaaaaaaaaa

SEQ ID NO: 933 - DNA, 3346 bp, Homo sapiens
gcggccgcgcacgcgcggcggggggcgtggggctgggcccagccggacgcgacctcagcctgcggcggctaactgccggtaggcgtctgtgtgcgccgccaagtcggtggggcggggacgcgaggtgtggatggggggtcgccttgacctctgcctcagccagtagcgcagtctcggcctcgccgttacggagatggtgccctgggtgcggacgatggggcagaagctgaagcagcggctgcgactggacgtgggacgcgagatctgccgccagtacccgctgttctgcttcctgctgctctgtctcagcgccgcctccctgcttcttaacaggtatattcatattttaatgatcttctggtcatttgttgctggagttgtcacattctactgctcactaggacctgattctctcttaccaaatatattcttcacaataaaatacaaacccaagcagttaggacttcaggaattatttcctcaaggtcatagctgtgctgtttgtggtaaagtgaaatgtaaacgacataggccttctttgctacttgaaaactaccagccatggctagacctgaaaatttcttccaaggttgatgcatctctctcagaggtggatattccatctattataaccaagaaactattaaaagcagcaatgaagcatatagaagtgatagttaaagccagacagaaagtaaaaaatacagagtttttacagcaagctgctttagaagaatatggtccagagcttcatgttgctttgagaagtcgaagagatgaattgcactatttaaggaaacttactgaactgctttttccttatattttgcctcctaaagcaacagactgcagatctctgaccttacttataagagagattctgtctggctctgtgttccttccttctttggatttcctagctgatccagatactgtgaatcatttgcttatcatcttcatagatgacagtccacctgaaaaagcaactgaaccggcttctcctttggttccattcttgcagaaatttgcagaacctagaaataaaaagccatctgtgctgaagttagaattgaagcaaatcagagagcaacaagatcttttatttcgttttatgaactttctgaaacaagaaggcgcagtgcacgtgttgcagttttgtttgactgtggaggaatttaatgatagaattttacgaccagaattatcaaatgatgaaatgctgtctcttcatgaagaattgcagaagatttataaaacatactgtttggatgaaagtattgacaaaattagatttgatcccttcattgtagaagagattcaaagaattgctgaaggcccatacatagatgttgtgaaacttcaaactatgagatgtctttttgaagcatatgaacatgttctttcccttttggagaatgtatttactcctatgttctgccatagtgatgagtatttcagacaacttttaagaggtgcagaatcaccaacacgcaattcaaaattgaacaggaacacacagaaaaggggagaatcatttggaatcagcagaataggtagcaaaattaaaggagtattcaaaagtaccacaatggagggagctatgttgcctaattatggtgtagctgaaggtgaagatgattttattgaagaaggtattgttgtaatggaagatgattctccagtggaggctgtgagcacacctaatactccccgaaaccttgctgcatggaaaattagcattccatatgtagacttttttgaggatccctcctctgaaaggaaggagaaaaaagaaagaattcctgtgttttgtattgatgttgaaagaaatgatagaagagcagttggacacgagcctgaacattggtctgtctatagaagatatcttgaattctatgtacttgaatcaaaactaacagaatttcatggtgcatttcctgatgcccagcttccttctaagaggatcattggccccaaaaattatgaattcttaaagtcaaagagggaagagttccaagaatatctacagaaacttctgcagcatccagaactgagtaatagtcaacttctggcagactttctttcccctaatggtggggaaacacaatttcttgataagatactaccagatgtaaatcttgggaaaattataaaatctgttcctggaaaactaatgaaagagaaaggtcagcatttggaaccttttatcatgaatttcattaattcttgtgagtctccaaagcctaaaccaagtagaccagaactgaccattctcagccctacttcagaaaacaacaagaagcttttcaatgatctgtttaaaaataatgcaaaccgtgctgaaaatacagagagaaagcaaaatcagaattattttatggaggtgatgactgtagaaggagtctatgattacctgatgtatgtaggacgggtagttttccaggttcctgactggcttcatcatctcttaatgggaactcgaatcctctttaaaaacaccctggaaatgtatactgattactatcttcagtgtaaactagaacagctatttcaggagcaccgtttggtctcactcataacacttctcagagatgctatattctgtgaaaacactgaacctcgctctctccaagataagcaaaaaggagcaaaacagacttttgaagaaatgatgaattacattccagatctgttagtcaagtgtattggtgaagaaaccaagtatgaaagcatcagacttctgtttgatggcttacagcaaccagtactcaacaagcagctgacttatgttttattggacattgtgatacaggaactgtttccagagctcaataaggtacaaaaggaagttacctctgtgacatcttggatgtaaacacttggatttggtatagaataacccattgaaatttctgctgtgcgagggtggtagaaatttacttttttgggtatattcttatatatattatgtacatcgctgtctgaaattttagttattttttgtttttaataaagactaacacaaacttaatgattaaaagtgattgagtctcatagtctttcatttgctagctgtgatccaaattttattagaacataagtcacttgttattgccatttttaaaagagaaaattcataatgatgttatggcaaacagataagactgataaacttcgtattgtatagctttgaaaataattatgcctagtatggagaaacaggaataagatctgattttcttagagttaatatattttagtagattggttttccttttttttattttgtacatagttaactgtgtatctataaataaagcatcctatatgagtttttaataataaa

SEQ ID NO: 934 - DNA, 2354 bp, Homo sapiens
cgccccgcccgcgcctccccgcccccccgcgcccgcggccccaagcggttcccgagcccaggcccgcgccgagcccaggtcctagagcagctccagcaggatggcggctccagcgtctctaaggcctgcagggggtccagccccatggggggcgccctaggcctccgacagctccccatctgtgctcctgcctgccggccatcctcaggccactcgccatgggcggctgcttctccaaacccaaaccagtggagctcaagatcgaggtggtgctgcctgagaaggagcgaggcaaggaggagctgtcggccagtgggaagggcagcccccgggcctaccagggcaatggcacggcccgccacttccacacggaggagcgcctgtccacccctcacccctaccccagccctcaggattgcgtggaggctgctgtctgccacgtcaaggacctcgagaatggccagatgcgggaagtggagctgggctgggggaaggtgttgctggtgaaggacaatggggagttccacgccctgggccataagtgtccgcactacggcgcacccctggtgaaaggcgttctgtcccgtggtcgggtgcgctgcccctggcacggcgcctgcttcaacatcagcactggggacctggaggacttccctggcctggacagtctacacaagttccaggtgaagattgagaaggagaaggtgtacgtccgggccagcaagcaggccctacagctgcagcgaaggaccaaggtgatggccaagtgtatctctccaagtgctgggtacagcagtagcaccaatgtgctcattgtgggtgcaggtgcagctggcctggtgtgtgcagagacactgcggcaggagggcttctccgaccggatcgtcctgtgcacgctagaccggcaccttccctacgaccgtcccaagctcagcaagtccctggacacacagcctgagcagctggccctgaggcccaaggagtttttccgagcctatggcatcgaggtgctcaccgaggctcaggtggtcacagtggacgtgagaactaagaaggtcgtgttcaaggatggcttcaagctggagtacagcaagctgctgctggcaccagggagcagccccaagactctgagctgcaaaggcaaagaagtggagaacgtgttcactatccggacgccagaggatgccaatcgcgtggtgaggctggcccgaggccgcaacgtggtcgtcgtgggagccggcttcctggggatggaggtggccgcttacctgacggagaaggcccactctgtgtctgtggtggagctggaggagacgcccttcaggaggttcctgggggagcgcgtgggtcgtgccctcatgaagatgtttgagaacaaccgggtgaagttctacatgcagacggaggtgtctgagctgcggggccaggagggaaagctgaaggaggttgtgctgaagagcagcaaggtcgtgcgggctgacgtctgcgtggtgggcattggtgcagtgcccgccacaggcttcctgaggcaaagcggcatcggtttggattcccgaggcttcatccctgtcaacaagatgatgcagaccaatgtcccaggcgtgtttgcagctggcgatgctgtcaccttcccccttgcctggaggaacaaccgcaaagtgaacattccacattggcagatggctcatgctcaggggcgcgtggcagcccagaacatgttggcgcaggaggcggagatgagcactgtgccctacctctggaccgccatgtttggcaagagcctgcgctacgcgggctacggagaaggcttcgacgacgtcatcatccagggggatctggaggagctgaagtttgtggctttttacactaaaggcgacgaggtgatcgccgtggccagcatgaactacgatcccattgtgtccaaggtcgctgaggtgctggcctcaggccgtgccatccggaagcgggaggtggagactggcgacatgtcctggcttacggggaaaggatcctgagctcacatgcagtagacttgggcaggcaaagggggcaccaagggcacaggccaagccttgggggcaggtgccaatctccagtcccaggatcccccagggcagaacctgagccctcccagtgcttgccttcagccacctggctcccctcctgggaggcctctgctggatccagaagatgctcaaccctcaaggcctctgctgccactgacagctggcactggaggcaggacaagccctgcctcttctccctctattgggactggtcccctgaagaaccctgcaacatgttagacattaccgtaaaattaaaacgcacaaatttgcagatcaaaaaaaaaa

SEQ ID NO: 935 - DNA, 2924 bp, Homo sapiens
ggaagtggcctcagagcccctcagcaacatgcccgcagagaattcttccggaggcggtcacagacatctccgtgacgcagaacgagttagagcgtcccttggggtttccatggtgctgcccttagcctgcagtatctccacttcctctcccgcctgagcgccgggaacggaaaagcaggcggccggtcccagctgcgacgtagacgccgcgtgggggtggggttgggcgagtaggtgacgctctaggcgagctcgttggcctctctatggtgccgagcgcgcccgttcggacgttgcccctttaatcggcagagggcggtgcccaggaggtcccgcgagagctgcggggggcgggggggcggtgccgaggctgggggccggtggcggatggagcccgcgatggagccggagactctggaggcgcgaatcaatagagccacgaaccccctgaacaaggagctcgactgggccagcatcaacggcttctgcgagcagctcaacgaggactttgaggggcctccactcgccacccggctgctggcccacaagatccagtccccacaggagtgggaggcgatccaggccttgacggtgctggaaacatgcatgaagagctgcggcaagcggttccacgacgaagtgggcaagttccgctttctcaacgagctcatcaaggtcgtgtctcccaagtatctgggctctcggacatcggagaaggtgaagaacaagatcttggagctcctctacagctggacagtgggcctgcccgaggaggtgaaaatcgcagaggcctaccagatgctaaagaagcaggggattgtaaagtccgaccccaagcttccagatgacactacctttccccttcctcctccacggccgaagaatgtgatctttgaagatgaggagaaatccaagatgctggcccgcctgctgaagagctcccatcccgaagacctccgcgcagccaataagctcatcaaagagatggtgcaggaggaccagaagcggatggagaagatctcgaagagggtgaatgccatcgaggaggtgaacaacaatgtgaaactgctcacggagatggtgatgagccacagccagggcggcgcagcagctggcagcagcgaggacctcatgaaggaactgtaccagcgctgtgagcggatgcggcccacgctcttccgactggcgagtgacacagaggacaatgatgaggccttaggcctcagtgaccccacacccccttcaggcccaagcctggatggtaccggatggaacagcttccagtcgtcggatgccactgagcccccagcccctgctctggcccaggcccccagtatggaaagccgacccccagcgcagacatccctgccagcaagcagcggtctggacgacctagacctcctggggaagaccctcctgcagcagtcgctgcccccggaatcccagcaagtgcggtgggagaagcagcagccaaccccccggctcacactccgggacctgcagaataagagcagcagctgcagctcccccagctccagcgccaccagccttctccacaccgtgtccccagagccccccaggcctccgcagcagcccgtaccaaccgagctctcactggccagcatcactgtgcccctggagtccatcaaacccagcaacatcctgcccgtgactgtgtatgaccagcacggcttccgcatcctcttccattttgcccgggacccactgccagggcgctccgacgtgctggtggtggtggtttccatgctgagcaccgccccccagcccatccgcaacatcgtgttccagtcagctgtccccaaggttatgaaggtgaagctgcagccaccctcgggcacggagctgccagcttttaaccccatcgtccacccctcagcaatcacccaggtcctgctgcttgccaacccccagaaggagaaggttcgcctccgctacaagctcaccttcaccatgggtgaccagacctacaacgagatgggggatgtggaccagttccccccacctgaaacctggggtagcctctagaacagaggggctggggagaggaaggggcagagggaccggtcactgtccagcctggagggaggcattggtggccaaggacaccctttgttgcccatggccattcacccccaggcctggtgcttctccccacacccctgtaggcctcaagtgactcttccccctcctgctccggccccgcccctgctgagccaaacccagtaggaggctgggcctgggtttgtgccgctggggtctccatcaccgggacctggagagggaggggctgtgtagccttggaagaacttgggtcatggggaggaagcacagctgttggggaagggccaggacctcaggcccagccccaaccccagctggggtggggtcttccccacctgtctcttatgccttatgggaaggcccagccataactcgggggccatgctggagctggggaccagcttaggcctcctccataggaacccagtgactggggggtgacgcctacacccccagctatttgcactctggtgtgtggtttgactctgcttttcttccggattggccctgtggtcacagcctcagggggccaggctgggggaacctcacctggcccgtactcctgggggtttccctttgccattgggccccctgagggactgtgggggctcaagggtaatgccagaggcccatggccccagcgaggggctgtggggcacctagagttctcggtgtgtctccttcattcattggcctctgctggggcctcctatgggtgtcttacgtctgtccatccatctgtccgtggtcagaagtggggtcagtgtgtgagtgagagcaggagtatttatgaaaataaaacgtcgtttttcctggaaaaaaaaaaaaaaaaaaaaaaaaaa

SEQ ID NO: 936 - DNA, 3767 bp, Homo sapiens
cccccgccgctcgtccccgccgcggccgcgccgcctgcagcagcaccagctgctcctccccggcggccgccccccgcgggtccctccctggctgcgggagagacggaggtagagggaggacacagagccgcgccgcccgcaccacagaccttcgcctcgccccgccggttcctcaccctcggggagcaacatggcagataatctcagtgataccttgaagaagctgaagataacagctgttgacaagactgaggatagtttagaaggatgcttggattgtctgcttcaagccctggctcaaaataatacggaaacaagtgaaaaaatccaagcaagtggaatacttcagctgtttgcaagtctgttgactccacagtcttcctgcaaagccaaagtagctaacatcatagcagaagtagccaaaaatgagtttatgcgaattccatgtgtggatgctggattgatttcaccactggtgcagctgctaaatagcaaagaccaggaagtgctgcttcaaacgggcagggctctaggaaacatatgttacgatagccatgagggcagaagtgcagttgaccaagcaggtggtgcacagattgtaattgaccatttaaggtcactgtgcagtataacagatcccgccaatgagaagctcttgactgtcttttgtggcatgctgatgaactatagcaatgagaatgattcgcttcaagctcagcttatcaatatgggtgttattcctaccttagtgaaattactgggcatccactgccaaaatgcagctcttacagaaatgtgtcttgttgcatttggtaatttagcagaacttgagtcaagtaaagaacagtttgccagtacaaacattgctgaagagctagtaaaactcttcaagaaacaaatagaacatgataagagagaaatgatttttgaagttcttgctccattggcagaaaatgatgctattaaactacagctggttgaagcaggcctagtagagtgtctactagagattgttcagcaaaaagtggatagtgacaaagaagatgatattactgagctcaaaactggttcagatctcatggttttattacttcttggagatgaatccatgcagaagttatttgaaggaggaaaaggtagtgtatttcaaagggtactctcttggatcccatcaaataaccaccagctacagcttgctggagcattggcaattgcaaattttgccagaaatgatgcaaattgtattcatatggtagacaatgggattgtagaaaaacttatggatttactggacagacatgtagaagatggaaatgtaacagtacagcatgcagcactaagtgccctcagaaacctggccattccagttataaataaagcaaagatgttatcagctggggtcacagaggcagttttgaaatttcttaaatctgaaatgcctcctgttcagttcaaacttctgggaacattaagaatgttaatagatgcacaagaagctgctgaacaattgggaaagaatgttaagttagtggagcgtttggtggaatggtgtgaagccaaagatcatgctggtgtgatgggggagtcaaacagactgctgtctgcccttatacgacacagtaaatcaaaagatgtaattaaaaccattgtgcagagtggtggcatcaagcatctagttaccatggcaactagtgaacatgtaataatgcagaatgaagctcttgttgctttggcattaatagcagctttagaattgggcactgctgagaaagatctagaaagtgctaaacttgtacagattttacatagactgctagcagatgagagaagtgctcctgaaatcaaatataattccatggtcctgatatgtgctcttatgggatctgaatgtctacacaaggaagtacaggatttggcttttctagatgtcgtatccaaacttcgcagtcatgagaacaaaagtgttgcccagcaggcctctctcacagagcagagacttactgtggaaagctgagaactgcccgatacacggcatcatcccatctctaatttcccctctgtcctccatccagcggcttcttccgcttcattctctaccataccacttgtgcatgcatgtgatgttctaataccaattgaagaaccgctgtaggtacctccctaataagatttctaaacctatagttagtgtgatcatgactttgtcaaaggcaagtctccacccataaccgttctcttgtattcctgttgcttgagctacattaagtagaatgtgcatgttgtagtcctatgatgatgtaaacttggtactacataatgacttgctccacacatgcagtaaactacataatgatgtactggtaaactagaaacaaagaatgcagcaggatctgtctagcttattaaagatgaaactgaattggaaaaatagctccattttttggtgcttgggaagcacagtgaccaaaaaagttgtatggctgcttattcattagtctttcctactgatgtcaaatccatggtacctagagttaaataaaattccaatgctcttactctttaacttctggtttctcctttttcctttttagactattgaaactgccacaaacttggcaagactttctgaggtttctgattccatatttaattgactattatcaatagcctgatattgaaaaacatttgtagttttcagtgtgaaactaaggggttgaagaatcactattacaatccctattacagagcatttcgggttttgcttgtattttagattctgatacatacgctgtttcactcaggaactacttctaccagttaatcagcattatccagcacttgtctttaaaattcatttggcgcttgtttgttttcaactgaggaaattgagtatagttcattgaagaatggaatttttttttttttttttttttttgctgtttttcatcattcagctagaaagtgagaagttttatcttccatagtccttttaaatcttatgttagaactagcaggacgtaggtggaaagatgaagaaataagcttgtctagactaaagaaaggaaagcaggttataaaagccatagtagccagtccagttcattctgcagatggccccataccaatcgctgttagagtttgccacctccactttcccactgagaactgcagcaattttaaaggatatgagaaagccaagactcaagagatgagaagacccccttggcgaaatatagtgtactcttcactgccactgccaccaccaaatgggtttttagagctttgaaacacaatctttgtaaattaatcaaaacctccctgtgacccacctgccttctccccatacccaaatttgaccactactggcctaaaaggcaagatgggcttcgatatagaaggactgcaagacagtagaaagggctgccacggaggtgacagtagctccttcctctccaacatgtgatgctacacatctctgtggataatctaagttggacttttgactctaaaacagctataatccaagaaagttaaattctaatggaggtaaagaatcttgactgattgttccctttgatgtccaaataagggaactattgtgagtacgtatgctacacttactataagaatgatactgtttgttgtctttctcctgggctggatagtggactatattttattacaggctttgaaagacatctgtaatgttgcatatctgttcatattaataacttaataaatagtatatgaagctataaaaaaaaaaa

SEQ ID NO: 937 - DNA, 1511 bp, Homo sapiens
gggctggcggaagaggcacgtgcgctgctgaatggagctggtcgctggttgctacgagcaggtcctctttgggttcgctgtacacccggagcccgaggcttgcggcgaccacgagcaatggactcttgtggctgacttcactcaccatgctcacactgcctccttgtcagcagtagctgtaaatagtcgttttgtggtcactgggagcaaagatgaaacaattcacatttatgacatgaaaaagaagattgagcatggggctctagtgcatcacagtggtacaataacttgcctgaaattctatggcaacaggcatttaatcagtggagcggaagatggactcatctgtatctgggatgcaaagaaatgggaatgcctgaagtcaattaaagctcacaaaggacaggtgaccttcctttctattcacccatctggcaagttggccctgtcggttggtacagataaaactttaagaacgtggaatcttgtagaaggaagatcagcattcataaaaaatataaaacaaaatgctcacatagtagaatggtccccaagaggagagcagtatgtagttatcatacagaataaaatagacatctatcagcttgacactgcatccattagtggcaccatcacaaatgaaaagagaatttcctctgttaaatttctttcagagtctgtccttgcagtggctggagatgaagaagttataaggttttttgactgtgattcactagtgtgcctctgcgaatttaaagctcatgaaaacagggtaaaggacatgttcagttttgaaattccagagcatcatgttattgtttcagcatcgagtgatggtttcatcaaaatgtggaagcttaagcaggataagaaagttcccccatctttactctgtgaaataaacactaatgccaggctgacgtgtcttggagtgtggctagacaaagtggcagacatgaaagaaagccttcctccagctgcagagccttctcctgtaagtaaagaacagtccaaaattggcaaaaaggagcctggtgacacagtgcacaaagaagaaaagcggtcaaaacctaacacaaagaaacgcggtttaacaggtgacagtaagaaagcaacaaaagaaagtggcctgatatcaaccaagaagaggaaaatggtagaaatgttggaaaagaagaggaaaaagaagaaaataaaaacaatgcagtgaatcacagatgtctcctgaaagaactcttttagatgaaatcattctactcaaatgtaccttaattttttttttttccctgagtaaaagcaagaaatttcttcctttggaaaaaatatatatattaaaaaaccacttttagatggttttttttaaaaaaaaaaaaaaaactggtaaaattacttttggcagacagtgttttatgaattatgtatcatgttgatatataatatgttaatgtgtcatgtaatttttactttgtacaaagcaaataaagatctttctcaaaaaaaaaaaaaaaaaa

SEQ ID NO: 938 - DNA, 1888 bp, Homo sapiens
ctacgatgacgtcagcgcggcgcagtagcggctgtgactagcgggccggcccgggccaggacagcgggcggcgggcggcgcgggcctggccccgggatggctatgttccgcagcctggtggcctcggctcagcagcggcagccgccggccgggccggcgggcggcgacagcggcctggaggcgcagtacacctgccccatctgcctggaggtctatcaccggcccgtggccatcggcagctgcggccacacgttctgcggggagtgtctccagccctgcctgcaggtgccatccccgctgtgcccactctgccgcctgcccttcgaccccaagaaggtggacaaggccacccacgtggagaagcagctctcatcctacaaagcgccctgtcgaggctgcaacaaaaaggtgaccctggcaaagatgagagtgcacatttcgtcctgcctgaaggtccaggagcagatggccaactgccccaagttcgtccccgtggtgcccacatcacagcctatccccagcaacatccccaacaggtccaccttcgcctgcccgtactgtggtgcccgcaacctggaccagcaggagctggtgaagcactgtgtggaaagccaccgcagcgaccccaaccgcgtggtgtgccccatctgctcggcaatgccctggggggaccccagctacaagagcgccaacttcctgcagcacctgcttcaccgacacaagttctcctacgacacctttgtggactacagtattgacgaggaggccgccttccaggctgctctggccctgtctctctctgagaactgaagggaagcgcagccacccgcctgcgtctggggtcagggatgtccccgctcctgtgtcgcacctggcacctgctcgggagcgcacctcaccggactgagctcacaggaggagcctgcacccgcgcagaaggggagccggggccgagcctccgggcctgaatacgggccagccgccgaggccgccagagcagggccgcctggtcccaccggcgtcgctgggttcttcggtgcttctggccgagcaggcggcctacttgggcagggctggacgctgggacctggagctgccgccgtctcttcaaagccatgataccccctcgtgggaagaagggaccgacgcgcgagtcgcgctccgcagtcgagccgggaggaacccaggctgctgccctgcccagcccgaccctgccccggccccgcttccaccttgcgcatttggtactggcttttgtgatacttaggaaccctggcatcttttctatattatccagtgtgataatcttttcacgttttatagagcaaagacagagcagttactcttcatattgcaatatctgtgtttgactaggaataatagtatttttatggaacatttacaaaattatattttttaagaaaacaatcaaaacaagcattgggggattggggcaaggatggaaggagcagtggggcagctgccagagctcaggcgagccatggggtctgctgtggggtctgccctggccacccactgtgtgtctgggtccttgaggtttgtacgtttctctttgatgaccaggaagaaatcccagcaccccagccacaggctgtggctgctcccagcagaggcggggccggcagagaaggggcctcctccacccagagtcctggccttggcccgctgtcaccttcaaagctgactgtgccccgctgcgggaggggacggcaccccagtggtggcagagcttgggggcctgggcaggggcccgcttggcgggccgggcaacacgtcaacattcttttctgttcttggcattaattattgctgtcttttttttaaaaaaaaaagtttaaataaaatgtctcagagcatctctaaaaaa

SEQ ID NO: 939 - DNA, 769 bp, Homo sapiens
gctggggaggaacccaggctgggggagaagttaaagccagaggaggggcaggaatgtctgaggtggcaacacttctcttcagccagacagcactggccagtttggagtctgtccatcctgcaggccacaagctctggatgaggaacttgaggcaagtcaccagcccctgatcatttcgcctaaaagagcaaggactagagttcctgacctccaggccagtccctgatccctgacctaatgttatcgcggaatgatgatatatgtatctacgggggcctggggctgggcgggctcctgcttctggcagtggtccttctgtccgcctgcctgtgttggctgcatcgaagagtaaagaggctggagaggagctgggcccagggctcctcagagcaggaactccactatgcatctctgcagaggctgccagtgcccagcagtgagggacctgacctcaggggcagagacaagagaggcaccaaggaggatccaagagctgactatgcctgcattgctgagaacaaacccacctgagcaccccagacaccttcctcaacccaggcgggtggacagggtccccctgtggtccagccagtaaaaaccatggtccccccacttctgtgtctcagtcctctcagtccatctcgagcctccgttcaaattgatcatcatcaaaacttatgtggctttttgacctttgaatagggaattttttaaattttttaaaaattaaaataaaaaaaacacatggctcacccttccacccaaaaaa

SEQ ID NO: 940 - DNA, 1743 bp, Homo sapiens
ggcgcggggacgcgggtttctgcctcaggccctgccctgctctactctgcgctctctgcccgcgccgccgccgcctcagcctcggccctgcgctgcgcgcccggcccgtgctgccatggcctgccgcccgcgaagcccgccgaggcatcagagccgctgcgacggtgacgccagcccgccgtcccccgcgcgatggagcctgggacggaagcgcagagccgacggcaggcgctggaggcccgaagacgccgaggaggcagagcaccgcggcgccgagcgcagacccgagagctttaccactcctgaaggccctaaaccccgttccagatgctctgactgggcaagtgcagttgaagaagatgaaatgaggaccagagttaacaaagaaatggcaagatataaaaggaaactcctcatcaatgactttggaagagagagaaaatcatcatcaggaagttctgattcaaaggagtctatgtctactgtgccggctgactttgagacagatgaaagtgtcctaatgaggagacagaagcagatcaactatgggaagaacacaattgcctacgatcgttatattaaagaagtcccaagacaccttcgacaacctggcattcatcccaagacccctaataaatttaagaagtatagtcgacgttcatgggaccagcaaatcaaactctggaaggtggctctgcatttttgggatcctccagcggaagaaggatgtgatttgcaagaaatacaccctgtagaccttgaatctgcagaaagcagctccgagccccagaccagctctcaggatgactttgatgtgtactctggcacacccaccaaggtgagacacatggacagtcaagtggaggatgagtttgatttggaagcttgtttaactgaacccttgagagacttctcagccatgagctaactgccccctggcggccaggaagagaaacagctcctccccgactaggtggaaggctggccaggcaccaagcatgtgtgtgcacttgtacctggtggtttctctgttagcagtccattagctcatgctgaattatttttgccttactttcttaagaaacattaattttatgtatagtgagtatattttgcatgttttaaattgtaaatggagctaagtccaagaaagtacttgaagctctcttccagcgagcttaattgcgtaatccctgttgtcctccagggtaagctgacacgtctacataactggttttccacaggcatcttcagttattgcttgtcaggtggactgttttggatttaaccatgtaatccatgggaccaattgagagtcagctacttttataggcatcaaagtattctcagacacctttaatatctttatggaaacttaatttttggccttttatcaatatgtcataacagcattctgaagtcagacattgttaaattgagctattaaactaatgagttttatgtaagttatatggtcttaatttggtacttgtaaatagcactagttagactctttagaatactccaagagttagggcagcagagtggagcgatttagaaagaacattttaaaacaatcagttaatttaccatgtaaaattgctgtaaatgataatgtgtacagattttctgttcaaatattcaattgtaaacttcttgttaagactgttacgtttctattgcttttgtatgggatattgcaaaaataaaaaggaaagaaccctcaaaaaaaaaaaaaaaaaa

SEQ ID NO: 941 - DNA, 3054 bp, Homo sapiens
agttgagtctgcggagccgcgggcagtggcagtcaggcctccccgctctgtgctacctgcggcccggctctcctccgcgcccccactcgcgctgcgatgacgcgctcactgttcaagggaaacttttggagtgcagacatcctcagcaccatcggctatgacaacattatccaacatctgaacaatggccgcaagaactgcaaagagtttgaagactttctaaaagaaagggcagcaattgaagagaggtatggcaaagatctgctcaacctctctaggaagaagccgtgtggacagtctgaaatcaacaccctgaagcgggcccttgaagtcttcaagcagcaagtagacaatgtggcacaatgtcacattcagcttgcacagagtttaagagaagaggccaggaagatggaagaattcagggaaaagcaaaaactacaacgaaaaaagacagagctcataatggatgctatccataaacaaaagagcttacaattcaagaaaaccatggatgcaaagaagaactatgagcagaaatgccgggacaaagatgaggcagaacaggccgtcagccggagtgccaacctggtgaacccgaagcaacaagaaaagctttttgtgaaactggcaacttcaaagaccgcagtagaggactcagacaaagcatacatgctgcacatcggcaccctggataaggtccgagaagagtggcagagtgagcacatcaaggcctgcgaggcatttgaggctcaagaatgtgaacgaataaacttcttccggaatgcattgtggttacatgtgaatcagctgtcacaacaatgtgtcaccagtgatgaaatgtacgaacaagtccgaaagagtttagaaatgtgcagcattcagagggacattgaatactttgtgaatcaacgcaaaactggacagattccaccagcacccatcatgtatgagaatttctactcctcccagaagaatgcagtcccagcaggaaaggctacagggcctaacttggcaaggagaggacccctcccaattcctaaaagctcaccagatgatcccaattactctttggttgatgactacagtttgctctatcagtaaaatcaatgaaaccagagctttttccggctagtgcttctgtgatatggaaagggcacccagagcagcaggacctatagccacgttatgtcagcaatgaagactttgaagtgaacccttgctataattttttagagatttaaaatttatggtagacatttaggacaacataagcaagtagagttctgcagttttttgaagtttacaaattgccccattctgaagaattattctttcccagttactcaggttatgaatgaattaggttttcaacatgggaagcatgaaatccacttctggatttggagcatccacttgaggagcagaggtggcagcagaggattctgagccaccaactgcagtagtggctcctttggctttgggcagcctggctgtggagtttccacggcgacacacagcctcagtggtgcaagatttaaaattaccttcctttttggctggaagacttagaagccgcctgatcatactttctcattttacagatgaggaaataaagcctacaagtgtgaaattaatttccttacagttttcctagctgatgagggacagaaccagaactagagcctgagcccaacccacatcactattcttctaacccttcctgaagttgtgatgctcatgctgaaatttaagatgccaaatatttttgccagcactttttcagttgggagaatcaccagggtttaaatgtcagatttatttttatgtggatccctgtgtatgctgaactacagagcatgatgtttaatctaatttaaggagccactgattgtaaaacatgccattattttatgttgcactaagaaggtggggtcgaggagttgccaataaacttgggacagactattgatggccaagcccatctgaatttaagatgctaaagtatgaaaaaaatacatcttagaatcaatgaaataccatattttgattccattcctcaagataattttagagttataaaaccagtcctcaattttgggtcttcacagagaatctttcccttgctagaccccagaattttaaatgcatccgtcttacactttcacaaatatttgggttttcctttttcactcacaaacagcagggaggtcatgtactttttgtacaacacctgtgcactatgagaaaatggtaccttttagttattgacaagttaaaatagcactctcagtttttcagtattacagagagcaaatagtttcctctcctgctctgtgcagtagcttttccagaactatggacaaattgatcagaagaagattgattatttcctcatctttttttcttttttttgagacagagtctctctctgtcccccaggctgaagtgcagcggcatgatctcagctcactgcaacctctgcctcccgggttcaagtgattctcctgcctcagcctcctgagtagctgggattacaggcacccaccaccacacctggctaattttttgtatttttagtaaagacagggttttaccatgttggtcaggctggtctcaaactcctgacctcaggtgatccacctgcctcggcctcccaaagtgctgggattacaggcgtgagccactgcgcccggcctatttccccacctttcgtgtaaggtgctactgaacatgacagcttcttgtcatgacaggaaacttgcatcagttggatatccttttgagaaactgaattttgcaaagggccaaatttccccaaactgaacgggctcaggaaatgttcctttacactcagaacattctattttaagtatattatttattgttggcagttcctcagggatttcccttttctctgtattggtcagtgtagttgatgtaaaaccgttttgtggatggaaaatatttttattttattgctcttttagtttggtaggttaaataaaggttcttggtaatttgggaaaaaaaaaaaaaaaaaaaaaaaaaaaaaaa

SEQ ID NO: 942 - DNA, 1893 bp, Homo sapiens
attagacagcacactgctgactgttttcagttgtttctgtaacagcagaaagtgcactcactaggagtagtcagaattcaaaatgctcaagagaaagccatccaatgtttcagagaaggagaaacatcaaaaaccaaagcgaagcagcagttttgggaatttcgatcgttttcggaataattctttatcaaaaccagatgattcaactgaggcacatgaaggagatcccacaaatggaagtggagaacaaagtaaaacttcaaataatggaggcggtttgggtaaaaaaatgagagctatttcatggacaatgaagaaaaaagtgggtaaaaagtacatcaaagccctttctgaggaaaaggatgaggaagatggagagaatgcccacccatatagaaacagtgaccctgtgattgggacccacacagagaaggtgtccctcaaagccagtgactccatggatagtctctacagtggacagagctcatcaagtggcataacaagctgttcagatggtacaagtaaccgggacagctttcgactggatgacgatggcccctattcaggaccattctgtggccgtgccagagtgcatacggatttcacgccaagtccctatgacactgactccctcaaaatcaagaaaggagacatcatagacattatttgcaaaacaccaatggggatgtggacaggaatgttgaacaataaagtgggaaacttcaaattcatttatgtggatgtcatctcagaagaggaagcagcccccaagaaaataaaggcaaaccgaaggagtaacagcaaaaaatccaagactctgcaggagttcctagagaggattcatctgcaggaatacacctcaacacttttgctcaatggttatgagactctagaagatttaaaagatataaaagagagtcacctcattgaattaaatattgaaaacccagatgacagaagaaggttactatcagctgctgaaaacttccttgaagaagaaattattcaagagcaagaaaatgaacctgagcccctatccttgagctcagacatctccttaaataagtcacagttagatgactgcccaagggactctggttgctatatctcatcaggaaattcagataatggcaaagaggatctggagtctgaaaatctgtctgacatggtacataagattattatcacagagccaagtgactgaacacgcattcccaactatatatctacagatgcattccattttaactcttcttgagctaaaacgtcaaataggagaggaagataagataaatatttgtaaataaaacctaaagtttaaatgttttaatctgaataattgtacataaaattttgtatctctaacattccaaattactgtcaataaaatatatatttattattttaaatgctatgtgttaatatttcacttgcttgtattagaaaggcaaaatgtaagactttggtatgtgtgacatatgctttatttggctttattttacaagtacagtatctgcaaaaaacaaagtaaccttttttcatacctgccagttttgaatttatatatgttattgaacaaatagtaatagaggattcgctgttgaaacaagttgtccaagcaatgttatattcatttttatacttattgggaaagtgtgagttaatattggacacattttatcctgatccacagtggagttttagtaattatattttgttgatttcttcattttgttttctggtataaaagtagagataatgtgtagtcacttctgatttagtgaaaccaattgtaataattgtggaaatgttttgtctttaagtgtaaatattttaaaatttgacataccctaatgttaataataaaaagaactatttgcatattgcaaaaaa

SEQ ID NO: 943 - DNA, 1104 bp, Homo sapiens
gggcttgtgggtctttgagacccgaaaattgagagcgttttcgcactccagcggctgctcctggcggctctgcggccgtcaccatgccacagaatgaatatattgaattacaccgtaaacgctatggataccgtttggattaccatgagaaaaagagaaagaaggaaagtcgagaggctcatgaacgttcaaagaaggcaaagaaaatgattggtctgaaggctaagctttaccataaacagcgtcatgctgagaaaatacaaatgaaaaagactatcaagatgcatgaaaagagaaacaccaaacaaaagaatgatgaaaagacaccacagggagcagtacctgcctatctgctggacagagagggacaatctcgagctaaagtactttccaatatgattaaacagaaaagaaaagagaaggcgggaaaatgggaagtccctctgcctaaagtacgtgcccagggagaaacagaagtattaaaagttattcgaacaggaaagagaaagaagaaggcatggaagagaatggttactaaagtgtgctttgttggagatggctttacaagaaaaccacctaaatatgaaagattcatcaggccaatgggcttgcgtttcaagaaagcccatgtaacacatcctgaactgaaagccaccttttgcctaccaatacttggtgtaaagaagaatccctcatccccactgtatacaactttgggtgttattaccaaaggtactgtcattgaagtaaatgtgagcgaattgggccttgtgacgcaaggaggcaaagttatttggggaaaatatgcccaggttaccaacaatcctgaaaatgatggatgtataaatgcagtcttactggtttgacagcaatttcatatataattattgaggactacacaccaattgaagaaactgccattactgtgatgtttctgaatactaccaaacagccatacatgtctgcaatgaagagatttattaaattgtaaacattaaagtggtccagttttataaatggtctttattttgaaatacgctttgaccccatgttcataaaactgaatgattgaaaaaaagcaaatatacaaatatcctacttcat

SEQ ID NO: 944 - DNA, 1346 bp, Homo sapiens
attgaaggctgggcagagtctgagtccacccgggtcgtgctccccccgctcgcccggctcctccgcagtccaggaatctccccgtggctctccccgacctggaggggtggacgcccctggcccccagtccccggcctgcggagggggccggtggctgcggccctgcgcggggccggggcgggccgagccaagggccgcccccggccgaccctccccctgccgggcccgccctccccgccgcggcgctggaggagggcggggcggggccctggggtcagtctgagcctccggcaccggccgcgcagctggaggcggcggagcggaagccccaccatggctgcaatccgaaagaagctggtgatcgttggggatggtgcctgtgggaagacctgcctcctcatcgtcttcagcaaggatcagtttccggaggtctacgtccctactgtctttgagaactatattgcggacattgaggtggacggcaagcaggtggagctggctctgtgggacacagcagggcaggaagactatgatcgactgcggcctctctcctacccggacactgatgtcatcctcatgtgcttctccatcgacagccctgacagcctggaaaacattcctgagaagtggaccccagaggtgaagcacttctgccccaacgtgcccatcatcctggtggggaataagaaggacctgaggcaagacgagcacaccaggagagagctggccaagatgaagcaggagcccgttcggtctgaggaaggccgggacatggcgaaccggatcagtgcctttggctaccttgagtgctcagccaagaccaaggagggagtgcgggaggtgtttgagatggccactcgggctggcctccaggtccgcaagaacaagcgtcggaggggctgtcccattctctgagatccccaaggcctttcctacatgccccctcccttcacaggggtacagaaattatccccctacaaccccagcctcctgagggctccatgctgaaggctcccattttcagttccctcctgcccaggactgcattgttttctagccccgaggtggtggcacgggccctccctcccagcgctctgggagccacgcctatgccctgcccttcctcagggcccctggggatcttgccccctttgaccttccccaaaggatggtcacacaccagcactttatacacttctggctcacaggaaagtgtctgcagtaggggacccagagtcccaggcccctggagttgttttcggcaggggccttgtctctcactgcatttggtcaggggggcatgaataaaggctacaggctccaacgtgaaaaaaaaaaaaaaaaaa

SEQ ID NO: 945 - DNA, 2880 bp, Homo sapiens
gtaggccatggagccgagcagatccgggtcttcgggtggccgcaatgtcccaagtggacgacacccacctagtcccgaggacaaccgacaaagtccttaatgggcccagaaggaggacggagtcccagagaactacaactcccatcaagcacttgggggatcgccgcggctgagggagagactatggcttaggaaccaccattcgcgtgaggctctgctccccgcgcctgcgcagagtgcagggccacgtcgcttttgctgtaccggggaccacgcgtctcatccatggcttccgcggactcgcgccgggtggcagatggcggcggtgccgggggcaccttccagccctacctagacaccttgcggcaggagctgcagcagacggacccaacgctgttgtcagtagtggtggcggttcttgcggtgctgctgacgctagtcttctggaagttaatccggagcagaaggagcagtcagagagctgttcttcttgttggcctttgtgattccgggaaaacgttgctctttgtcaggttgttaacaggcctttatagagacactcagacgtccattactgacagctgtgctgtatacagagtcaacaataacaggggcaatagtctgaccttgattgaccttcccggccatgagagtttgaggcttcagttcttagagcggtttaagtcttcagccagggctattgtgtttgttgtggatagtgcagcattccagcgagaggtgaaagatgtggctgagtttctgtatcaagtcctcattgacagtatgggtctgaagaatacaccatcattcttaatagcctgcaataagcaagatattgcaatggcaaaatcagcaaagttaattcaacagcagctggagaaagaactcaacaccttacgagttacccgttctgctgcccccagcacactggacagttccagcactgcccctgctcagctggggaagaaaggcaaagagtttgaattctcacagttgcccctcaaagtggagttcctggagtgcagtgccaagggtggaagaggggacgtgggctctgctgacatccaggacttggagaaatggctggctaaaattgcctgagaggcagctctaaagcacaagacctggatgtgtgacacacagttttggaaaaaggtctgtggtagtctggagttgatgaggaaggggtacaagatgtggttagaaacatttctttgttctggaaacaaagtactgttgaaaccagcttggaattttttttttttttttttttaagttcagttctcccttatggctgcctttcaaacaagtaccttttatctgatgcctgtatcttccctttgttaaggtgtaacttgatgtagggtcaaggtttttgtgacaacaggcagactccacacagagaggatatgatgagaatatggccatcacctgaaaagttttcttatcttctgtgcttttggtccctggaaacaaatccgcctatgtatgaagctagttgatttccagttgcactatttccagttgcctctgaagttcacaggcaatacattgtctagtcctttgcgaatttctctgatttgtgggcacagttatgaagtttccccacatgtgaagacaggtacaaaatagcagagccaagcagacagtgggtctattcttcattagctcagtgacttgtccacactcgtcttagcacttacgtttcaaaagcttgtcacaaacccttggagtcattcccagataatagaactggaaatgataaatcccctaatgccaagggtctagtgtgttcttagtggttatactgggaagtgtgtggagatttaggtgctgctctgctgctctggatggctgaaggctcctgggccatcttcatgtgctgcttgaagagctcctattttgtactcctggctagaatgctgtggaacaaatacaaagtgaaaaaagttctctgtagatttctgaagtgcatattcattgatgccaagaaaaaaaaaaagttgcctttttgaagtgatgttttttgctgtcttcttaaacacaaggcttttttgaatgattagtatatttcatggtaaagaaaacagcctgtctggctcaaagcaattaaatagaatgtaatggtgagtacaaatgagtgcacatgtcaggactcaggtctaactccttgtctcctgagcctaaagattgcaacatacacaagaacacactcctattcctaccccacacactcagggacaagcccaactaaagcttacaaggagaccagggtggctctgtccaggggagaagccagttatggaacagtgcattgagagccatggtaggagaggcccacagttctctggagcatgcagcaggggcaccccacctggccttgaggatcagggggagtcaaaggataaagcatggggctgatgacgtctgagggagtgtgatcctccatgtatggcctctgcctgctgtctcacatgtcccttctggtggtcacttgggctctaggagtatacgtcacctcagaccatctggcagaaatactccaggctcctaccccaaagcacatgtcagccttgctgctggagcacgaagacaatgtaaatgaaacatgaaatggaggagttgtgagaccctgaccctgagtccttacttgaaagctgctgctggtgttctgagtgtcttttggactcttatttcttgcccttttccttattaggcaagcagtaacttaggaagtaggtaagagcaataaatgtgacatgttatgtcatcatagtaggagctcatgggaataaaagtcagtggcttgatgcttctgttagaggcaaaaaaaaaaaaaaaaaaaaaaaaaaaaaaaaaaaaaaaaaaaaaaaaaaaaaa

SEQ ID NO: 946 - DNA, 1403 bp, Homo sapiens
gcctgtctgcattctactatataaagcagcagagacgttgactagcgcatatttgctaagagcaccatgcgcgcagcagccatctccactccaaagttagacaaaatgccaggaatgttcttctctgctaacccaaaggaattgaaaggaaccactcattcacttctagacgacaaaatgcaaaaaaggaggccaaagacttttggaatggatatgaaagcatacctgagatctatgatcccacatctggaatctggaatgaaatcttccaagtccaaggatgtactttctgctgctgaagtaatgcaatggtctcaatctctggaaaaacttcttgccaaccaaactggtcaaaatgtctttggaagtttcctaaagtctgaattcagtgaggagaatattgagttctggctggcttgtgaagactataagaaaacagagtctgatcttttgccctgtaaagcagaagagatatataaagcatttgtgcattcagatgctgctaaacaaatcaatattgacttccgcactcgagaatctacagccaagaagattaaagcaccaacccccacgtgttttgatgaagcacaaaaagtcatatatactcttatggaaaaggactcttatcccaggttcctcaaatcagatatttacttaaatcttctaaatgacctgcaggctaatagcctaaagtgactggtccctggctgaagggaattaacagatagtatcaagcgcagaaggaatgtgccagtatggctccctgggtgaacagcttggccttttttgggtgtcttgacaggccaagaagaacaaatgactcagaatggattaacatgaaagttatccaggcgcagagttgaagaagcataagcaagacaaaaacagagagaccgcagaaggaggaagatactgtggtactgtcataaaaaacagtggagctctgtattagaaagcccctcagaactgggaaggccaggtaactctagttacacagaaactgtgactaaagtctatgaaactgattacaacagactgtaagaatcaaagtcaactgacatctatgctacatattattatatagtttgtactgagctattgaagtcccattaacttaaagtatatgttttcaaattgccattgctactattgcttgtcggtgttattttattttattgtttttgactttggaagagatgaactgtgtatttaacttaagctattgctcttaaaaccagggagtcagaatatatttgtaagttaaatcattggtgctaataataaatgtggattttgtattaaaatatatagaagcaatttctgtttacatgtccttgctacttttaaaaacttgcatttattcctcagattttaaaaataaataaataattcatttaagattc

SEQ ID NO: 947 - DNA, 4666 bp, Homo sapiens
agtaccttggtccagctcttcctgcaacggcccaggagctcagagctccacatctgaccttctagtcatgaccaggaccagggcagcactcctcctgttcacagccttagcaacttctctaggtttcaacttggacacagaggagctgacagccttccgtgtggacagcgctgggtttggagacagcgtggtccagtatgccaactcctgggtggtggttggagccccccaaaagataacagctgccaaccaaacgggtggcctctaccagtgtggctacagcactggtgcctgtgagcccatcggcctgcaggtgcccccggaggccgtgaacatgtccctgggcctgtccctggcgtctaccaccagcccttcccagctgctggcctgcggccccaccgtgcaccacgagtgcgggaggaacatgtacctcaccggactctgcttcctcctgggccccacccagctcacccagaggctcccggtgtccaggcaggagtgcccaagacaggagcaggacattgtgttcctgatcgatggctcaggcagcatctcctcccgcaactttgccacgatgatgaacttcgtgagagctgtgataagccagttccagagacccagcacccagttttccctgatgcagttctccaacaaattccaaacacacttcactttcgaggaattcaggcgcagctcaaaccccctcagcctgttggcttctgttcaccagctgcaagggtttacatacacggccaccgccatccaaaatgtcgtgcaccgattgttccatgcctcatatggggcccgtagggatgccgccaaaattctcattgtcatcactgatgggaagaaagaaggcgacagcctggattataaggatgtcatccccatggctgatgcagcaggcatcatccgctatgcaattggggttggattagcttttcaaaacagaaattcttggaaagaattaaatgacattgcatcgaagccctcccaggaacacatatttaaagtggaggactttgatgctctgaaagatattcaaaaccaactgaaggagaagatctttgccattgagggtacggagaccacaagcagtagctccttcgaattggagatggcacaggagggcttcagcgctgtgttcacacctgatggccccgttctgggggctgtggggagcttcacctggtctggaggtgccttcctgtaccccccaaatatgagccctaccttcatcaacatgtctcaggagaatgtggacatgagggactcttacctgggttactccaccgagctggccctctggaaaggggtgcagagcctggtcctgggggccccccgctaccagcacaccgggaaggctgtcatcttcacccaggtgtccaggcaatggaggatgaaggccgaagtcacggggactcagatcggctcctacttcggggcctccctctgctccgtggacgtagacagcgacggcagcaccgacctggtcctcatcggggccccccattactacgagcagacccgagggggccaggtgtctgtgtgtcccttgcccagggggtggagaaggtggtggtgtgatgctgttctctacggggagcagggccacccctggggtcgctttggggcggctctgacagtgctgggggatgtgaatggggacaagctgacagacgtggtcatcggggccccaggagaggaggagaaccggggtgctgtctacctgtttcacggagtcttgggacccagcatcagcccctcccacagccagcggatcgcgggctcccagctctcctccaggctgcagtattttgggcaggcactgagcgggggtcaagacctcacccaggatggactggtggacctggctgtgggggcccggggccaggtgctcctgctcaggaccagacctgtgctctgggtgggggtgagcatgcagttcatacctgccgagatccccaggtctgcgtttgagtgtcgggagcaggtggtctctgagcagaccctggtacagtccaacatctgcctttacattgacaaacgttctaagaacctgcttgggagccgtgacctccaaagctctgtgaccttggacctggccctcgaccctggccgcctgagtccccgtgccaccttccaggaaacaaagaaccggagtctgagccgagtccgagtcctcgggctgaaggcacactgtgaaaacttcaacctgctgctcccgagctgcgtggaggactctgtgacccccattaccttgcgtctgaacttcacgctggtgggcaagcccctccttgccttcagaaacctgcggcctatgctggccgccgatgctcagagatacttcacggcctccctaccctttgagaagaactgtggagccgaccatatctgccaggacaatctcggcatctccttcagcttcccaggcttgaagtccctgctggtggggagtaacctggagctgaacgcagaagtgatggtgtggaatgacggggaagactcctacggaaccaccatcaccttctcccaccccgcaggactgtcctaccgctacgtggcagagggccagaaacaagggcagctgcgttccctgcacctgacatgtgacagcgccccagttgggagccagggcacctggagcaccagctgcagaatcaaccacctcatcttccgtggcggcgcccagatcaccttcttggctacctttgacgtctcccccaaggctgtcctgggagaccggctgcttctgacagccaatgtgagcagtgagaacaacactcccaggaccagcaagaccaccttccagctggagctcccggtgaagtatgctgtctacactgtggttagcagccacgaacaattcaccaaatacctcaacttctcagagtctgaggagaaggaaagccatgtggccatgcacagataccaggtcaataacctgggacagagggacctgcctgtcagcatcaacttctgggtgcctgtggagctgaaccaggaggctgtgtggatggatgtggaggtctcccacccccagaacccatcccttcggtgctcctcagagaaaatcgcacccccagcatctgacttcctggcgcacattcagaagaatcccgtgctggactgctccattgctggctgcctgcggttccgctgtgacgtcccctccttcagcgtccaggaggagctggatttcaccctgaagggcaacctcagctttggctgggtccgccagatattgcagaagaaggtgtcggtcgtgagtgtggctgaaattacgttcgacacatccgtgtactcccagcttccaggacaggaggcatttatgagagctcagacgacaacggtgctggagaagtacaaggtccacaaccccacccccctcatcgtaggcagctccattgggggtctgttgctgctggcactcatcacagcggtactgtacaaagttggcttcttcaagcgtcagtacaaggaaatgatggaggaggcaaatggacaaattgccccagaaaacgggacacagacccccagcccgcccagtgagaaatgatcccctctttgccttggacttcttctcccccgcgagttttccccacttacttaccctcacctgtcaggcctgacggggaggaaccactgcaccaccgagagaggctgggatgggcctgcttcctgtctttgggagaaaacgtcttgcttgggaaggggcctttgtcttgtcaaggttccaactggaaacccttaggacagggtccctgctgtgttccccaaaggacttgacttgcaatttctacctagaaatacatggacaatacccccaggcctcagtctcccttctcccatgaggcacgaatgatctttctttcctttctttttttttttttttcttttcttttttttttttttgagacggagtctcgctctgtcacccaggctggagtgcaatggcgtgatctcggctcactgcaacctccgcctcccgggttcaagtaattctgctgtctcagcctcctgagtagctgggactacaggcacacgccacctcgcccggcccgatctttctaaaatacagttctgaatatgctgctcatccccacctgtcttcaacagctccccattaccctcaggacaatgtctgaactctccagcttcgcgtgagaagtccccttccatcccagagggtgggcttcagggcgcacagcatgagaggctctgtgcccccatcaccctcgtttccagtgaattagtgtcatgtcagcatcagctcagggcttcatcgtggggctctcagttccgatttcccaggctgaattgggagtgagatgcctgcatgctgggttctgcacagctggcctcccgcgttgggcaacattgctggctggaagggaggagcgccctctagggagggacatggccccggtgcggctgcagctcacccagccccaggggcagaagagacccaaccacttctattttttgaggctatgaatatagtacctgaaaaaatgccaagacatgattatttttttaaaaagcgtactttaaatgtttgtgttaataaattaaaacatgcacaaaaagatgcatctaccgctcttgggaaatatgtcaaaggtctaaaaataaaaaagccttctgtgaaaaaaaaaaaaaaaaa

SEQ ID NO: 948 - DNA, 1759 bp, Homo sapiens
aagttcaagggcgagagtgagtaccagcagaaggctgggagtctgtagtttgttcctgctgccaggctccactgaggggaacggggacctgtctgaagagaagatgcccctgctgacactctacctgctcctcttctggctctcaggctactccattgtcactcaaatcaccggtccaacaacagtgaatggcttggagcggggctccttgaccgtgcagtgtgtttacagatcaggctgggagacctacttgaagtggtggtgtcgaggagctatttggcgtgactgcaagatccttgttaaaaccagtgggtcagagcaggaggtgaagagggaccgggtgtccatcaaggacaatcagaaaaaccgcacgttcactgtgaccatggaggatctcatgaaaactgatgctgacacttactggtgtggaattgagaaaactggaaatgaccttggggtcacagttcaagtgaccattgacccagcaccagtcacccaagaagaaactagcagctccccaactctgaccggccaccacttggacaacaggcacaagctcctgaagctcagtgtcctcctgcccctcatcttcaccatattgctgctgcttttggtggccgcctcactcttggcttggaggatgatgaagtaccagcagaaagcagccgggatgtccccagagcaggtactgcagcccctggagggcgacctctgctatgcagacctgaccctgcagctggccggaacctccccgcaaaaggctaccacgaagctttcctctgcccaggttgaccaggtggaagtggaatatgtcaccatggcttccttgccgaaggaggacatttcctatgcatctctgaccttgggtgctgaggatcaggaaccgacctactgcaacatgggccacctcagtagccacctccccggcaggggccctgaggagcccacggaatacagcaccatcagcaggccttagcctgcactccaggctccttcttggaccccaggctgtgagcacactcctgcctcatcgaccgtctgccccctgctcccctcatcaggaccaacccggggactggtgcctctgcctgatcagccagcattgcccctagctctgggttgggcttggggccaagtctcagggggcttctaggagttggggttttctaaacgtcccctcctctcctacatagttgaggagggggctagggatatgctctggggctttcatgggaatgatgaagatgataatgagaaaaatgttatcattattatcatgaagtaccattatcgtaatacaatgaacctttatttattgcctaccacatgttatgggctgaataatggcccccaaagatatctgtgtcctaatcctcagaacctgtgactgttaccttctgtggcagaaagggacagtgcagatgtatgtaagttaaggactttgagatagagaggttattcttgctgattcaggtgggcccaaaatatcaccacaagggtcctcataagaaagaggccagaaggtcaaagaggtagagacaaagtgatgatggaagtggacgtgggtgtgacgtgagcaggggccatgaatgccgcagccttcagatgccagaaagggaaaggaatggattcccctgcctggagcctccaaaagaaaccagccctgcccacgccttgacttgagcccattgaaactgatcttgagctcctggcctccagaattgcaggagaataaatttgtgttgtttttaatgagcca

SEQ ID NO: 949 - DNA, 907 bp, Homo sapiens
ctcctctctactctacccagcttgcgctccccagccgcaagtcggccgcgctttgcccgtcagcgcttggagctttctgcgtcgcttcccgctgcgcctgcgcggtcccgcctcgccccacgcgcgggctcgcgcttcggtttccccagacctgctcgcagcaccctgctgtcttcccggtccggcccgctgcccgcggcgccagcaccatgctcttctattcttttttcaagtcccttgtgggcaaggatgtggtcgtggaactaaagaatgacctgagcatctgtggaaccctccattctgtggatcagtatctcaacatcaaactaactgacatcagtgtcacagaccctgagaaataccctcacatgttatcagtgaagaactgcttcattcggggctcagtggtccgatacgtgcagctgccagcagatgaggtcgacacacagttgctacaggatgcggcaaggaaggaagccctgcagcagaaacagtgatggctcctcctcctcttcccctccctctttcattggtgacccataaccccaagtcccagcccagaacccctaacccccaatacttgaaggggttttgtttttttactaatgatggttttgtgggttttttttaagggatgagtggatgagaggagtaatagggaacagctatcctctcttgagaaggggaggataagtaggctgggaaacttcaaagccttcccagtccccagcacctgcctttctcactacttctctggagatggtaggagagtttcctaggtctttccagggcagcatgtgattcatttggggatggaaggaatctgtcccgcatcgggaataaaatttatgatgcaaaaaaaaaaaaaaaaaaaaaaaaaaaaaaaaaaaaaaaaaaaaaaaaaaaa

SEQ ID NO: 950 - DNA, 2561 bp, Homo sapiens
ggagagccgagcgccaacccgctagcgcctgaatccggcgtgctgcccgctcgccgcccgccatggcccgcgcagccccgctgctcgccgcgttgaccgcgctcctcgccgccgccgctgctggcggagatgccccgccgggcaaaatcgcggtggttggggctgggattgggggctctgctgtggcccattttctccagcagcactttggacctcgggtgcagatcgacgtgtacgagaagggaaccgtgggtggccgcttggccaccatctcagtcaacaagcagcactatgagagcggggctgcctccttccactccctgagcctgcacatgcaggacttcgtcaagctgctggggctgaggcaccggcgcgaggtggtgggcaggagcgccatcttcggcggggagcacttcatgctggaggagactgactggtacctgctgaacctcttccgcctctggtggcactatggcatcagcttcctgaggctgcagatgtgggtggaggaggtcatggagaagttcatgaggatctataagtaccaggcccacggctatgccttctcgggtgtggaggagctgctctactcactgggggagtccacctttgttaacatgacccagcactctgtggctgagtccctgctgcaggtgggcgtcacgcagcgctttattgatgatgtcgtttctgctgtcctgcgggccagctatggccagtcagcagcgatgcccgcctttgcaggagccatgtcactagccggggcccaaggcagcctgtggtctgtggaaggaggcaataagctggtttgttccggtttgctgaagctcaccaaggccaatgtgatccatgccacagtgacctctgtgaccctgcacagcacagaggggaaagccctgtaccaggtggcgtatgagaatgaggtaggcaacagctctgacttctatgacatcgtggtcatcgccacccccctgcacctggacaacagcagcagcaacttaacctttgcaggcttccacccgcccattgatgacgtgcagggctctttccagcccaccgtcgtctccttggtccacggctacctcaactcgtcctacttcggtttcccagaccctaagcttttcccctttgccaacatccttaccacagatttccccagcttcttctgcactctggacaacatctgccctgtcaacatctctgccagcttccggcgaaagcagccccaggaggcagctgtttggcgagtccagtcccccaagcccctctttcggacccagctaaagaccctgttccgttcctattactcagtgcagacagctgagtggcaggcccatcccctctatggctcccgccccacgctcccgaggtttgcactccatgaccagctcttctacctcaatgccctggagtgggcggccagctccgtggaggtgatggccgtggctgccaagaatgtggccttgctggcttacaaccgctggtaccaggacctagacaagattgatcaaaaagatttgatgcacaaggtcaagactgaactgtgagggctctagggagagcctgggaactttcatcccccactgaagatggatcatcccacagcagcccaggactgaataagccatgctcgcccaccaggcttctttctgacccctcatgtatcaagcatctccaggtgacctactgtctgcctatattaagggtccacacggcggctgctgcttttttttaagggggaaagtaagaaaagagaaggaaatccaagccagtatatttgttttatttattttttttaagaagaaaaaagttcatcttcacaaggtgcttcagacttggtttcttagctagaaaccagaagactacgggagggaatataaggcagagaactatgagtcttattttattactgtttttcactacctactcccacaatggacaatcaattgaggcaacctacaagaaaacatttacaaccagatggttacaaataaagtagaagggaagatcagaaaacctaagaaatgatcatagctcctggttactgtggacttgatggatttgaagtacctagttcagaactccctagtcaccatctccaagcctgtcaacatcactgcatattggaggagatgactgtggtaggacccaaggaagagatgtgtgcctgaatagtcgtcaccatatctccaagcttcctggcaaccagtgggaaaagaaacatgcgaggctgtaggaagagggaagctcttccttggcacctagaggaattagccattctcttccttatgcaaagattgaggaatgcaacaatataaagaagagaagtccccagatggtagagagcagtcatatcttacccctagatgttcatcccagcagaagaaagaagaaggtgttggggtaggattcttcagaggttagcctggtactttctcatcagacactagcttgaagtaagaggagaattatgcttttctttgctttttctacaaacccttaaaaatcacttgttttaaaaagaaagtaaaagcccttttcattccttttgaaaaaaaaaa

SEQ ID NO: 951 - DNA, 4433 bp, Homo sapiens
ttcctgtctacgtttcatttcctgggggcttgccaagtgataaacagacccaggcgtgtgtggtagagttcgggttttttagcacgaagtgggtggctggagtttgcttgaaaacatcaattgactttgtgatcattacagaaatgctggtgtaaggtgttcagaagacaatggagaaaaaatggaaatactgtgctgtctattacatcatccagatacattttgtcaagggagtttgggaaaaaacagtcaacacagaagaaaatgtttatgctacacttggctctgatgtcaacctgacctgccaaacacagacagtaggcttcttcgtgcagatgcaatggtccaaggtcaccaataagatagacctgattgctgtctatcatccccaatacggcttctactgtgcctatgggagaccctgtgagtcacttgtgactttcacagaaactcctgagaatgggtcaaaatggactctgcacttaaggaatatgtcttgttcagtcagtggaaggtacgagtgtatgcttgttctgtatccagagggcattcagactaaaatctacaaccttctcattcagacacacgttacagcagatgaatggaacagcaaccatacgatagaaatagagataaatcagactctggaaataccatgctttcaaaatagctcctcaaaaatttcatctgagttcacctatgcatggtcggtggaggataatggaactcaggaaacacttatctcccaaaatcacctcatcagcaattccacattacttaaagatagagtcaagcttggtacagactacagactccacctctctccagtccaaatcttcgatgatgggcggaagttctcttgccacattagagtcggtcctaacaaaatcttgaggagctccaccacagtcaaggtttttgctaaaccagaaatccctgtgattgtggaaaataactccacggatgtcttggtagagagaagatttacctgcttactaaagaatgtatttcccaaagcaaatatcacatggtttatagatggaagttttcttcatgatgaaaaagaaggaatatatattactaatgaagagagaaaaggcaaagatggatttttggaactgaagtctgttttaacaagggtacatagtaataaaccagcccaatcagacaacttgaccatttggtgtatggctctgtctccagtcccaggaaataaagtgtggaacatctcatcagaaaagatcacttttctcttaggttctgaaatttcctcaacagaccctccactgagtgttacagaatctacccttgacacccaaccttctccagccagcagtgtatctcctgcaagatatccagctacatcttcagtgacccttgtagatgtgagtgccttgaggccaaacaccactcctcaacccagcaattccagtatgactacccgaggcttcaactatccctggacctccagtgggacagataccaaaaaatcagtttcacggatacctagtgaaacatacagttcatccccgtcaggtgcaggctcaacacttcatgacaatgtctttaccagcacagccagagcattttcagaagtccccacaactgccaatggatctacgaaaactaatcacgtccatatcactggtattgtggtcaataagcccaaagatggaatgtcctggccagtgattgtagcagctttactcttttgctgcatgatattgtttggtcttggagtgagaaaatggtgtcagtaccaaaaagaaataatggaaagacctccacctttcaagccaccaccacctcccatcaagtacacttgcattcaagagcccaacgaaagtgatctgccttatcatgagatggagaccctctagtctcgtgagactttgccccatggcagaactctgctggaatcctattgagaaggtagacattgtgctttattaatatagtcgctcttcagccatgcctttgctgcagctgaaatggaagtcagaagtgagtgacctgttttcccagcaactcaccctcttccatctccaaacgcctgaagcttaaccaagagtgagaggatatgtcatgttcacactcaatgcaattcgtagtggttttcttgcttatgtaagaagtacatattagtctgccatctttaaaaaaaaatacagtattttcatttaaattctctgatggagggacaacaatggtttcaactgtatgcccatgcctgatcctcttatttgaacatctatcaacattgtaaactctttgccaaaatcctggggctttgctgcattccctaagataattacaggaaaaagaaaatgtaaaagtgctaacaaggctgccaagtaatggagaagtatggttagtcttcatattgaaattctgttgcttattttcatggaaggaaacagaatactttgcacaggaaccacattttcaatcctccttcactgtcttcctaccatgttcagcccagactcctgccacatggaccaggatgaagagggatcaaagagataattagccaaaaacccagtagcctagaagatacaaaactccactggcctctaaaattatattagccaagagtggtttcatttgagtgccttcgtgtgtatgtccatcaaactggaaccaaactgttttgtaagtaaacaggcagcctaagcccaaccctactttctaattccagttattctctttttcatctggggatttacctgttcatttaatctgcctgttttgatctgttttgaaaaagataaagagcctcaaatcagaccagcactgattaattaaccctgctcctaccaatcttttttaaagcagttgaagcagaatgtataggtgtcagagaagaaacctagtcagccagacgtgctctgtattcagcaatagtttgtgaatgaataaattactaatcctccttgtcgcttgaaaccttcccacactccctgctccaggagggaaaaacagatgttgttgacagatagagtgataggcaaattctgtgtggactttagtcccaaaaggaaactttagttcacttgcagtatgcttatccttgactgcacatgagaatgccttgtgcagagttatttggagattatgtctttttcttaaacaccatggctgtcacacttcagttcaattaaatcagaatgtctgaggagtgagacacaggcatcaacactctcaaatgattcacatgttcagccaaagttgagaaccatcgagcctgtggaagttctttctcatggctcagaatcttaggtaggtgcttaactcttgtggtggccagcctccaagatgagccccagtgttcttgcctcctactattcacatctttatgtggtcccctccaatgctgaatacagatgatttgtgtaacctgaggccaggattaaggggaggcaatcaatgcacctagggaaaaaatttaaggaggtattcacactcagggtcatgcacttgcacaatgttgagaatgagtaccactctcaccattggtatagccaaaaaagcttggaagtgaccaaggctaggtcacaaaatacactgtggcttcttctttgatctctctttgaccatactgacactgggaaaagcccattcccatgccatgaagacaccaaggcagccctattgagaaatctacctgtcgtggccgggcgcagtggctcacgcctgtaatcccagcactttgggaggccgaggtgggtggatcacgaggtcaggagatcgagaccatcctggctaacacagtgaaaccccgtctctactaaaaatacaaaaaattagccgggtgtggtgtcgggcacctgtagtcccagctactcaggaggctgaggcaggagaagggtgggaacccgggaggcagagcttgcagtgagccgagattgtgccactgcacactccaatctgggtgaaagaccgagactccgcctcaaaaaaaaaaaaaaaagaaagaaagaaagaaagaaagaaatctacctgtcaaggaactaaggtattttgctaacaagcaccaacttgccagccatgtaagggagccatcttggaagcagatcctccagcctccagtcaagtcttcagataattgcaacttcagttgatcttttgaccaagacctcaagagagccagaactacccagctaagccttttactaaatttctgaacttctaacactattagataataagtgcttattgtttaacaccattaattttgagtataatttgttacatagcgacagataactatacagctcaacaactagaaaaataaactgtttacctgccttaattatttatctttagttccttattagttctcaagaaacaaatgctagcttcatatgtatggctgttgctttgcttcatgtgtatggctatttgtatttaacaagacttaatcatcagta

SEQ ID NO: 952 - DNA, 3146 bp, Homo sapiens
agcttggcgggcggtgaggcgtggggtgacggggggatggcgggggccggcatgcgcgcgcatgcgccgtggtaaaaggccggtacctcgggcaagatggctatcaagagtatcgcttcccgcctccggggttcccgtcgttttctgagcggcttcgtggctggggctgtagtgggcgctgcgggagctgggctcgcggccctgcagttcttccggagtcagggcgctgagggagcgttgacagggaagcagccggatggatctgcagaaaaggctgtcttggaacaatttggattccctttaactggaacagaggcaaggtgttacactaatcacgctttgtcttatgatcaggcaaagcgggtgcctagatgggttcttgaacatatttccaaaagcaagataatgggtgatgcagacagaaagcattgtaaatttaagcctgatcccaatatccctccaaccttcagtgccttcaatgaagattatgttggaagtgggtggtcacgaggacacatggctccagcaggaaataacaaattttcaagtaaagccatggctgaaaccttttacctttctaacattgtgcctcaggattttgataataattctggatattggaacagaatagaaatgtactgtcgagagctgacagaaaggtttgaagatgtttgggtggtatctgggcctttgaccttacctcagactagaggcgatggaaagaaaatagttagttaccaggtgattggcgaggacaacgtggcagtcccctcacacctttataaggtaatcctggcccgcagaagctcagtatctaccgaaccactggcgctaggggcctttgtggtacccaatgaagccatcggcttccagccccagttaactgaattccaagtgagcctccaggacctagagaagttgtcaggactggtgttttttcctcatttggatagaactagtgatatccggaatatctgctctgtggacacctgtaagctcctggatttccaggagttcaccttgtacttgagtacaagaaagattgaaggagcccgatcagtgctcagactggaaaagatcatggaaaacttgaagaatgcagagattgaaccagatgattactttatgagtcgctatgagaagaagctagaagaactcaaagctaaggagcagtcaggaacccagataagaaagccatcctagtttttatctcaagatgtgtcataccgtctgtaatgaagcaggcatgccctctttaggctaacatattttagtggctttgctttttgctttttaaaaagtttttctctttaagagatgtggtctcgccgtgtcatccaggctggagtgcagtggtggaatcatagctcactatagcctcaaacttctgggcttaagcaatcctcctgcctctgccccctgagcagctgggactacaggcacacaccatcaccctcagctactagtggctttgctttaaagaaacagtggaatcctaaatttatgactaaaaattcccccaaaagatgaaagatctacaatgtttttgtcagtattatatttgactcaggaactaattattaagggagctttgacacctgcagatggagggctgatcttgtgtcaagttaacaggaagactgcccacagatgacactgcatttgtatccctgtggatgtagagtattgggaaggcatttgtttagtttcatgcctccaaaccatgcattgtctgtgatgtatctgcccagccttctcagaactcaatgttgtacatttttccctctaggacctgaattggtcttggaggcagcttttagaaatcctctgtgtagttcctgtccacatgcactatatatttgtttcttttttctcctctcatgaatctgctcgtttctctacttctgtctacgtagaagcactcagcaactagtttctgctcattaaatgtgttctatatactaggctcagtgctttacatgtgttgtctcacaatgactctctgaggtaaatacactatccccattttacctgtgagaaaattgaggcttagagagcttagtgtcttacctgagtttcacttttccaaagtagtcatccacaaagtatgaggcagacagatctaagagaagaaagacagctgaggtagattcaaatcttttctgacatggatggtggctttttactcagaaatatatacctatttccatgggtatttgtgggcctgaggcatgcttggcaagaagagtctggtttctcgtctgctatgcaagccaaagggactttaatgttctttgaattgaaccctccttagctctgtggaaagagacagtcaggaatatttgggaattagacggcaatactttgtggggtttattagagcccatgcttgcctccagagatacagttcttttagtgaccagatactgccaaattgatgtgttcttgctttccaggtgagctttttgttcttaagattaagaaacctatgaaggatctgcagccaggcatggtggctcaggcctataatctcagcactttgggaaatcgaggtgggtggatcgcttgagcccaggagtttgagaccagcctgggcaacataatgaaaccctatctttacaaaaaaatacaaaaattagctgggcgtggtggtgcacacctgtagtcccagctactcgggaggctgaaatgggaggattgcttgagcctggcaggtcaaggctgcgatgggacatggtcatgccactggacgccagcctgggccacagagggagaccctgtctcaaaaaaagaaaagaaaaaagaaaaaggtctgcccacaaaatcactagcttattatttgcttcctgtgtgcctgcttgtctacctagcatagtaggccaaaggtccaaaggcatttagcattcctaggggaaattgtggctgtttttctgagccagatctcttgatttgggtttacacggagtcctttcatggactatcctgagtattgtcagtaaaacgtcttggggcataagaacttgtctgaatctgtcatacataccactgctgtcttttccgagtggtattacaagaaagatttttgtggtgtgtttgttctaagagaaatgccaaggctttcagataaagataagatgataatgatt

SEQ ID NO: 953 - DNA, 2118 bp, Homo sapiens
cgcgcatgcgtgcagcaaagaatggaggagtcggaacccgaacggaagcgggctcgcaccgacgaggtgcctgccggaggaagccgctccgaggcggaagatgaggacgacgaggactacgtgccctatgtgccgttacggcagcgccggcagctactgctccagaagctgctgcagcgaagacgcaagggagctgcggaggaagagcagcaggacagcggtagtgaaccccggggagatgaggacgacatcccgctaggccctcagtccaacgtcagcctcctggatcagcaccagcaccttaaagagaaggctgaagcgcgcaaagagtctgccaaggagaagcagctgaaggaagaagagaagatcctggagagtgttgccgagggccgagcattgatgtcagtgaaggagatggctaagggcattacgtatgatgaccccatcaaaaccagctggactccaccccgttatgttctgagcatgtctgaagagcgacatgagcgcgtgcggaagaaataccacatcctggtggagggagacggtatcccaccacccatcaagagcttcaaggaaatgaagtttcctgcagccatcctgagaggcctgaagaagaaaggcattcaccacccaacacccattcagatccagggcatccccaccattctatctggccgtgacatgataggcatcgctttcacgggttcaggcaagacactggtgttcacgttgcccgtcatcatgttctgcctggaacaagagaagaggttacccttctcaaagcgcgaggggccctatggactcatcatctgcccctcgcgggagctggcccggcagacccatggcatcctggagtactactgccgcctgctgcaggaggacagctcaccactcctgcgctgcgccctctgcattgggggcatgtccgtgaaagagcagatggagaccatccgacacggtgtacacatgatggtggccaccccggggcgcctcatggatttgctgcagaagaagatggtcagcctagacatctgtcgctacctggccctggacgaggctgaccgcatgatcgacatgggcttcgagggtgacatccgtaccatcttctcctacttcaagggccagcgacagaccctgctcttcagtgccaccatgccgaagaagattcagaactttgctaagagtgcccttgtaaagcctgtgaccatcaatgtggggcgcgctggggctgccagcctggatgtcatccaggaggtagaatatgtgaaggaggaggccaagatggtgtacctgctcgagtgcctgcagaagacacccccgcctgtactcatctttgcagagaagaaggcagacgtggacgccatccacgagtacctgctgctcaagggggttgaggccgtagccatccatgggggcaaagaccaggaggaacggactaaggccatcgaggcattccgggagggcaagaaggatgtcctagtagccacagacgttgcctccaagggcctggacttccctgccatccagcacgtcatcaattatgacatgccagaggagattgagaactatgtacaccggattggccgcaccgggcgctcgggaaacacaggcatcgccactaccttcatcaacaaagcgtgtgatgagtcagtgctgatggacctcaaagcgctgctgctagaagccaagcagaaggtgccgcccgtgctgcaggtgctgcattgcggggatgagtccatgctggacattggaggagagcgcggctgtgccttctgcgggggcctgggtcatcggatcactgactgccccaaactcgaggctatgcagaccaagcaggtcagcaacatcggtcgcaaggactacctggcccacagctccatggacttctgagccgacagtcttcccttctctccaagaggcctcagtccccaagactgccaccagtctacacatacagcagccccctggacagaatcagcatttcagctcagctggcctggaatgggccaggctggtcctggctgcctgttccctgtgctcttcagaattactgtttttgtttccttttaccccagctgccattaaagcccaaacctctagcccaaaaaaaaaaaaaaa

SEQ ID NO: 954 - DNA, 1872 bp, Homo sapiens; identical to SEQ ID NO: 766

SEQ ID NO: 955 - DNA, 1877 bp, Homo sapiens
atgtgggccctgcgggccgccgtacgcccggggctgcggctctcccgcgtgggccgcggccgctcggctccgcgggcagccgcgccgtcctgccccgcgcgcgcgctagccgctgtcggccgcaggagccccgggaatctggaggggccgtggggcggagggcggggcctgcgggcggacggcggccgaagccgcacgggagacgacgaggaggagccggaagatgcggacgagaacgccgaggaggagctgctgcggggagagcctctgctgccggcggggacccagcgcgtgtgtctggttcaccctgacgtcaagtggggcccggggaagtcgcagatgactcgagccgagtggcaggtggcggaggccacagcgctggtgcacacgctggacggctggtccgtggtgcagacaatggtcgtgtccaccaaaacgccggacaggaagctcatctttggcaaagggaactttgagcacctgacagaaaagatccgagggtctccagacgtcacgtgcgtcttcctgaacgtggagaggatggctgccccgaccaagaaagaactggaagccgcctggggcgtggaggtgtttgaccgcttcacggtcgtcctgcacatcttccgctgtaacgcccgcacgaaggaggcccggcttcaggtggccctggcggagatgccgctgcacaggtcgaacttgaaaagggacgtcgcccacctgtaccgaggagtcggctcgcgctacatcatggggtcaggagaatccttcatgcagctgcagcagcgtctcctgagagagaaggaggccaagatcaggaaggccttggacaggcttcgcaagaagaggcacctgctccgccggcagcggacgaggcgggagttccccgtgatctccgtggtggggtacaccaactgcggaaagaccacgctgatcaaggcactgacgggcgatgccgccatccagccacgggaccagctgtttgccacgctggacgtcacggcccacgcgggcacgctgccctcacgcatgaccgtcctgtacgtggacaccatcggcttcctctcccagctgccgcacggcctcatcgagtccttctccgccaccctggaagacgtggcccactcggatctcatcttgcacgtgagggacgtcagccaccccgaggcggagctccagaaatgcagcgttctgtccacgctgcgtggcctgcagctgcccgccccgctcctggactccatggtggaggttcacaacaaggtggacctcgtgcccgggtacagccccacggaaccgaacgtcgtgcccgtgtctgccctgcggggccacgggctccaggagctgaaagctgagctcgatgcggcggttttgaaggcgacggggagacagatcctcactctccgtgtgaggctcgcaggggcgcagctcagctggctgtataaggaggccacagttcaggaggtggacgtgatccctgaggacggggcggccgacgtgagggtcatcatcagcaactcagcctacggcaaattccggaagctctttccaggatgaacggacgcccacagaggcctgcggggtgggggcatcgctgcctggggagctgaggcgttaccgctgtgttgggggcagcttggtgtcaggtgcagcagggtcctccttgtctggttctgcacccgtctcgctcccagccatttgctgggatgaccgtgcaggccggtgacacggccgcacctgccccaaagcgggccgcccgagcgtccactccaagcctgagcatccacacaattccagtgggccctcggtgcctgctgtgaactgctttccctcggaatgtttccgtaacaggacattaaacctttgattttaaaaaaaaaaaa

SEQ ID NO: 956 - DNA, 1712 bp, Homo sapiens
cgaaatcggctggtttatattggcgcggcccagacggcagaggtctctgcggcgcggtcctcggagacacgcggcggtgtcctgtgttggccatggccgactacctgattagtgggggcacgtcctacgtgccagacgacggactcacagcacagcagctcttcaactgcggagacggcctcacctacaatgactttctcattctccctgggtacatcgacttcactgcagaccaggtggacctgacttctgctctgaccaagaaaatcactcttaagaccccactggtttcctctcccatggacacagtcacagaggctgggatggccatagcaatggcgcttacaggcggtattggcttcatccaccacaactgtacacctgaattccaggccaatgaagttcggaaagtgaagaaatatgaacagggattcatcacagaccctgtggtcctcagccccaaggatcgcgtgcgggatgtttttgaggccaaggcccggcatggtttctgcggtatcccaatcacagacacaggccggatggggagccgcttggtgggcatcatctcctccagggacattgattttctcaaagaggaggaacatgactgtttcttggaagagataatgacaaagagggaagacttggtggtagcccctgcaggcatcacactgaaggaggcaaatgaaattctgcagcgcagcaagaagggaaagttgcccattgtaaatgaagatgatgagcttgtggccatcattgcccggacagacctgaagaagaatcgggactacccactagcctccaaagatgccaagaaacagctgctgtgtggggcagccattggcactcatgaggatgacaagtataggctggacttgctcgcccaggctggtgtggatgtagtggttttggactcttcccagggaaattccatcttccagatcaatatgatcaagtacatcaaagacaaataccctaatctccaagtcattggaggcaatgtggtcactgctgcccaggccaagaacctcattgatgcaggtgtggatgccctgcgggtgggcatgggaagtggctccatctgcattacgcaggaagtgctggcctgtgggcggccccaagcaacagcagtgtacaaggtgtcagagtatgcacggcgctttggtgttccggtcattgctgatggaggaatccaaaatgtgggtcatattgcgaaagccttggcccttggggcctccacagtcatgatgggctctctcctggctgccaccactgaggcccctggtgaatacttcttttccgatgggatccggctaaagaaatatcgcggtatgggttctctcgatgccatggacaagcacctcagcagccagaacagatatttcagtgaagctgacaaaatcaaagtggcccagggagtgtctggtgctgtgcaggacaaagggtcaatccacaaatttgtcccttacctgattgctggcatccaacactcatgccaggacattggtgccaagagcttgacccaagtccgagccatgatgtactctggggagcttaagtttgagaagagaacgtcctcagcccaggtggaaggtggcgtccatagcctccattcgtatgagaagcggcttttctgaaaagggatccagcacacctcctcggtttttttttcaataaaagtttagaaagaaaaaaaaaaaaaaaaaaaaaaa

SEQ ID NO: 957 - DNA, 4469 bp, Homo sapiens
tgcctctgtcactgcagactaatgggacggaggggggtgacttctcagggttcctcctgggcaggtgctccggaaccttttctcagcacgctggcctggggcacggccgttcctcctgcccagccacgttggggtacagggtgaagaagggctggggccagcccaggacagaggaaggcgaggcaggcacgcaggaactgggctttttaaacccttaagcccaaggaaatcgtagcatcgcgggacagggaaaatgaaagactttggaagtcgtcaggaatttgactctgtgagttggtttccaagagtctaagttaagcatctccaagtggatattaaaaaggagcagcaagcctcggggcggcgggggctggaggaggtggagagaggaggctgccggaagccgcactcgggacctctgcagccaccgaccagaccgggcggccgggactctgggactctcgcaggcagacccggtggtctgccggactcctcggggcccacttcgggccctctctcctgcctcctatttttggatttctctcctttgctccctttttcctcccgttttgaagagacaatgctacttcagtttggagcacaaacatatgatcagcacatggaaatgtggtaattcggatgcattcgtgattgcaacagattgaagaaattagaccagacaaagagtgtttttagaggaggaggaggaggaggaggaggctgagagagggagggcgacgggggtgagaaaggggaggccgcctctgagcgggacgccgggactcccgccgctgctaaatatatccgtaggaatggagagggaccggatctcagccttgaaaagatcttttgaggtcgaggaggtcgagacacccaactccaccccaccccggagggtccagactcccctactccgagccactgtggccagctccacccagaaattccaggacctgggcgtgaagaactcagaaccctcggcccgccatgtggactccctaagccaacgctcccccaaggcgtccctgcggagggtggagctctcgggccccaaggcggccgagccggtgtcccggcgcactgagctgtccattgacatctcgtccaagcaggtggagaacgccggggccatcggcccgtcccggttcgggctcaagagggccgaggtgttgggccacaagacgccagaaccggcccctcggaggacggagatcaccatcgtcaaaccccaggagtcagcccaccggaggatggagccccctgcctccaaggtccccgaggtgcccactgcccctgccaccgacgcagcccccaagagggtggagatccagatgcccaagcctgctgaggcgcccaccgcccccagcccagcccagaccttggagaattcagagcctgcccctgtgtctcagctgcagagcaggctggagcccaagccccagccccctgtggctgaggctacaccccggagccaggaggccactgaggcggctcccagctgcgttggcgacatggccgacacccccagagatgccgggctcaagcaggcgcctgcatcacggaacgagaaggccccggtggacttcggctacgtggggattgactccatcctggagcagatgcgccggaaggccatgaagcagggcttcgagttcaacatcatggtggtcgggcagagcggcttgggtaaatccaccttaatcaacaccctcttcaaatccaaaatcagccggaagtcggtgcagcccacctcagaggagcgcatccccaagaccatcgagatcaagtccatcacgcacgatattgaggagaaaggcgtccggatgaagctgacagtgattgacacaccagggttcggggaccacatcaacaacgagaactgctggcagcccatcatgaagttcatcaatgaccagtacgagaaatacctgcaggaggaggtcaacatcaaccgcaagaagcgcatcccggacacccgcgtccactgctgcctctacttcatccccgccaccggccactccctcaggcccctggacatcgagtttatgaaacgcctgagcaaggtggtcaacatcgtccctgtcatcgccaaggcggacacactcaccctggaggagagggtccacttcaaacagcggatcaccgcagacctgctgtccaacggcatcgacgtgtacccccagaaggaatttgatgaggactcggaggaccggctggtgaacgagaagttccgggagatgatcccatttgctgtggtgggcagtgaccacgagtaccaggtcaacggcaagaggatccttgggaggaagaccaagtggggtaccatcgaagttgaaaacaccacacactgtgagtttgcctacctgcgggaccttctcatcaggacgcacatgcagaacatcaaggacatcaccagcagcatccacttcgaggcgtaccgtgtgaagcgcctcaacgagggcagcagcgccatggccaacggcatggaggagaaggagccagaagccccggagatgtagacgccaccctgcccacccccgggatcctgcccccaagtcatttccgtccccccccaggccctcccaccaccccattttattttatatgattttctccatttgtcatcgttccccaccccttcgacatgctgccaggaaacaagggaaggggcctccctccgagtgagtcagtgatgaggccgcggcctccccgaggttgtggggaggctgcactggagccacaggcaggggtgagagcacccactgaattgacatgaccctctgtccccaggcctggctccccgagggctcagaagagcagcttcggtgtgcagatcatccgtctgtgtggggttctcagtgccggaggccttggggtgggggccaggcctcgcacttgcagaggagcccagtgggctgcacgctcccctccatccccatcggccctgtcccctggagtgtgtcagagcccaggggagaatgcagcccaccaggagcacctggaccccctgcccgccacatggtgtggccatcactcagcccctacccctgccctgctcctaagggtagaaaactccagggtcccctgccaccgactgcccagccactccaagccccctggcagctgcccctcctggagcagaaagtgcctttatctcagccatccgcagactgcttggccagatgcggggacaggctggaatgagggaggcgtcttcatctccctgccatccccctctcacgccacccccgcccccaccgggctgcaggtgctgctgatgcgctgggatctgattgaggataaaaaggaaggagagatgacccctaccccctcatcccccagttttgaaaaggtctaagcaagtgagtctggtggaggagctgagggagggagccatggaaggtgccagaaggaaggttggcgggggcacgtgtgggccgtggcttgggctggtcagagtggcgtgagctgcccggcgcctgccctgcccaagtgaccagggaagtgtgtgtgtgtccatgtgtatgcgtgtccgtctgtctgtctagtgtctgggtttggcccaagactgggctgtagttacattaatgcccagccagccacccctgccactcacccctcctggcccaggccttgctgactctctgagctggggaggtgggaggccaggcgagcctgactctgttgatctacccgtgcctgggcccctcccctcagagcccatggtaacgaacccctagaaaggagagaacgggcgtcaggggtgcacagtccacagctgaagagcaaggtttcgtggcagcacggcccggcccctcaccctctgtccccacgaggggacccatgggggctgtctttgcagggcacagatgaccaaagtcccttcctgcttcctgttacctgtcttgctcctggggagaaagaggggcctgatgagactccactcaggtgcacacatcaccaggtgcatctgcaggcaccgggctggctgcttgcagccaggagaaggtcagcgagaaggagtgtatgagtgtgagtgtgtgtgcatggaagttggggcactgggcgtctgactccctccccacccaagagaggaaggacccctcaccacccccactggcgagacagtttactttgccgacttgccatgtttttgccaaaaccaagattttgaaggaaatgagtggccagcgccagggcccaggccatgtggcctgcccagcctcaatgtcacttggtggcggggtggggtgggggtgggcagcagcatcccagccttgagatgcttcactttccttctctgtaaccagactttgaaaaattgttcgtttcatcaggctctgttcctcaatggccttttgctacgtgcctcccgagaaatttgtctttttgtataaatgacaaagtgttgaaaatgtatttcctgaaataaatgtttcaaatgcagaaacccagaaaaaaaaaaaaaa

SEQ ID NO: 958 - DNA, 5029 bp, Homo sapiens
gccgcgggtcctgcgccgcgtccagcccgcccgcccgaccccggcccgaccccggccggccctgcccgcccggccccggggagggatgcggcggcgcggcgcccaggatgccccgcagccccgggacgcgcctcaaacccgccaagtacatcccggtggccacggccgccgcgctgctggtcggctccagcaccctcttcttcgtgttcacgtgcccgtggttgacacgagctgtgtccccagctgttcccgtctacaatggcatcatcttcctctttgtcctggccaacttcagcatggccactttcatggaccctggtgttttcccccgagcggatgaggatgaggacaaggaggacgacttccgggctccgctgtacaagaacgtggatgtgcgaggtatccaggtccgcatgaagtggtgtgccacgtgccacttctaccgcccgccgcgctgctcccactgcagcgtctgtgacaactgtgtagaggactttgaccaccactgcccctgggtcaacaactgcatcgggcgtcgaaactatcgctacttcttcctgttcctgctgtcactcagtgcacacatggtgggcgtcgtggccttcggcctggtctacgtgctgaaccacgctgaggggctgggagccgcgcacaccaccatcaccatggctgtcatgtgtgtggccggcctcttcttcatccctgtcattggcctcactggcttccatgtggtgctggtcactcgggggcgcaccaccaacgagcaggtgactgggaagttccgcgggggtgtgaaccctttcacccgaggctgctgtgggaatgtggagcacgtgctgtgtagccccctggcgccccggtacgtggtggagccaccccggctgccgctcgcggtgagtttgaagccgcctttccttaggcctgaactcctggaccgagctgcaccgctcaaggtcaagcttagtgacaacgggctgaaggctggcctgggccgtagcaagtccaagggcagcctggaccggctggatgagaagccactggacttggggccaccactgccccccaagatagaggctggcacgttcagcagtgacctgcagaccccgcgcccaggcagtgctgagagtgccctgtcggtgcagaggaccagccccccgacacctgccatgtacaagtttaggccggctttccccacgggtcccaaggtgcccttctgtggaccaggcgagcaggttccaggccctgattccctgaccctgggggacgacagcatccgtagcctggactttgtgtccgagccgagcctggacctccctgactatgggccagggggcctgcatgcagcctacccgccatccccaccgctcagcgcctctgatgccttctcgggcgctttgcgctccctgagcctcaaggcctcgagccggcggggcggggatcatgtggccctgcagcccctgcgctctgagggggggccccccacgccccaccgtagcatttttgccccccatgcactgcccaaccgcaacggcagcctgtcctatgacagcctgctcaatcctggctcgcctggtggccacgcctgccctgcccacccagcagttggcgtggccggataccactcaccctacctgcatcctggggcaacgggcgacccgccacggcccctaccccgcagcttcagccccgtgctgggcccccgcccccgggagccctcgcctgtgcgctacgacaacctgtccaggaccatcatggcatccatccaggagcgcaaggacagggaggagcgtgagcgcctgctgcgctcccaggccgactcactcttcggcgactcaggcgtctatgacgctcccagctcctacagcctgcagcaggccagtgtgctgtccgagggcccccgaggtcccgcgctgcgctatggctccagagacgaccttgtggctgggcccggcttcggtggcgcccgcaaccctgccctgcagacgtcactgtcctcgctgtccagctccgtgagccgtgcaccgcggacgtcgtcctcctccctgcaggctgatcaggccagcagcaacgccccggggccccggcccagcagtggctcacacaggtcacctgcacgccagggcctgccctccccgcccggcactccccactcaccatcctacgcgggccccaaagctgtcgccttcatccacacggacctcccagagccaccgccctcgctgaccgtgcagagggaccaccctcagctgaagactcccccaagtaagcttaatgggcagtccccgggcctggcccggctgggacctgccaccggccccccagggccctctgccagccctacacggcacacgctggttaagaaggtgtccggcgtgggtgggaccacctacgagatctcggtgtgaggactgactgccacacatccgccatggtgccacggggaccaggaccccacagcgcaccccccctccccaccaacttctctgccccagggacccgaggccaccccagcctggtgtggacccatcggcgggagagagtgccacgcctccacagcttgccccaagcgctctgcctgcccgtccactcatctgcccatggggaagtcggctcactgggacaagggccactgggctggtctgtgtctgggcctgtcccatggctggggcagtgagggggcccagtcagcctctttggggcaccctctctcagccaggcttggcccactgccatcacccagcaccccagatcaccgccaggccagcccccaatggtccccttacggacaggtcccagagatggacagaggcacccagggcccccaccgtccttctgacacagcctgtgggctcccggaccgagtgtcccccgccaggctactcctaactaacgcgttgcctttcacggaccccgctggaagcttgtagcttggcaaggctgatgcttctgccctggcctgctctgggtggtggtggataggtggacagacggccagccagccagctgtggccgggggcccggctccatgtgtcccgtgtctgtgtgctgtgctgccgcgccgtgtctgatgtgtcagtgctccggccgccgctgtccctttcatcaaagccttaacctttgctttatgctcttgtgggaggcgacgggggggcaggcgggagcaggcacgggggtgatgctgccacagggggctggtgacacccagagccccctccccagccctcaggccctccctgccaaactggagaaccccaccccaaggcatgccacgtccgcagccccggcctggctgcggtgctcgcgccgtgggaaagcacactggggaggggtcagtgcttcccttggtgtcagggacctgagagtaagcacatgacagcgtctgcttgcgttgtgtctgttttatgtttttatatctacatctatatatctataattttattaaaaaaaagaaaaagagttattttgattctttccttgggcaaggccagggctattgctgcaggatcccgagttaggggagggcaggggccgggccccagaagagggagtggctgctgtctggtgtgcaggggtcggtgggttcctcaggggcatttctgccgacttgggctgagtcagaggcttgggaagagggggcggccgatggtctgtggctgggaagtgtgagggtctctcgccttgggtctgtgtcagttctggcagtgacagggtgtttgggggaaagacttgggtctgccgctacccacaggggactctcaggaacccgagagcttggggagatgaaatgggggtgcataggggccacctgttggctcagggccctgtgggggccgctgaacctgctggaactctcctgcctgccacatgccaggggcagggctgagggagtgtgagggatgcacagctgttcagggctgagacattctgggctggggctgtcccagcgtgggaggcgtgcgggctgtagggccccgaagctgacctccacctttctgcttctctctcacggacgccgcggcccgcagggggcggattggcacctgcacccgtggatgggggcggcgtggccagccttgggtgcctcctgggctgcacctgtgccaccttggccgcccggaggaccgcccaccactgcgggccccctggagccaggccgccggggcacccccacgcggggccatgtgccgcctgcacttggctgcctccagtcttttccccagcctctcggggccctagcaggatgacaagtaggcggctctggggcccaggacagcccagctggggacccaggaggtcagactgcagtggaccctggggcagggctgggggtgggctgggctctctgctccaccagccacagcttgacagattcccagcctgccagggcctgagaccctgtgtccacatgacctcagggagtcccccacctgctgcagggggtccagcaccccacaggggggcagtcccagagctgtggggaccggcacgacctttgcccagcctccctacccaaccaagcactttagactaagccacttcctcctcggggagcccaggcctccgtgggttgggctgggtggggggggggtctcaggttgcccctgaaggtctctgcactcctcctgcccttcccctgacacatgaacagatgccttaacttcctggagccaccagcctggtgagccattggcctctgcctgccaccaaggtcctgtggtcttggccagctccgcctgggccccactggggctgcctgcacccagagacgatgccggcgggatctcagagggcctgaggcccaagccctgtgtcctccagcagtggtacggcctgcggcagggtggcactccggccagcccttctccgtcacagggtccctgtccctgggtccaccctgggctgtggctctacatctcccatttggggacgagaaagccacaaaaccattctctattgttcttaagggtacccctgctaattaattccccaaataaaatttttggtgttgatcaaaaaaaaaaaaaaaaaa

SEQ ID NO: 959 - DNA, 2688 bp, Homo sapiens
gcggaggcaaggcgggtgcagggcttctggggacggagggaggtgccagaagttgagccctgaggccctgctggcccctgggcgcaggcccagctcaggcccccagggatggacgtcgtggaccctgacattttcaatagagacccccgggaccactatgacctgctacagcggctgggtggcggcacgtatggggaagtctttaaggctcgagacaaggtgtcaggggacctggtggcactgaagatggtgaagatggagcctgatgatgatgtctccacccttcagaaggaaatcctcatattgaaaacttgccggcacgccaacatcgtggcctaccatgggagttatctctggttgcagaaactctggatctgcatggaattctgtggggctggttctctccaggacatctaccaagtgacaggctccctgtcagagctccagattagctatgtctgccgggaagtgctccagggactggcctatttgcactcacagaagaagatacacagggacatcaagggagctaacatcctcatcaatgatgctggggaggtcagattggctgactttggcatctcggcccagattggggctacactggccagacgcctctctttcattgggacaccctactggatggctccggaagtggcagctgtggccctgaagggaggatacaatgagctgtgtgacatctggtccctgggcatcacggccatcgaactggccgagctacagccaccgctctttgatgtgcaccctctcagagttctcttcctcatgaccaagagtggctaccagcctccccgactgaaggaaaaaggcaaatggtcggctgccttccacaacttcatcaaagtcactctgactaagagtcccaagaaacgacccagcgccaccaagatgctcagtcatcaactggtatcccagcctgggctgaatcgaggcctgatcctggatcttcttgacaaactgaagaatcccgggaaaggaccctccattggggacattgaggatgaggagcccgagctaccccctgctatccctcggcggatcagatccacccaccgctccagctctctggggatcccagatgcagactgctgtcggcggcacatggagttcaggaagctccgaggaatggagaccagacccccagccaacaccgctcgcctacagcctcctcgagacctcaggagcagcagccccaggaagcaactgtcagagtcgtctgacgatgactatgacgacgtggacatccccacccctgcagaggacacacctcctccacttccccccaagcccaagttccgttctccatcagacgagggtcctgggagcatgggggatgatgggcagctgagcccgggggtgctggtccggtgtgccagtgggcccccaccaaacagcccccgtcctgggcctcccccatccaccagcagcccccacctcaccgcccattcagaaccctcactctggaacccaccctcccgggagcttgacaagcccccacttctgccccccaagaaggaaaagatgaagagaaagggatgtgcccttctcgtaaagttgttcaatggctgccccctccggatccacagcacggccgcctggacacatccctccaccaaggaccagcacctgctcctgggggcagaggaaggcatcttcatcctgaaccggaatgaccaggaggccacgctggaaatgctctttcctagccggactacgtgggtgtactccatcaacaacgttctcatgtctctctcaggaaagaccccccacctgtattctcatagcatccttggcctgctggaacggaaagagaccagagcaggaaaccccatcgctcacattagcccccaccgcctactggcaaggaagaacatggtttccaccaagatccaggacaccaaaggctgccgggcgtgctgtgtggcggagggtgcgagctctgggggcccgttcctgtgcggtgcattggagacgtccgttgtcctgcttcagtggtaccagcccatgaacaaattcctgcttgtccggcaggtgctgttcccactgccgacgcctctgtccgtgttcgcgctgctgaccgggccaggctctgagctgcccgctgtgtgcatcggcgtgagccccgggcggccggggaagtcggtgctcttccacacggtgcgctttggcgcgctctcttgctggctgggcgagatgagcaccgagcacaggggacccgtgcaggtgacccaggtagaggaagatatggtgatggtgttgatggatggctctgtgaagctggtgaccccggaggggtccccagtccggggacttcgcacacctgagatccccatgaccgaagcggtggaggccgtggctatggttggaggtcagcttcaggccttctggaagcatggagtgcaggtgtgggctctaggctcggatcagctgctacaggagctgagagaccctaccctcactttccgtctgcttggctcccccaggcctgtagtggtggagacacgcccagtggatgatcctactgctcccagcaacctctacatccaggaatgagtccctaggggggtgtcaggaactagtccttgcaccccctcccccatagacacactagtggtcatggcatgtcctcatctcccaataaacatgactttagcctctgcaaaaaaa

SEQ ID NO: 960 - DNA, 502 bp, Homo sapiens
agattccgtcgcttcttccggagccgtacgtggcaccgccccgctcgcgggcggccgcggggcttgctgggaagagaggcgaagccaggtcacctttcaaggacccagaagtagggttttggcctaggtaacggggcagagatgtggttcgagattctccccggactctccgtcatgggcgtgtgcttgttgattccaggactggctactgcgtacatccacaggttcactaacgggggcaaggaaaaaagggttgctcattttgggtatcactggagtctgatggaaagagataggcgcatctctggagttgatcgttactatgtgtcaaagggtttggagaacattgattaaggaagcattttcctgattgatgaaaaaaataactcagttatggccatctacccctgctagaaggttacagtgtattatgtagcatgcaatgtgttatgtagtgcttaataaaaataaaatgaaaaaaatgcaaaaaaaaaaaaaaaaa

SEQ ID NO: 961 - DNA, 2259 bp, Homo sapiens
acttcctggccggccccggaaaccagcaggcgttggggaggggtggcgggggaatagcggcggcagcagccccagccctcagagagacagcagaaagggagggagggagggtgctggggggacagccccccaccattcctaccgctatgggcccaacctcccactcccacctcccctccatcggccggggctaggacacccccaaatcccgtcgcccccttggcaccgacaccccgacagagacagagacacagccatccgccaccaccgctgccgcagcctggctggggagggggccagccccccaggccccctacccctctgaggtggccagaatggatttgtggccaggggcatggatgctgctgctgctgctcttcctgctgctgctcttcctgctgcccaccctgtggttctgcagccccagtgccaagtacttcttcaagatggccttctacaatggctggatcctcttcctggctgtgctcgccatccctgtgtgtgccgtgcgaggacgcaacgtcgagaacatgaagatcttgcgtctaatgctgctccacatcaaatacctgtacgggatccgagtggaggtgcgaggggctcaccacttccctccctcgcagccctatgttgttgtctccaaccaccagagctctctcgatctgcttgggatgatggaggtactgccaggccgctgtgtgcccattgccaagcgcgagctactgtgggctggctctgccgggctggcctgctggctggcaggagtcatcttcatcgaccggaagcgcacgggggatgccatcagtgtcatgtctgaggtcgcccagaccctgctcacccaggacgtgagggtctgggtgtttcctgagggaacgagaaaccacaatggctccatgctgcccttcaaacgtggcgccttccatcttgcagtgcaggcccaggttcccattgtccccatagtcatgtcctcctaccaagacttctactgcaagaaggagcgtcgcttcacctcgggacaatgtcaggtgcgggtgctgcccccagtgcccacggaagggctgacaccagatgacgtcccagctctggctgacagagtccggcactccatgctcactgttttccgggaaatctccactgatggccggggtggtggtgactatctgaagaagcctgggggcggtgggtgaaccctggctctgagctctcctcccatctgtccccatcttcctccccacacctacccacccagtgggccctgaagcagggccaaaccctcttccttgtctcccctctccccacttattctcctctttggaatcttcaacttctgaagtgaatgtggatacagcgccactcctgccccctcttggccccatccatggactcttgcctcggtgcagtctccactcttgacccccacctcctactgtcttgtctgtgggacagttgcctccccctcatctccagtgactcagcctacacaagggaggggaacattccatccccagtggagtctcttcctatgtggtcttctctacccctctaccccacattggccagtggactcatccattctttggaacaaatcccccccactccaaagtccatggattcaatggactcatccatttgtgaggaggacttctcgccctctggctggaagctgatacctgaagcactcccaggctcatcatgggagctttcctcagcaccttcaccttccctcccagtgtagcctcctgtcagtgggggctggacccttctaattcagaggtctcatgcctgcccttgcccagatgcccagggtcgtgcactctctgggataccagttcagtctccacatttctggttttctgtccccatagtacagttcttcagtggacatgaccccacccagccccctgcagccctgctgcaccatctcaccagacacaaggggaagaagcagacatcaggtgctgcactcacttctgccccctggggagttggggaaaggaacgaaccctggctggaggggataggagggcttttaatttatttctttttctgttgaggcttccccctctctgagccagttttcatttcttcctggtggcattagccactccctgcctctcactccagacctgttcccacaactggggaggtaggctgggagcaaaaggagagggtgggacccagttttgcgtggttggtttttattaattatctggataacagcaaaaaaactgaaaataaagagagagagagatctgggaa

SEQ ID NO: 962 - DNA, 2758 bp, Homo sapiens
agcagctcttaaagctttggattcggctgtcgtggagataacgggcaccagaaaaacttgtaggagtagcaacagctatttggtcggatggaggccagaagccaagaataatcgaaacacgctgccagcgcccattagatggatgggaaatgagtgtaactcattgggaaagatattagacttcaaatcacctaaggcaaaccctacttcctggggcgcgggcgcgggcgctggcgttaggagacgtcactcccgcgcataactgacatggggccctcttggtcggcgtttccgggcgggtccttccgacggccgccgcggtgattccatcactcggctttcttcccggcctgcctcgcgcccgtagccgggctgggccagaacagcccaagatggccgacttcgatgatcgtgtgtcggatgaggagaaggtacgcatagctgctaaattcatcactcatgcacccccaggggaatttaatgaagtattcaatgacgttcggctactacttaataatgacaatctcctcagggaaggggcagcacatgcatttgcccagtataacatggatcagttcacgcctgtgaagatagaaggatatgaagatcaggtcttaattacagagcacggtgacctgggtaatagcagatttttagatccaagaaacaaaatttcctttaaatttgaccacttacggaaagaagcaagtgacccccagccagaagaagcagatggaggtctgaagtcttggagagaatcctgtgacagtgctttaagagcctatgtgaaagaccattattccaacggcttctgtactgtttatgctaaaactatcgatgggcaacagactattattgcatgtattgaaagccaccagtttcagcctaaaaacttctggaatggtcgttggagatcagagtggaagttcaccatcacaccacctacagcccaggtggttggcgtgcttaagattcaggttcactattatgaagatggcaatgttcagttggttagtcataaagatgtacaggattcactaactgtttcgaatgaagcccaaactgccaaggagtttattaaaatcatagagaatgcagaaaatgagtatcagacagcaattagtgaaaactatcaaacaatgtcagataccacattcaaggccttgcgccggcagcttccagttacccgcaccaaaatcgactggaacaagatactcagctacaagattggcaaagaaatgcagaatgcttaaaggctgaatgtaggattcttcagtatgtggaaagacaaggattcaacgtgtggtcatatgataaataagtgatttataaacaagagtgatattttgctagggctttcaaagttaaccggttttctagcctcatggaatactgttgaacctatagcgttgtcttgattcttttgtgttctctgccttgtaattttctgttactgctatatctacgtgtaaatctttttttctttttttttttttttttttggttaattctgccacatttaatgttggtgagagagtgatctatcctaatgacattttactgtttaaaaaagtttcctagccatgaagccctgctactgatttagacaaggtattatggtcattactttgtacccctatccttccaagcacttctggtacttcagtcgtttttactgatccaccaacacctaaagaggctatgctacagtctctagctaaatggaagacacattcatccttctccctctgactgctttgatcatcatttattgcatctcataactaattttctaaagtttggattgggacttttcaggtcctttttggagggcaaaggaagtgccagcttctctggggaacttgtttttaaatccaaagacttgaaccacattccctgcacatgaacatgtttgcttttatcccttctctcattgtctccttcccatcttagtaccattgtagttataaacatctgcattttttagaagcattttacccatttatttttttaaacattcaagaactgctgacgtactgtggatgtagagtataaaacttgaaaaatgcagatgttgaaggaataataggtatcttgtgctttaatactttatggcaggattgtactataagcaaatgaattaaacagctatgtaaatcataaagaaaaactaaaaatgaaccaaagtgaaaggataacttccaggcagtatctttctattgtaacctgttatttaaggaaatactagtgatttcttctaaataggatgtaaaacttctttcaaattactcttcctcagtcctgcctgccaagaactcaagtgtaactgtgataaaataacctttcccaggtatattggcaggtatgtgtgtaatctcagaatacacaggtgacatagatatgatatgacaactggtaatggtggattcatttacattgtttacacttctatgaccaggccttaagggaaggtcagttttttaaaaaaccaagtagtgtcttcctacctatctccagatacatgtcaaaaaaagaaaggtgtttgtgcttccgttttgtttctgctcagtaatatagtcaagcaagtttgttccaggtgacccattgagctgtgtatgcatttttgtttatttcaataaaatatatttgtattatttgtccttcatactatccatccataccacactatcttctgtatcaggtagtctaatagaaatatacctgttttgttctaaaattgaaaaaaaaaaaaaaaaaa

SEQ ID NO: 963 - DNA, 133 bp, Homo sapiens
ggtctctcagctccgcttaaccacacgggtccagtgtgtgcttggcgtgttttcagggaggcagagaaaggctctcctaatgcacgacagacccgcccagaatggcctctctgttcctaggagtgcgacaatt

SEQ ID NO: 964 - DNA, 1276 bp, Homo sapiens
ctgcgctggggttggagtggccgcaacgggcggggcggggcggggccgggcaagtttgttccccgagttcggagcctaggagccccccgcggctgcggcgcaggtgccctcggcctgagtcgggatggagctgcctgctgtgaacctgaaggtgattctcctaggtcactggctgctgacaacctgcttctggagacatttctctgccaaaccaagactggaaaccattgagctcacctgtgcactttgcaaacttcgaagtgcagcgcacagggcaacagctgggctgcattgtattctcaggctcctatgcctgggccaacttcaccatcctggccttgggcgtgtgggctgtggctcagcgggactccatcgacgccataagcatgtttctgggtggcttgctggccaccatcttcctggacatcgtgcacatcagcatcttctacccgcgggtcagcctcacggacacgggccgctttggcgtgggcatggccatcctcagcttgctgctcaagccgctctcctgctgcttcgtctaccacatgtaccgggagcgcgggggtttccttgggtcttctcaggaccgtagtgcctaccagacgattgactcagcagaggcgcccgcagatccctttgcagtcccagagggcaggagtcaagatgcccgagggtactgaagccagccacgctgcgcccggccctgccccgggccttcctcgtgcctgggaggtcgttctagggatgctcctgacctccgtctcttggacctaagatggaatgtgtccccagctcagggattgcctgaaccaagaggccaggagcccccatgggccgcccagtaccatgcacactcctgtcccgaactccctgaggcctcccctcccttcagggcacccactggttcccaggctggaaccagggtctctctttacctcctaccccatggtggcaccacagaggccctcagccgagtcctgcctgagtgttgcaagctcaggcctttaaggactgctgatgccccctcaggcctcccccaagtttgctgggctttggtggaagccctgagagcttcaggtcctgctcagcccgaggagcagtctggcatgggagtgaggccccgtccttctcactgcctggtcacatggtgcctagggatgcagggctggaggccagaggtgtcagcaacactgtgtcccaccacaacctccagcctcccttttcagagcacagcattaaagtttggggaattctgtagaaaaaaaaaaaaaaaaaa

SEQ ID NO: 965 - DNA, 3533 bp, Homo sapiens
atagaggcggggctgcggcggctgcggtgttcctccgacttccggacatctccctgggagtcgcgcagagtggagtcaaaggcaaccagtgctcgctgcggtctctggggatcgggaccgcggcggcggcccgcgagcgggatgttccggggcttgagcagttggttgggcttgcagcagccggtggcaggcggtgggcagcccaatggagatgctccacccgagcagccgtccgagacggtggctgagtctgcggaggaggagctgcagcaagcgggagaccaggagctcctccaccaggccaaagacttcggcaactatttatttaactttgcatctgctgccacaaaaaagataactgaatcagttgctgaaacagcacaaacaataaagaaatccgtagaagaaggaaaaatagatggcatcattgacaagacaattataggagattttcagaaggaacagaaaaaatttgttgaagagcaacatacaaagaagtcagaagcagctgtgcccccatgggttgacactaacgatgaagaaacaattcaacaacaaattttggccttatcagctgacaagaggaatttccttcgtgaccctccggctggcgtgcaatttaatttcgactttgatcagatgtaccccgtggccctggtcatgctccaggaggatgagctgctaagcaagatgagatttgccctcgttcctaaacttgtgaaggaagaagtgttctggaggaactacttttaccgcgtctccctgattaagcagtcagcccagctcacggccctggctgcccaacagcaggccgcagggaaggaggagaagagcaatggcagagagcaagatttgccgctggcagaggcagtacggcccaaaacgccacccgttgtaatcaaatctcagcttaaaactcaagaggatgaggaagaaatttctactagcccaggtgtttctgagtttgtcagtgatgccttcgatgcctgtaacctaaatcaggaagatctaaggaaagaaatggagcaactagtgcttgacaaaaagcaagaggagacagccgtactggaagaggattctgcagattgggaaaaagaactgcagcaggaacttcaagaatatgaagtggtgacagaatctgaaaaacgagatgaaaactgggataaggaaatagagaaaatgcttcaagaggaaaattagctgttcctgaaatagaagaataatccttaacagtctgcaaactgacattaaattctagatgttgacaattactgaatcagaaggcatgaaagagtataattttatgaaattcaaaattattcttttttcaagttgaaacttgcctcttctactttaaaaaagtatatagaacagttacttctaataatcagaaagagatgttttatagaacatttctttaatataaagttagagatgtcttcataggcagtatggctatctttgccacagaaacataagtaaaattttagagttctgttttccatgaggtcaaaaatataatttattcctcagtcatggttttctaaatatctgtactccacattccattttaattgatatgagggtgttaaagtacctacttaatgggttgattactatcaaaatgaccaaattataccaaagaacttaagaggaagcactttcagaactattcacttgccaggtattttctaaaattccacctgaaagccaaaagataaaataaataagttgattttaatgatataagcatcacacaattttacattaagaaatactgtgcaggccatgcgtggtggctcaggcctgtaatcccagcactttgggaggccgaggtgggcagatcaccggaggtcaggagttcgagaccagccttgccaacatagtgaaaccctgtctctactaaaaatacaaaaattagccgggcatggtggcaggcacctgtaatcccagctactagggaggcttttgaacccaggaggcagaggttgcagcgagctgagatcgcgccactgcactccagcctgggtgatagagtgagattcagtctcaaaaaaaaaaaaaaaaaaaagctgtgcgaaaatatttgtttttctctggggccttttctttcttttctttttaaactataccagaaattttacatcacagtttttatacaaagtgggaccttccatactttttgtattacaataaccttcagaagcccattccccttaaagtctgttgttcttgttttaatcatcaccacatataaatgttttagctttgtcttaaactgtgagtcttcataaaattgtgttcctccgagttcaccttctaggactttattgattaatccttctctttctgctataccagcagacacatattcatagaatatgattatttttaaagaacaaggtgaggaggctgaggcaggagaattgcttgaacctgggagatggaggttgcagtgagctgagatcacgccactgcactccagcctgggtgacagagtgagagactccgtctcaaaaatgaatgaatgaatgaatgaatgaatgaacgaacgaacaaggtggtttaatgtcagaaaacttcctaagcatttgctccccaaacctttcatgtttttcaagaagcctttattacataaaggggaatagaattaaaatgtttctttataagaaaaatatacatatttgtgttcttggccccattaaaactagtcagtagtcctttggcaaagatatagtcaacaagagaactgggtatgagtccaggcattactcctgttcatagttgtggatgcatgtgtctgagccagactgtctcaactggagtctcttgggttatagcagtaaacccgtgtattccatgaaaccactgggcccatcatcaaaaggtttccacttgtggtgccacagttgcttattactgagtttgggttccaagatgactggcaacttctgaaataatctcattgaaggaaagagtttcattttttttttaaaagagtttgctggaggaaaagaagcatgttaaatgtttttaagcagctaaaagtcctagatggaagcatatcaggatgtgtcggtgcttggctcttagtgaatgcactaaaattcttattgataaatgttgaataaacacacacaaaaaagtatcagagaaagagaaaaaccctacaatggcaatagaggtgtgtgacagttattgctatcaattttacataatatctcatttaaaaacaacctaattatgcattgcctgtgaaaataaaaggataaaataagattttgtacatactgtaagaatacagttgtgctgtatttttatggattcatcaaggagtaaaatgttctgctttagtaaattatataggtaactgaagtgttattcctttaaagagcaaaataatttatcaccatgtttggtggaaaatttctaagtatttattacatgcctaggggttagccaacaagatataccaagcatgaaaacctgtaaaacttaataaaatgctaaaatatgaacatcacaaaaaaaaa

SEQ ID NO: 966 - DNA, 3812 bp, Homo sapiens; identical to SEQ ID NO: 699

SEQ ID NO: 967 - DNA, 3196 bp, Homo sapiens
ctctacccggttggcaggcggcctggcccagccccttctctaaggaagcgcatttcctgcctccctgggccggccgggctggatgagccgggagctccctgctgccggtcataccacagccttcatctgcgccctggggccaggactgctgctgtcactgccatccattggagcccagcaccccctccccgcccatccttcggacagcaactccagcccagccccgcgtccctgtgtccacttctcctgacccctcggccgccaccccagaaggctggagcagggacgccgtcgctccggccgcctgctcccctcgggtccccgtgcgagcccacgccggccccggtgcccgcccgcagccctgccactggacacaggataaggcccagcgcacaggcccccacgtggacagcatggaccgcggcacgctccctctggctgttgccctgctgctggccagctgcagcctcagccccacaagtcttgcagaaacagtccattgtgaccttcagcctgtgggccccgagaggggcgaggtgacatataccactagccaggtctcgaagggctgcgtggctcaggcccccaatgccatccttgaagtccatgtcctcttcctggagttcccaacgggcccgtcacagctggagctgactctccaggcatccaagcaaaatggcacctggccccgagaggtgcttctggtcctcagtgtaaacagcagtgtcttcctgcatctccaggccctgggaatcccactgcacttggcctacaattccagcctggtcaccttccaagagcccccgggggtcaacaccacagagctgccatccttccccaagacccagatccttgagtgggcagctgagaggggccccatcacctctgctgctgagctgaatgacccccagagcatcctcctccgactgggccaagcccaggggtcactgtccttctgcatgctggaagccagccaggacatgggccgcacgctcgagtggcggccgcgtactccagccttggtccggggctgccacttggaaggcgtggccggccacaaggaggcgcacatcctgagggtcctgccgggccactcggccgggccccggacggtgacggtgaaggtggaactgagctgcgcacccggggatctcgatgccgtcctcatcctgcagggtcccccctacgtgtcctggctcatcgacgccaaccacaacatgcagatctggaccactggagaatactccttcaagatctttccagagaaaaacattcgtggcttcaagctcccagacacacctcaaggcctcctgggggaggcccggatgctcaatgccagcattgtggcatccttcgtggagctaccgctggccagcattgtctcacttcatgcctccagctgcggtggtaggctgcagacctcacccgcaccgatccagaccactcctcccaaggacacttgtagcccggagctgctcatgtccttgatccagacaaagtgtgccgacgacgccatgaccctggtactaaagaaagagcttgttgcgcatttgaagtgcaccatcacgggcctgaccttctgggaccccagctgtgaggcagaggacaggggtgacaagtttgtcttgcgcagtgcttactccagctgtggcatgcaggtgtcagcaagtatgatcagcaatgaggcggtggtcaatatcctgtcgagctcatcaccacagcggaaaaaggtgcactgcctcaacatggacagcctctctttccagctgggcctctacctcagcccacacttcctccaggcctccaacaccatcgagccggggcagcagagctttgtgcaggtcagagtgtccccatccgtctccgagttcctgctccagttagacagctgccacctggacttggggcctgagggaggcaccgtggaactcatccagggccgggcggccaagggcaactgtgtgagcctgctgtccccaagccccgagggtgacccgcgcttcagcttcctcctccacttctacacagtacccatacccaaaaccggcaccctcagctgcacggtagccctgcgtcccaagaccgggtctcaagaccaggaagtccataggactgtcttcatgcgcttgaacatcatcagccctgacctgtctggttgcacaagcaaaggcctcgtcctgcccgccgtgctgggcatcacctttggtgccttcctcatcggggccctgctcactgctgcactctggtacatctactcgcacacgcgtgagtaccccaggcccccacagtgagcatgccgggcccctccatccacccgggggagcccagtgaagcctctgagggattgaggggccctggccaggaccctgacctccgcccctgcccccgctcccgctcccaggttcccccagcaagcgggagcccgtggtggcggtggctgccccggcctcctcggagagcagcagcaccaaccacagcatcgggagcacccagagcaccccctgctccaccagcagcatggcatagccccggccccccgcgctcgcccagcaggagagactgagcagccgccagctgggagcactggtgtgaactcaccctgggagccagtcctccactcgacccagaatggagcctgctctccgcgcctacccttcccgcctccctctcagaggcctgctgccagtgcagccactggcttggaacaccttggggtccctccaccccacagaaccttcaacccagtgggtctgggatatggctgcccaggagacagaccacttgccacgctgttgtaaaaacccaagtccctgtcatttgaacctggatccagcactggtgaactgagctgggcaggaagggagaacttgaaacagattcaggccagcccagccaggccaacagcacctccccgctgggaagagaagagggcccagcccagagccacctggatctatccctgcggcctccacacctgaacttgcctaactaactggcaggggagacaggagcctagcggagcccagcctgggagcccagagggtggcaagaacagtgggcgttgggagcctagctcctgccacatggagccccctctgccggtcgggcagccagcagagggggagtagccaagctgcttgtcctgggcctgcccctgtgtattcaccaccaataaatcagaccatgaaaccagtga

SEQ ID NO: 968 - DNA, 2136 bp, Homo sapiens
gccctggaggcccggcctggccgctcccggccctggggtgcacatcggccctgagtcccgtcccaggctctgggctcgggcagccgccgccaccgctgcccaggacgtcgggcctcctgccttcctcccaggcccccacgttgctggccgcctggccgagtggccgccatgctcctgccttgggccacctctgcccccggcctggcctgggggcctctggtgctgggcctcttcgggctcctggcagcatcgcagccccaggcggtgcctccatatgcgtcggagaaccagacctgcagggaccaggaaaaggaatactatgagccccagcaccgcatctgctgctcccgctgcccgccaggcacctatgtctcagctaaatgtagccgcatccgggacacagtttgtgccacatgtgccgagaattcctacaacgagcactggaactacctgaccatctgccagctgtgccgcccctgtgacccagtgatgggcctcgaggagattgccccctgcacaagcaaacggaagacccagtgccgctgccagccgggaatgttctgtgctgcctgggccctcgagtgtacacactgcgagctactttctgactgcccgcctggcactgaagccgagctcaaagatgaagttgggaagggtaacaaccactgcgtcccctgcaaggcagggcacttccagaatacctcctcccccagcgcccgctgccagccccacaccaggtgtgagaaccaaggtctggtggaggcagctccaggcactgcccagtccgacacaacctgcaaaaatccattagagccactgcccccagagatgtcaggaaccatgctgatgctggccgttctgctgccactggccttctttctgctccttgccaccgtcttctcctgcatctggaagagccacccttctctctgcaggaaactgggatcgctgctcaagaggcgtccgcagggagagggacccaatcctgtagctggaagctgggagcctccgaaggcccatccatacttccctgacttggtacagccactgctacccatttctggagatgtttccccagtatccactgggctccccgcagccccagttttggaggcaggggtgccgcaacagcagagtcctctggacctgaccagggagccgcagttggaacccggggagcagagccaggtggcccacggtaccaatggcattcatgtcaccggcgggtctatgactatcactggcaacatctacatctacaatggaccagtactggggggaccaccgggtcctggagacctcccagctacccccgaacctccataccccattcccgaagagggggaccctggccctcccgggctctctacaccccaccaggaagatggcaaggcttggcacctagcggagacagagcactgtggtgccacaccctctaacaggggcccaaggaaccaatttatcacccatgactgacggagtctgagaaaaggcagaagaaggggggcacaagggcactttctcccttgaggctgccctgcccacgtgggattcacaggggcctgagtagggcccggggaagcagagccctaagggattaaggctcagacacctctgagagcaggtgggcactggctgggtacggtgccctccacaggactctccctactgcctgagcaaacctgaggcctcccggcagacccacccaccccctggggctgctcagcctcaggcacggacagggcacatgataccaactgctgcccactacggcacgccgcaccggagcacggcaccgagggagccgccacacggtcacctgcaaggacgtcacgggcccctctaaaggattcgtggtgctcatccccaagcttcagagaccctttggggttccacacttcacgtggactgaggtagaccctgcatgaagatgaaattatagggaggacgctccttccctcccctcctagaggagaggaaagggagtcattaacaactagggggttgggtaggattcctaggtatggggaagagttttggaaggggaggaaaatggcaagtgtatttatattgtaaccacatgcaaataaaaagaatgggacctaaactcgtgccgctcgtgccgaattcctgcag

SEQ ID NO: 969 - DNA, 2671 bp, Homo sapiens
ctgcgcgcgggcgggcgggctatggcgcaggcgggttgtggggccggcgctggtggcggggcccggtgcatggcggtctgtcggcggagtcgccctcgggggctgtcagatttgtgacccagaaggaaatctctgacctcagctgtggctcttggtgctggccagaagccaacttcatgtctgagtgcacgagcagcagtttgccatggagagcttggggctgcacacggtgacccttagtgatgggacaacagcctacgtccagcaagctgtcaaaggagagaagcttcttgaagggcaggtgatccagctcgaggatgggaccaccgcatacattcaccaggtgacggtacagaaagaagctctctcctttgaggatggtcagcctgtgcagctggaagatggcagcatggcttacatacaccgcacacccagagaaggctatgaccccagcaccctggaagccgtccaactggaagatggctccactgcctacattcaccaccctgtggctgtgccatcggagagcaccatcctggccgtacagacagaggtgggcttggaggacctggcagcagaggatgatgagggcttcagtgcagacgcagtggtggccctggagcagtatgccagcaaggttcttcatgacagccagattccccgtaatggaaaagggcagcaagttggagacagagcattccgctgtggctacaagggctgtgggcgtctctacaccaccgctcatcacttaaaggtgcatgaacgagctcatacaggtgaccgtccatacagatgtgacttccccagctgtggaaaggcctttgccacaggctatggactgaagagccacgttcgtacccacactggtgagaaaccatacaagtgcccagaggagctgtgcagcaaggccttcaagacctcaggagacctgcagaagcatgtccgtacccacactggtgaacgcccgttccagtgcccttttgagggctgtggccgctccttcaccacatctaacatccgcaaggtacatgtgcgcacccacacaggcgagaggccctacacctgcccggagccccactgtggccgcggcttcaccagcgccaccaactataagaatcacgtgcgcatccacacaggggagaagccatacgtttgcacggtgccaggctgcgggaaacgcttcaccgagtactcgagcttgtataagcaccacgtggtgcacacacactgcaagccctacacctgcagcacctgcggcaagacctaccggcagacctccaccttggccatgcacaagcgcagtgcccatggcgagctggaggccacggaggagagtgagcaggccctctatgagcagcagcaacttgaggccgcctctgcagccgaggagagtccgccacccaaacgaccccggatagcttacctttcggaggtgaaggaagagagagatgacatcccagcccaggtggcgatggtgactgaagaagatggggccccccaggtggctctgatcactcaggatggtgcccagcaggtcagcctgtccccggaagacctgcaggccctggggagtgccatcagtatggtcacccagcacggcagcaccaccctcaccatccccagtcctgatgccgacctggccacatctggcacacatacagtcaccatggtcagcgccgatggcacccagacgcagcccgtcacaatcattacctctggggctgtggtggctgaggactcaagtgtagcatctcttcgtcatcaacaggtggcactgttggccacagccaacggaacgcacattgcagtgcagctggaggaacagcagaccttagaggaggccatcaatgtggccactgcggccatgcagcaaggggctgtgaccctggagacaacagtgtcggagagtggctgctgagtccaagagggctgggtcccacaccatgctggaggaagtgccatctgcatggccactcttgcccccaagggcccaggctgtggctgacacatagaaggtggccacataggtctctggggtgagaagacagcaagaaaactgcctaactgaagggaatgggggccctgctcaagaagggggccaggcagctggaatcaggggagtgcatcatcctcgggagctgacaacagccaggctacaccagggcacccgcctctcaaaatcagctgggcgcccactctcctcctaaagaacacccttctggccctcagtctgttccccttctcaggtagagattggggctgctatggggactggccctgtagggttgagccacagacagctcttcagcccagtagcagtggagcaggccctgtcctgccctcccagcaataaccacctccctggaggccagctgagatgcctggctacttggcaccagggacttcctgacaccacagtcaattaattcctcaggggcctgtggctggagaaaaggtgcccagcccccaccactcctcagctgccccccaacctctctatggcagagaggcagggagtggccctgtacatagactgctggggattgggtttgatttgttttgtttttttaaattccattttgataatttttttcctgctctgggtggtggtggcacatggatgaatgagtatttaataaaagttccaaatttcaaaaaaaaaaaaaaaaaa

SEQ ID NO: 970 - DNA, 609 bp, Homo sapiens
atgaggaacttgaggcaagtcaccagcccctgatcatttcgcctaaaagagcaaggactagagttcctgacctccaggccagtccctgatccctgacctaatgttatcgcggaatgatgatatatgtatctacgggggcctggggctgggcgggctcctgcttctggcagtggtccttctgtccgcctgcctgtgttggctgcatcgaagaggcccagggctcctcagagcaggaactccactatgcatctctgcagaggctgccagtgcccagcagtgagggacctgacctcaggggcagagacaagagaggcaccaaggaggatccaagagctgactatgcctgcattgctgagaacaaacccacctgagcaccccagacaccttcctcaacccaggcgggtggacagggtccccctgtggtccagccagtaaaaaccatggtccccccacttctgtgtctcagtcctctcagtccatctcgagcctccgttcaaattgatcatcatcaaaacttatgtggctttttgacctttgaatagggaattttttaaattttttaaaaattaaaataaaaaaaacacatggctcacccttccacccaaaaaa

SEQ ID NO: 971 - DNA, 7500 bp, Homo sapiens
agctcatgggagtatgaaggagatggtaggaggctgctgcgtatgttcggacgagaggggctgggccgagaacccgctggtctactgcgatgggcacgcgtgcagcgtggccgtccaccaagcttgctatggcatcgttcaggtgccaacgggaccctggttctgccggaaatgtgaatctcaggagcgagcagccagggtgaggtgtgagctgtgcccacacaaagacggggcattgaagaggactgataatggaggctgggcacacgtggtgtgtgccctctacatccccgaggtgcaatttgccaacgtgctcaccatggagcccatcgtgctgcagtacgtgcctcatgatcgcttcaacaagacctgttacatctgcgaggagcagggccgggagagcaaggcggcctcgggagcctgcatgacctgtaaccgccatggatgtcgacaagctttccacgtcacctgtgcccaaatggcaggcttgctgtgtgaggaagaagtgctggaggtggacaacgtcaagtactgcggctactgcaaataccacttcagcaagatgaagacatcccggcacagcagcgggggaggcggaggaggcgctggaggaggaggtggcagcatggggggaggtggcagtggtttcatctctgggaggagaagccggtcagcctcaccatccacgcagcaggagaagcaccccacccaccacgagaggggccagaagaagagtcgaaaggacaaagaacgccttaagcagaagcacaagaagcggcctgagtcgccccccagcatcctcaccccgcccgtggtccccactgctgacaaggtctcctcctcggcttcctcttcctcccaccacgaggccagcacgcaggagacctctgagagcagcagggagtcaaaggggaaaaagtcttccagccatagcctgagtcataaagggaagaaactgagcagtgggaaaggtgtgagcagttttacctccgcctcctcttcttcctcctcctcttcctcctcctctggggggcccttccagcctgcagtctcgtccctgcagagctcccctgacttctctgcattccccaagctggagcagccagaggaggacaagtactccaagcccacagcccccgccccttcagcccctccttctccctcagctcccgagccccccaaggctgacctttttgagcagaaggtggtcttctctggctttgggcccatcatgcgcttctccaccaccacctccagctcaggccgggcccgggcgccctcccctggggactataagtctccccacgtcacggggtctggggcctcggcaggcacccacaaacggatgcccgcactgagtgccacccctgtgcctgctgatgagacccctgagacaggcctgaaggagaagaagcacaaagccagcaagaggagccgccatgggccaggccgtcccaagggcagccggaacaaggagggcactgggggcccagctgccccatccttgcccagtgcccagctggctggctttaccgccactgctgcctcacccttctctggaggttccctggtcagctccggcctgggaggtctgtcctcccgaacctttgggccttctgggagcttgcccagcttgagcctggagtcccccttactaggggcaggcatctacaccagtaataaggaccccatctcccacagtggcgggatgctgcgggctgtctgcagcacccctctctcctccagcctcctggggcccccagggacctcggccctgccccgcctcagccgctccccgttcaccagcaccctcccctcctcttctgcttctatctccaccactcaggtgttttctctggctggctctacctttagcctcccttctacccacatctttggaacccccatgggtgccgttaatcccctcctctcccaagctgagagcagccacacagagccagacctggaggactgcagcttccggtgtcgggggacctcccctcaggagagtctgtcttccatgtcccccatcagcagcctccccgcactcttcgaccagacagcctctgcaccctgtgggggcggccagttagacccggcggccccagggacgactaacatggagcagcttctggagaagcagggcgacggggaggccggcgtcaacatcgtggagatgctgaaggcgctgcacgcgctgcagaaggagaaccagcggctgcaagagcagatcctgagcctgacggccaaaaaggagcggctgcagattctcaacgtgcagctctctgtgcccttccctgccctgcctgctgccctgcctgccgccaacggccctgtccctgggccctatggcctgcctccccaagccggcagcagcgactccttgagcaccagcaagagccctccgggaaagagcagcctcggcctggacaactcgctgtccacttcttctgaggacccacactcaggctgcccgagccgcagcagctcgtcgctgtccttccacagcacgcccccaccgctgcccctcctccagcagagccctgccactctgcccctggccctgcctggggcccctgccccactcccgccccagccgcagaacgggttgggccgggcacccggggcagcggggctgggggccatgcccatggctgaggggctgttgggggggctggcaggcagtgggggcctgcccctcaatgggctccttggggggttgaatggggccgctgcccccaaccccgcaagcttgagccaggctggcggggcccccacgctgcagctgccaggctgtctcaacagccttacagagcagcagagacatctccttcagcagcaagagcagcagctccagcaactccagcagctcctggcctccccgcagctgaccccggaacaccagactgttgtctaccagatgatccagcagatccagcagaaacgggagctgcagcgcctgcagatggctgggggctcccagctgcccatggccagcctgctggcaggaagctccaccccgctgctgtctgcgggtacccctggcctgctgcccacagcgtctgctccacccctgctgcccgctggagccctagtggctccctcgcttggcaacaacacaagtctcatggccgcagcagctgcagctgcagcagtagcagcagcaggcggacctccagtcctcactgcccagaccaaccccttcctcagcctgtcgggagcagagggcagtggcggtggccccaaaggagggaccgctgacaaaggagcctcagccaaccaggaaaaaggctaaatccacccttacccctcctgacccccccaagtggagggaacagatcctggcctgaggggtcctagcctggagcaggcgcctgcgcccagaccctggagagccttgacccagagcctgtgctgaggtccagggagtgtggagagctcctggtgtcgaggactgagactgagaggggagccccctccatctggcccccttccctttccgcactgtccgctttgtgaggctcagaggaaggacagtctgcaagcccgcctaggaggtccatccccagcaaatgttttggaggtccccccagagagcagagtgggccatggcagaagtagggggttggttggacctgtcacatgaaatggatcagcacttgaatggggagaagtggagggagaggccctgggcctgtccctgcggggaaatcttttatggaagaagggctggacccactttacctgcagtttcttcccagctcgggcagatggcagaagggaccccttggactttttctcgccatccctccccccagcgcaggggcacaagctgagcttgtaaaagcccacagatgttgggggctggagaaggggcaggagagcatcacactcagccccagcctcctcaacctcttggggccccgtgatggggaggagagggcaggtgcggggaggctctggccttccttggtgccccgccctttgtttgcactattggacttaggagtgccgagggtggggagatggagctgcccgtctcagtgtgtgagtgtgtgtgtgcgtgcatgtgtgtgtgtgtgtgtgtgtgtgtgtgtgtctgtctgcctgtctctctcctcctggacccagggcagccaagggcagggataggcgcagtggtcagatgaagcagcgccagagaggggacctcccagctcttatttgcaccctccccacctcaccaactttggtccctctctgggggcatgaatggttaacaaacaccagagcagtactccaatattggagagtcgctgggggcacagggctttgaatcagggtagtatcctgccttccctcccctgaccccacatggtctcagggcccccttagggccccctaccccactgatagcttcctccttctctggcacaaggggagccccagggcttgggggagggcgtaaggtggggggaaatgccactgcttttagcaaaagcctccctcccagaattagccagcttgcctcctgcaccccacccccaccaaccaggggagccactaagctgactaacaactgtcccctcacccaccagctatttccccagggtagagtgggcaattctcaccttcaaagagtccccgcctgcccaggcctttggcacagaggctgagtggacagtcaggagagaggcgagaggcaaggcgaagcctgtgtccctgtttcagttgcactggggttggagcccagggtaggggtttccagcttccccaggctccggccttgtcagtctctttgcatgtgtggatttttctgtgtgtgtttctgtttgggtttttgttgttgggttttttttttttttttaataaagaaaagaagatgtgtatatttttggcaacgacagaaacgtagtgcagatatatttttgcctgtgctgctcaactgttttttttttctgatactgaaaataatattaatattcctgttgataagactttgtaagatgttagggagctgataatggaggggggtgggaatccttcaaaggcaatttcttaggcacttgcaagggcttgggggagggggaggcagttgtgatgacctcagaaatactcactttttattaatgctaaatatgttagaaagaaatgatagcattcagcattttattcttcttaatctattaagctgtgtaactccctgccccaaaccactgaaaagaaaagtaaccttcaggccaggcgcggtggctcacgcctgtaatcccaacactttgggaggctgaggcgggcggatcacttaaggtcaggagttcaagaccagcctggccaacatggtgaaaccccgtctctatcaaaaattagccgggcatggtggcacgtgcctgtaatcccagctacttgggaggctgaggcacgagaattgcttgaacccaggaggctgaggctgcagtgagccaagattgtgccactgcactccagcctgtgtgagagagtgagactctgtctcaaaagagaaaaaaaaagaaaagtaaccttcagagattcttagaagagttgctcattcacacccacgcccttgcccaaggctggcccacttagagcgaaacttaacttttgtctggatgggaagagaagtaagtctaccccgaggttgccatgttgaagagtgagaggtccaagtgattctgtgcattgaaaccaagacaccccacccagaacacttcttccctccctcagcccaaaccaaaggctggggttctcatctccaagtggctgttctccaactttcccaagccgcttgcattccccagactggactactgtggcggttaggttagatttgaagacggggcccaggctgggtatgaacgggtgcagccctcttctcctcttcccccccacatctctcatgagagaggtagtggcatttccttctcagggagcttcaatgggaaaggtctcgaaagcttcaggaggagcagaataccaacgcagggggatggctgtaacgatctcaccgtctcctaacctcagtcccttttttgagagtgaatggtggagggtgggaagggacccagatttgtagatctctttgtctgggggaggggaaggatgtggtttgcagagcggaagcagagtttggaaacgcatgagagcagagcttcgtgtgttcccaccctcagtgaggaggtgtgagtgggtgagcatgtggagttgggtgttcccaccctcagtgaggaggtgtgagtgggggtgcatatagaggcagtgcctgctgtggggtcacaactggtgcatgccagcgccaaagggacctgtctttaggggtcatttcagccagctcctcccatcacagatgacagctccaagcctagaaggggctcagtgacagggccaggacaagccctcaggactgtggcctcctggcccttggttcccctgccccacaacatggtctccacatggctggctggctggctgtccctgtgtgtgtgtgacacacggtgtgagtgcagggctgtgcccggggtgggagggtgtctatgtggcactgactgtcttagctcagagctggtggatcctctccatggacaatgacactttaaggattgtcttggtttgtttttcctatttgtggggtattttccccctcaggctcctgggtctgctgctgcctcaaggtgtcctgaccttgaggctgatgaggggacccctgcctgtttcccccatactgagttctagggaggtgctcaccccagactcttaggaagggtctagagaaatgagaggagcccaagccaggggccagctccgagaaagggtaacctccacgcttctctctcccaaattggaaatgaagacaggttttcaaaggcacaggctccccctgccagcttctaggatcttccttggtgtgcaatgggccagttaggggtaggcagcttgcacccagttctcctttatctcaacttattttcctggggagaggtgcctagagggattgaggtaacttcaactgggaattccaaggaaggtgggcaagtagccttggctctctcccaccatgtccatcaggattgagagtgtgtctagctcccgaccactttgtcttgacctactgaaaagttgggaactgaggggtgccttcattcccctttgttcactttctccagctcaacttgggacttgggtggtgggactggagacctcacccctgctcccgtcccgccccctttctatcccaacctgtttccatgtagcagacccttcctagggagcagggaggggaagccacagattgcaaacccaggggctcctttttcattctttctaaaaccttgatatcctcagcccaaaggcgatgcccccctgccacctccaagcctggaattgtgcataacccggatcttgtatctttgtataacggatgttatttgtacgaagggcagttcgtaaacagcacttgttcttttaataaaagaatgttttgcaaaaaaaaaaaaaaaaatccgaaga

SEQ ID NO: 972 - DNA, 2258 bp, Homo sapiens
ctcctccagctcttcctgtcccgctgttgcaacactgcctcactcttcccctcccaccttctctcccctcctctctgctttaattttctcagaattctctggactgaggctccagttctggcctttggggttcaagatcactgggaccaggccgtgatctctatgcccgagtctcaaccctcaactgtcaccccaaggcacttgggacgtcctggacagaccgagtcccgggaagccccagcactgccgctgccacactgccctgagcccaaatgggggagtgagaggccatagctgtctggcatgggcctctccaccgtgcctgacctgctgctgccactggtgctcctggagctgttggtgggaatatacccctcaggggttattggactggtccctcacctaggggacagggagaagagagatagtgtgtgtccccaaggaaaatatatccaccctcaaaataattcgatttgctgtaccaagtgccacaaaggaacctacttgtacaatgactgtccaggcccggggcaggatacggactgcagggagtgtgagagcggctccttcaccgcttcagaaaaccacctcagacactgcctcagctgctccaaatgccgaaaggaaatgggtcaggtggagatctcttcttgcacagtggaccgggacaccgtgtgtggctgcaggaagaaccagtaccggcattattggagtgaaaaccttttccagtgcttcaattgcagcctctgcctcaatgggaccgtgcacctctcctgccaggagaaacagaacaccgtgtgcacctgccatgcaggtttctttctaagagaaaacgagtgtgtctcctgtagtaactgtaagaaaagcctggagtgcacgaagttgtgcctaccccagattgagaatgttaagggcactgaggactcaggcaccacagtgctgttgcccctggtcattttctttggtctttgccttttatccctcctcttcattggtttaatgtatcgctaccaacggtggaagtccaagctctactccattgtttgtgggaaatcgacacctgaaaaagagggggagcttgaaggaactactactaagcccctggccccaaacccaagcttcagtcccactccaggcttcacccccaccctgggcttcagtcccgtgcccagttccaccttcacctccagctccacctatacccccggtgactgtcccaactttgcggctccccgcagagaggtggcaccaccctatcagggggctgaccccatccttgcgacagccctcgcctccgaccccatccccaacccccttcagaagtgggaggacagcgcccacaagccacagagcctagacactgatgaccccgcgacgctgtacgccgtggtggagaacgtgcccccgttgcgctggaaggaattcgtgcggcgcctagggctgagcgaccacgagatcgatcggctggagctgcagaacgggcgctgcctgcgcgaggcgcaatacagcatgctggcgacctggaggcggcgcacgccgcggcgcgaggccacgctggagctgctgggacgcgtgctccgcgacatggacctgctgggctgcctggaggacatcgaggaggcgctttgcggccccgccgccctcccgcccgcgcccagtcttctcagatgaggctgcgcccctgcgggcagctctaaggaccgtcctgcgagatcgccttccaaccccacttttttctggaaaggaggggtcctgcaggggcaagcaggagctagcagccgcctacttggtgctaacccctcgatgtacatagcttttctcagctgcctgcgcgccgccgacagtcagcgctgtgcgcgcggagagaggtgcgccgtgggctcaagagcctgagtgggtggtttgcgaggatgagggacgctatgcctcatgcccgttttgggtgtcctcaccagcaaggctgctcgggggcccctggttcgtccctgagcctttttcacagtgcataagcagttttttttgtttttgttttgttttgttttgtttttaaatcaatcatgttacactaatagaaacttggcactcctgtgccctctgcctggacaagcacatagcaagctgaactgtcctaaggcaggggcgagcacggaacaatggggccttcagctggagctgtggacttttgtacatacactaaaattctgaagttaaagctctgctcttggaaaaaaaaaaaaaaaaaaaaaaaaaaaaaaaaa

SEQ ID NO: 973 - DNA, 3249 bp, Homo sapiens
atcacgtcgttgcctgggctgccgtccgcggaaatttgaaatggctgacgggtcgctgacgggcggcggtctggaggcagcggccatggcgccggagcgcacgggctgggcggtggagcaggagctggcgtctctggagaaaggtttgttccaagatgaagattcatgcagtgattgtagctaccgtgataaaccaggttctagtttacaaagttttatgccagaaggaaaaacctttttcccagaaattttccaaacaaatcaacttttgttctatgagcgattcagagcctatcaagattacattttagctgactgcaaggcctctgaggtacaggaattcacagctgagttcttggagaaggtccttgagccatctggatggcgggcagtctggcacactaatgtgttcaaggtgctggttgagatcacagatgtggactttgcagccttgaaggcagtggtgaggcttgctgaaccatacctctgtgactctcaagtgagcacttttaccatggagtgcatgaaggagctccttgatctgaaggagcatcggttgcccctgcaggagctgtgggtggtgtttgatgattcaggagtgtttgaccagacagcccttgcaattgagcatgtcagatttttctaccaaaacatttggaggagttgggatgaagaagaggaggatgaatacgattattttgtcagatgtgttgaacctcgattaagattgcattatgacattcttgaagaccgagttccatcaggacttattgttgactaccacaatctgttgtctcaatgtgaggagagttacaggaaatttttaaatctgagaagcagtttgtcaaattgtaactctgattccgagcaggaaaatatctccatggtggaagggttaaaattgtattcggagatggaacagttgaaacaaaagctgaaactcattgagaatcctttgttgaggtatgtgtttggttatcagaagaattctaacatccaagcaaagggtgtccgttccagcggtcagaagatcactcatgtggtctcctccaccatgatggctggtctcctgcggtccctgcttacggacaggctttgccaggagcctggtgaggaagaaagagaaattcagttccatagtgatccattgtctgctataaatgcctgcttcgaaggtgacactgttattgtttgtcctggccattatgtggtacatggcactttctccattgctgactccattgagttggaaggatatggcctaccagatgacattgtgatagaaaagaggggcaaaggcgacacttttgtggactgcactggtgctgatattaaaatctcaggcataaaatttgttcagcatgatgctgtagagggaatcttaattgttcaccgtggtaagactacgctggaaaactgtgtgctgcagtgtgagacgaccggagtcacagtgcggacatcagcagagtttctaatgaagaactcggatttatatggcgccaagggtgctggtatagaaatctaccctgggagtcagtgcaccctgagtgacaatgggatccatcactgcaaggaagggatcctcattaaggacttcttagatgaacattatgacattcccaagatatccatggtgaataatataatacataataatgaaggttatggtgttgtcttggtgaaacctacaatcttctctgacctgcaagaaaatgctgaagatggaactgaagaaaataaagcgcttaaaattcagacaagtggagagccagatgtggctgaaagagtggatctagaagagctgattgagtgtgcaactggtaaaatggagctttgtgcaagaactgacccttctgagcaagtcgagggaaattgtgaaattgtaaatgaactaattgctgcctccacacagaaaggccagataaagaagaaaaggttgagtgaactggggatcacgcaagctgatgacaacttaatgtcacaggagatgtttgttgggattgtggggaaccagttcaagtggaatgggaaaggtagttttggcacatttcttttctgactacagtgatgtaagtagatagcaaaatactggattttgcacatgctgccctaagaatcactgctgccattgtagtttgctgtattgtctgtattttatatttgattatttgggcttgagtgaaaggtagatttatttccatttgcaggtgttgcacataaaacactccctctttataagaaaaatcataaatgcatataaaatagaaaatatttggagattgcttatctgaaagtcttgctttcttatacacatggttctctcatattaagcctggtagtaactttttagtgtaattacctttagcacttcaaagacgaggaagtaaggaagggaatgcaagactagtgcataaaaatgcaataggtgtcatatgtacagcattcttcttagagttgccttttcatcccaattacagtgagtctgatttccatcctgtatttgcataatacttgtcttaaaataaaagcttttatgattgggaatttatctgcctaatcagacttattattgagacgtcaatgggacgcatttttctgttgagctatgcagtcgtcaaaacagcgatagacagcataggaggtttgaagcagaaatgaaatgtgttattcagagccaatgttgtacatagagcattttcactattgctgaatgggaatgattaaaaacaaggtatttttcgggccaggcggtggctcacgcttgtaatcgcagcactttgggaggctgaggcaggaggatcacttgagcccaggagttcaagactagcctaggcaacatagtgagaccctgtctctactaaaaataaatttaaaaaaaattagctgagtgtggtggtgcatgcatgtagttccagctactcaggaggctgaggctagaggatccttgagcccaggaggttgaggctgcagtgaggtgtgattgcgccactgcattccagcttgggcgacagagcgagacccagtctcaaaaaaaaaaaaaagtatttttctcttaccgttacagtattctgattatattactgacacagtcaaaatgattaactgtacaacctgtatctgctgggtgttcttgttatcatattgtaaaacagctttaaaaatatttatattttaaaaactgtatgtgacattaatatgcctaatgattaaaattatagtgatgaaataacaaaaaaaaaaaaaaaaaaa

SEQ ID NO: 974 - DNA, 3002 bp, Homo sapiens
cggcaggcaggttccccgcggggggccggggccgggccgttgcctagcaacgccgagccccgcccggccggcgcgtgcctgcccccagcatggcttggcagggctggcccgcggcgtggcagtgggtcgccggctgctggctcctcctcgtccttgtcctcgtcctacttgtgagcccccgcggctgccgagcgcggcggggcctccgcggtctgctcatggcgcacagccagcggctgctcttccgaatcgggtacagcctgtacacccgcacctggctcgggtacctcttctaccgacagcagctgcgcagggctcggaatcgctaccctaaaggccactcgaaaacccagccccgcctcttcaatggagtgaaggtgcttcccatccctgtcctctcggacaactacagctacctcatcatcgacacccaggcccagctggctgtggctgtggacccttcagaccctcgggctgtgcaggcttccattgaaaaggaaggggtcaccttggtcgccattctgtgtactcacaagcactgggaccacagtggagggaaccgtgacctcagccggcggcaccgggactgtcgggtgtacgggagccctcaggacggcatcccctacctcacccatcccctgtgtcatcaagatgtggtcagcgtgggacggcttcagatccgggccctggctacacctggccacacacaaggccatctggtctacctactggatggggagccctacaagggtccctcctgcctcttctcaggggacctgctcttcctctctggctgtgggcggacctttgagggcaatgcagagaccatgctgagctcactggacactgtgctggggctaggggatgacacccttctgtggcctggtcatgagtatgcagaggagaacctgggctttgcaggtgtggtggagcccgagaacctggcccgggagaggaagatgcagtgggtgcagcggcagcggctggagcgcaagggcacgtgcccatctaccctgggagaggagcgctcctacaacccgttcctgagaacccactgcctggcgctacaggaggctctggggccggggccgggccccactggggatgatgactactcccgggcccagctcctggaagagctccgccggctgaaggatatgcacaagagcaagtgatgcccccagcgcccccagcccagcccactccccgcatggggaggccgccaccaccaacacctcatcatccttctcatcgctaacaccaccacctccatcggcacccaagcgggcatcatccccccacactgctcaggggaggggagggatcaggcgatgagactgtgaggccaaaagaagggggcctgttggaggctgggaaccccgcagcgcgaggctgcctcatcaacggcaagaggaaaggaggggtctcgggacatctccagaccctaccaactgggagggtcccctcctccttccctactcctgggacggcagcaaggacatgggggctgctgttagcttctccgtcaggaggcctcatctcactgtagccctggaacccagggtccatcttgcccttcccccatccatggttgggaaagaagctcagcccctcacagtggcctcaagtgtgatgccttacaaaagcaccactcagatgggcagctggactctggtgtcctgagactctgccctcttcccacagcctccctgccccacccatccctgcaaagccatttttcagacagagccattcctaagaacactgaagggctggaatgctggctggccactctctgcctcagtggcctccctacagcctggaagaaggagggtcctgattgccaaggaaacctcctcattgggctaaggagacactggagtctggagtgtggagccccacagtcttgcaggtcacatgctctccttgcacatctggcctggttgtacccactggcctctgcctctgccctgggccaaaagggcccctccttgccaggggagagacagccacggtcctctttggccgatgctgtattctcattttggcccttgttcttaggcccgtctgcccgccttcctccatctaacctttcctgttttatccgcagcccttttcttctttgagttagtaaagatttattctgtaacctgacactcatctggccctttgcagtttgccagccatattcccatgtgatttcccactggatccaggcccccatccggctggcaggagggggctctgacgtgcaggttggaaatcagaagtctgtgagagcgcgggagtgcatggcagctctgggtcccagacctggcccgacccctctgcttcacctccagctctgctgctcctctactcttgggtcgagatccctttggagccacagcgaggaaccctgtggtcctcaggcaggtgtaccttgagtcagccaggagccctcttttcctgtgtcaaagcctgccctcgggctctgctcacctctggtgaccctccaagatgcccctgccctcagtttcccctcatgatctggcctctgcccccttctctagccacagcctctagtacactttagcaataccaccagactagttagagttccccactcaccaagcaagacatgcagtttcatgcctctgtgccttcgctcatgctgtttcttccgactggaatgccttcccctgctcctcctgccttgtctgcctggcaagttcatctctcacgatcccctcaaaggccccctcctccaggaaggcaacccctgtgcccctcccctccaggctacctctgcactttgtcaatgcttctcttgtggcacttatcacactgtattttacttgtttacatgtttgtctccccttctagactgtgaatccttaagggcatggactgtatcttatgcatctctgtatttctgcgcctagcacggtgcctagcacacagtaggcgctcaataaatgttgaatgaatgaatgatttaatcaagaaaaaaaaaaaaaaaa

SEQ ID NO: 975 - DNA, 998 bp, Homo sapiens
gggaacggggcggagcgcggctgcgccggcgcgtcgaggggagaggcagcagccgcgatggacgtgttcctcatgatccggcgccacaagaccaccatcttcacggacgccaaggagtccagcacggtgttcgaactgaagcgcatcgtcgagggcatcctcaagcggcctcctgacgagcagcggctgtacaaggatgaccaactcttggatgatggcaagacactgggcgagtgtggcttcaccagtcaaacagcacggccacaggccccagccacagtggggctggccttccgggcagatgacacctttgaggccctgtgcatcgagccgttttccagcccgccagagctgcccgatgtgatgaagccccaggactcgggaagcagtgccaatgaacaagccgtgcagtgaggacccccaagaggcccatttcccccaataaaagagatttgggagtctgcctggttgctgcctctttttcccgcccctccctgggatgggtcccactccctgtgggctccttttggggcttgtgcttggcagttcctgtgctgtcctgtctcccagatcctgagaccctggctgagaacttggcccagcctgctgcttaaaggcaccatggggacctgggttgccctgagacccaagccattgttagcagctagccagccacaccaaccacgccagggggaggaaagggaaggactgggagagacacaaagaccagagccagcctcagggacaagagattccagttttaggcctttctccttctaagtgccccccacccccatagcctgcatgtccactcccagacgatggccaagagcagaaacacaagctggagccagtgtcctggtttgacagcatgttcaacgagggaaccccaagacggacccacacaggtccacccacgctgggggctgtaatcacggagggaagtggctgcccccttaacacacctttaataaacagtctacagacccaaaaaaaaa

SEQ ID NO: 976 - DNA, 395 bp, Homo sapiens
gcagccctcgcgcggtccggcacagcggacaccaggactccaaaatggcgtcagttggtgagtgtccggccccagtaccagtgaaggacaagaaacttctggaggtcaaactgggggagctgccaagctggatcttgatgcgggacttcagtcctagtggcattttcggagcgtttcaaagagagcacgagcggctccgcaaataccactgaagaggacacactctgcacccccccaccccacgaccttggcccgagcccctccgtgaggaacacaatctcaatcgttgctgaatcctttcatatcctaataggaattaacctccaaataaaacatgactggtacgtgtgctgattgcctgcctgtctgccgtagccaaaaaaaaaaaaaaaaaa

SEQ ID NO: 977 - DNA, 1725 bp, Homo sapiens
ctacgggcaccgtggccacacctgcctgcacagccagggccaggaggaggagatgccatgaccctcattctcacaagcctgctcttctttgggctgagcctgggccccaggacccgggtgcaggcagaaaacctacccaaacccatcctgtgggccgagccaggtcccgtgatcacctggcataaccccgtgaccatctggtgtcagggcaccctggaggcccaggggtaccgtctggataaagagggaaactcaatgtcgaggcacatattaaaaacactggagtctgaaaacaaggtcaaactctccatcccatccatgatgtgggaacatgcagggcgatatcactgttactatcagagccctgcaggctggtcagagcccagcgaccccctggagctggtggtgacagcctacagcagacccaccctgtccgcactgccaagccctgtggtgacctcaggagtgaacgtgaccctccggtgtgcctcacggctgggactgggcaggttcactctgattgaggaaggagaccacaggctctcctggaccctgaactcacaccaacacaaccatggaaagttccaggccctgttccccatgggccccctgaccttcagcaacaggggtacattcagatgctacggctatgaaaacaacaccccatacgtgtggtcggaacccagtgaccccctgcagctactggtgtcaggcgtgtctaggaagccctccctcctgaccctgcagggccctgtcgtgacccccggagagaatctgaccctccagtgtggctctgatgtcggctacatcagatacactctgtacaaggagggggccgatggcctcccccagcgccctggccggcagccccaggctgggctctcccaggccaacttcaccctgagccctgtgagccgctcctacgggggccagtacagatgctacggcgcacacaacgtctcctccgagtggtcggcccccagtgaccccctggacatcctgatcgcaggacagatctctgacagaccctccctctcagtgcagccgggccccacggtgacctcaggagagaaggtgaccctgctgtgtcagtcatgggacccgatgttcactttccttctgaccaaggagggggcagcccatcccccgttgcgtctgagatcaatgtacggagctcataagtaccaggctgaattccccatgagtcctgtgacctcagcccacgcggggacctacaggtgctacggctcacgcagctccaacccctacctgctgtctcaccccagtgagcccctggagctcgtggtctcaggagcaactgagaccctcaatccagcacaaaagaagtcagattccaagactgccccacacctccaggattacacagtggagaatctcatccgcatgggtgtggctggcttggtcctgctgttcctcgggattctgttatttgaggctcagcacagccagagaagccccccaaggtgcagccaggaggcaaacagcagaaaggacaatgcacccttcagagtggtggagccttgggaacagatctgatgatctgaggaggttctggaagactggggcagcagttggggaagtgtctgctgagaatatcaaggggaagaagcatgggtcaggtgcaggaagatgtctgggtgtctgtagaagatgcttcctccattaaactgtggtgctttcctcctcaaaaaaaaaaaaaaaaaa

SEQ ID NO: 978 - DNA, 1124 bp, Homo sapiens
cggaagtcaccctttgtgccttatgcggtgattttaatgataggtgtcatatataggacggagtaatctgtttacattctgttcttctcgatgcactcacaagcgggtaactaggtgacaagaaaacaaagatcttattcaaaagaggtcttacagcaacccaacgtctcatcttcccatagtaaagatgacggcgccttgaggtaagctacaggcaacaccacttccgcgtttctcttgcgccctggtccaagatggcggatgaagccacgcgacgtgttgtgtctgagatcccggtgctgaagactaacgccggaccccgagatcgtgagttgtgggtgcagcgactgaaggaggaatatcagtcccttatccggtatgtggagaacaacaagaatgctgacaacgattggttccgactggagtccaacaaggaaggaactcggtggtttggaaaatgctggtatatccatgacctcctgaaatatgagtttgacatcgagtttgacattcctatcacatatcctactactgccccagaaattgcagttcctgagctggatggaaagacagcaaagatgtacaggggtggcaaaatatgcctgacggatcatttcaaacctttgtgggccaggaatgtgcccaaatttggactagctcatctcatggctctggggctgggtccatggctggcagtggaaatccctgatctgattcagaagggcgtcatccaacacaaagagaaatgcaaccaatgaagaatcaagccactgaggcagggcagagggacctttgataggctacgatactattttcctgtgcatcacacttaactcatctaactgcttccccggacaccctccacctctagttgttactaagtagctgcagtaggcattgctggggaagaaacaaacacacaccaaacagtactgctacttagtttctaaggctgcacagggaagggaaagactgggctttggacaatctagaggtaatttatatccgcccccaggtggagcaacatgcgattctggaggcacgggggtaactgaaagtgagtacatatagtctttctggtttctggagataacccatcaataaaagctgcttcctctggtaaa

SEQ ID NO: 979 - DNA, 2538 bp, Homo sapiens
cgcccccaccgccacccaaccaagcatcacccattccagcacttccggcctgacccctgtccagcgcctttcctttctccagcttctgctctgccccaagagtggtcgccttcgtggcagggcacgactctctcccagctcgggtcgccgcccacattagtgtggggccctgcggcctagcgtccctcaccagaggcctccccttgcctagctggaccgccgagggacatcgacgagtatcctcctcctgctgtccccggcttcgcctgccgcccctaaccggccagtcaagatggccgccgctgggtgaggcaagctggcgcgccgcgggggcgtctgggagttgtagttcgggacggcgggctgacgcacttcgccgccggccgacgggcgccattgtgcggcgcgcgccggagtatcctgagctccagctggaccctaaattggatcctcttcctgctgagagtcccctaatgaacattgaggttgttgaggtcctcacactgaaccaggaggtggctggtccccggaatgcccagatccaggccctatatgctgaagatggaagcctgagtgcagatgcccccagtgagcaggtccaacagcagggcaagcatccaggtgaccctgaggccgcgcgccagaggttccggcagttccgttataaggacatgacaggtccccgggaggccctggaccagctccgagagctgtgtcaccagtggctacagcctaaggcacgctccaaggagcagatcctggagctgctggtgctggagcagttcctaggtgcactgcctgtgaagctccggacatgggtggaatcgcagcacccagagaactgccaagaggtggtggccctggtagagggtgtgacctggatgtctgaggaggaagtacttcctgcaggacaacctgccgagggcaccacctgctgcctcgaggtcactgcccagcaggaggagaagcaggaggatgcagccatctgcccagtgacagtgctccctgaggagccagtgaccttccaggatgtggctgtggacttcagccgggaggagtgggggctgctgggcccgacacagaggaccgagtaccgcgatgtgatgctggagacctttgggcacctggtctctgtggggtgggagactacactggaaaataaagagttagctccaaattctgacattcctgaggaagaaccagcccccagcctgaaagtacaagaatcctcaagggattgtgccttgtcctctacattagaagataccttgcagggtggggtccaggaagtccaagacacagtgttgaagcagatggagtctgctcaggaaaaagaccttcctcagaagaagcactttgacaaccgtgagtcccaggcaaacagtggtgctcttgacacaaaccaagtttcgctccagaaaattgacaaccctgagtcccaggcaaacagtggcgctcttgacacaaaccaagttttgctccacaaaattcctcctagaaaacgattgcgcaaacgtgactcacaagttaaaagtatgaaacataattcacgtgtaaaaattcatcagaagagctgtgaaaggcaaaaggccaaggaaggcaatggttgtaggaaaaccttcagtcggagtactaaacagattacgtttataagaattcacaaggggagccaagtttgccgatgcagtgaatgtggtaaaatattccggaacccaagatacttttctgtgcataagaaaatccataccggagagaggccctatgtgtgtcaagactgtgggaaaggatttgttcagagctcttccctcacacagcatcagagagttcattctggagagagaccatttgaatgtcaggagtgtgggaggaccttcaatgatcgctcagccatctcccagcacctgaggactcacactggcgctaagccctacaagtgtcaggactgtggaaaagccttccgccagagctcccacctcatcagacatcagaggactcacaccggggagcgcccatatgcatgcaacaaatgtggaaaggccttcacccagagctcacaccttattgggcaccagagaacccacaataggacaaagcgaaagaagaaacagcctacctcatagctctcaagccagttgaagaaaccttgccttttcagcttgaccctgcaatataacatgcacaggcctgcttgtgaatcaggactgaatgtgaaagggaagtattgagtgaggacattcccaaaaccaaaggacaactgaggagactgcccagcacataatgaataaataagaaaatgagtgaggagttattaacatcatttggaaaaaagatttcccattcacttgatattgtttgttcactcatttagtcattaaaagtgagattaataaaatctgaaaatgttatataataactttaaaaagccaggtaattaataatctgcactgatattacatccacagtaccacagtatttatgtgtatgaattaaggattaaaagataatgtggataaataaactattgatctatgtctgtgt

SEQ ID NO: 980 - DNA, 2334 bp, Homo sapiens
gtcccggccgccgggaggaagtggccgggcggtcgcagggactccggggcgaccgccgcgagtccgcagtagttcgggccatggaggcggagccgccgctctacccgatggcgggggctgcggggccgcagggcgacgaggacctgctcggggtcccggacgggcccgaggccccgctggacgagctggtgggcgcgtaccccaactacaacgaggaggaggaggagcgccgctactaccgccgcaagcgcctgggcgtgctcaagaacgtgctggctgccagcgccgggggcatgctcacctacggcgtctacctgggcctcctgcagatgcagctgatcctgcactacgacgagacctaccgcgaggtgaagtatggcaacatggggctgcccgacatcgacagcaaaatgctgatgggcatcaacgtgactcccatcgccgccctgctctacacacctgtgctcatcaggttttttggaacgaagtggatgatgttcctcgctgtgggcatctacgccctctttgtctccaccaactactgggagcgctactacacgcttgtgccctcggctgtggccctgggcatggccatcgtgcctctttgggcttccatgggcaactacatcaccaggatggcgcagaagtaccatgagtactcccactacaaggagcaggatgggcaggggatgaagcagcggcctccgcggggctcccacgcgccctatctcctggtcttccaagccatcttctacagcttcttccatctgagcttcgcctgcgcccagctgcccatgatttatttcctgaaccactacctgtatgacctgaaccacacgctgtacaatgtgcagagctgcggcaccaacagccacgggatcctcagcggcttcaacaagacggttctgcggacgctcccgcggagcggaaacctcattgtggtggagagcgtgctcatggcagtggccttcctggccatgctgctggtgctgggtttgtgcggagccgcttaccggcccacggaggagatcgatctgcgcagcgtgggctggggcaacatcttccagctgcccttcaagcacgtgcgtgactaccgcctgcgccacctcgtgcctttctttatctacagcggcttcgaggtgctctttgcctgcactggtatcgccttgggctatggcgtgtgctcggtggggctggagcggctggcttacctcctcgtggcttacagcctgggcgcctcagccgcctcactcctgggcctgctgggcctgtggctgccacgcccggtgcccctggtggccggagcaggggtgcacctgctgctcaccttcatcctctttttctgggcccctgtgcctcgggtcctgcaacacagctggatcctctatgtggcagctgccctttggggtgtgggcagtgccctgaacaagactggactcagcacactcctgggaatcttgtacgaagacaaggagagacaggacttcatcttcaccatctaccactggtggcaggctgtggccatcttcaccgtgtacctgggctcgagcctgcacatgaaggctaagctggcggtgctgctggtgacgctggtggcggccgcggtctcctacctgcggatggagcagaagctgcgccggggcgtggccccgcgccagccccgcatcccgcggccccagcacaaggtgcgcggttaccgctacttggaggaggacaactcggacgagagcgacgcggagggcgagcatggggacggcgcggaggaggaggcgccgcccgcagggcccaggcctggccccgagcccgctggactcggccgccggccctgcccgtacgaacaggcgcaggggggagacgggccggaggagcagtgaggggccgcctggtccccggactcagcctccctcctcgccggcctcagtttaccacgtctgaggtcggggggaccccctccgagtcccgcgctgtcttcaaaggcccctgtctcccctcccccacgttggggacgcccctcccagagcccaggtcacctccgggcttccgcagccccctccaaggcggagtggagccttgggaacccctcggccaagcacaggggttcgaaaatacagctgaaaccccgcgggcccttagcacgcgccccagcgccggagcacggtcagggtcttcttgcgacccggcccgctccagatccccacagctctcggccgcggacccgggccgcgtgtgagcgcactttgcacctcctatccccagggtccgccgagagccacgattttttacagaaaatgagcaataaagagattttgtactgtcaaaaaaaaaaaaaaaaaa

SEQ ID NO: 981 - DNA, 2866 bp, Homo sapiens
gaggggaagaggatgtgatcatgcgaccgccagcagaagggaaattgtgaaagcgacctgctgtagaaaaggcggcccacagccacctcagcatgcagaggaggcccagctgctgagaggagttgcctgagagtgacctttgcatctgcctgtccagccagcatggaaccaaagcggatcagagagggctaccttgtgaagaaggggagcgtgttcaatacgtggaaacccatgtgggttgtattgttagaagatggaattgaattctataagaagaaaagtgacaacagccccaaaggaatgatcccgctgaaagggagcactctgactagcccttgtcaagactttggcaaaaggatgtttgtgtttaagatcactacgaccaaacagcaggaccacttcttccaggcagccttcctggaggagagagatgcctgggttcgggatatcaagaaggccattaaatgcattgaaggaggccagaaatttgccaggaaatctaccaggaggtccattcgactgccagaaaccattgacttaggtgccttatatttgtccatgaaagacactgaaaaaggaataaaagaactgaatctagagaaggacaagaagatttttaatcactgcttcacaggtaactgcgtcattgattggctggtatccaaccagtctgttaggaatcgccaggaaggcctcatgattgcttcatcgctgctcaatgaggggtatctgcagcctgctggagacatgtccaagagtgcagtggatggaactgctgaaaaccctttcctggacaaccctgatgccttctactactttccagacagtgggttcttctgtgaagagaattccagtgatgatgatgtgattctgaaagaagaattcagaggggtcattatcaagcagggatgtttactgaagcaggggcatagaaggaaaaactggaaagtgaggaagttcatcttgagagaagaccctgcctacctgcactactatgaccctgctggggcagaagatcccctgggagcaattcacttgagaggctgtgtggtgacttcagtggagagcaactcaaatggcaggaagagtgaggaagagaacctttttgagatcatcacagcagatgaagtgcactatttcttgcaagcagccacccccaaggagcgcacagagtggatcagagccatccagatggcctcccgaactgggaagtaaagagactcctgcattcctcctcccctcctgagggaagcccatggacaagctcagtccaggacctgtccacttctgtgacaaatcaacgggaaacagcccaggggtgggaagttttcatttgcaggggggtctgaatgtaactcaccatgtggtgtgcaaggttcccctgcattgtattgctcactgcagcccctctgcccctatccatgacccccaagcagatataacaagctgtgcagcctcagtaggctgcttgccctctccaggcctcagggcctcttctggaaaatgaagaaattcaactagtagattcctgaggtccccctagcttaaaaaaaaaaaaaatctgccccatgattctaacactcgcagtagtgatagtgtatctagttgttctgctggtgtccttccttggctaagtcttggccttcagttatcttcaaatgtaccagaacctgagccaacgcctccctgtgaaactgttgctgatctgtagtacagtaccaggaagaaacctcttttgttctctttagacatcttctacttgctcttggccttgagatcgtgtaacaaaatgaaggagggctctcttctttcttcctcatcctactcaaaaacttcccgagagcagtggtggttttgagggttttgacttctattacttttggcagcctggaaagttgtgtcttctgggaaagagacctggggaggccaggagtagctgagggtcctttctgtgcccttaaaccgcccagaggagccctattccactctggttttaggctgatctgagagggtctccctttgttcctttctggagcatttctctaacgtttattacaattaggagggggaccccacatctgtgagattctgtttcatttgaggtttacagaaaaaaaaaagtggccagatgtgttccccccatgggtgagaggcctgggcaactgcctggtgaatgtgtcttgcggcagctgcagcaagtggaggggctgaactactggccagctcactggatgatgggttaatacaacaactgcactgtaaggactcagagccacacagaacttctgagaggggctgttagcattgcgcagcatcttcagttctccagtaaatgatattgcgttcgtgcctcagctttaagcacaagtagcagcagctcctgcttgagttctgagggcatcatggccctatgattaaccagagtgatctaacctagactaaaattgggaacttatttgcaatttttgaccctgaccactaactagtgattcttctccaaaattgagaaagacagcacccattgaagcagatatgtgtgtgaaagtatatttttcaattccagatttttaattttaaggctccaggaaagaaaggagagtagaacatttttcctcattttatcaaatcctctcttgccctccctcaattcccctgtaacattcctgaagctgttcccactcccagatggttttatcaatagcctagaggtaaagaactgtctttttctctgattctttaataaattatctttatagaatatgcacaagtttttctacactcagtgttaaagtatttattaatgggaagtcaacttaatgttttgaaataaatatatgactctgtttaatgcaaaaaaaaaaaaaaa

SEQ ID NO: 982 - DNA, 4748 bp, Homo sapiens
cctcgcggggttgcggcgagcccggcccgcgaacgtcacgtccctgcgcgctccctgcactctcccgagctgcgctaggcgggcgccacggctgcccggcgaaggaaaccgaaaccgagtccgggcccgtccctccgcggccccatccgcccggtgcacccggggccgcgctcgccaggccgcggagcccagagctgcgcgcacgaaccgtgcgccgggagggcgtgggcgtggcgccgaagggtcccgggtcttcgacgcctctgcggcggctcctccctccttgcagttggatccctggcgggtgcggcccggcccggcccgtgagcggcgcacagaatgggccgatgctgcttctacacggcggggacgttgtccctgctcctgctggtgaccagcgtcacgctgctggtggcccgggtcttccagaaggctgtagaccagagtatcgagaagaaaattgtgttaaggaatggtactgaggcatttgactcctgggagaagccccctctgcctgtgtatactcagttctatttcttcaatgtcaccaatccagaggagatcctcagaggggagacccctcgggtggaagaagtggggccatacacctacagggaactcagaaacaaagcaaatattcaatttggagataatggaacaacaatatctgctgttagcaacaaggcctatgtttttgaacgagaccaatctgttggagaccctaaaattgacttaattagaacattaaatattcctgtattgactgtcatagagtggtcccaggtgcacttcctcagggagatcatcgaggccatgttgaaagcctatcagcagaagctctttgtgactcacacagttgacgaattgctctggggctacaaagatgaaatcttgtcccttatccatgttttcaggcccgatatctctccctattttggcctattctatgagaaaaatgggactaatgatggagactatgtttttctaactggagaagacagttaccttaactttacaaaaattgtggaatggaatgggaaaacgtcacttgactggtggataacagacaagtgcaatatgattaatggaacagatggagattcttttcacccactaataaccaaagatgaggtcctttatgtcttcccatctgacttttgcaggtcagtgtatattactttcagtgactatgagagtgtacagggactgcctgcctttcggtataaagttcctgcagaaatattagccaatacgtcagacaatgccggcttctgtatacctgagggaaactgcctgggctcaggagttctgaatgtcagcatctgcaagaatggtgcacccatcattatgtctttcccacacttttaccaagcagatgagaggtttgtttctgccatagaaggcatgcacccaaatcaggaagaccatgagacatttgtggacattaatcctttgactggaataatcctaaaagcagccaagaggttccaaatcaacatttatgtcaaaaaattagatgactttgttgaaacgggagacattagaaccatggttttcccagtgatgtacctcaatgagagtgttcacattgataaagagacggcgagtcgactgaagtctatgattaacactactttgatcatcaccaacataccctacatcatcatggcgctgggtgtgttctttggtttggtttttacctggcttgcatgcaaaggacagggatccatggatgagggaacagcggatgaaagagcacccctcattcgaacctaaacattgcctttgcttggtgaagaaactgtgtgagctgtcctgacctggacgatgacgtggggaaaccctccacctccttgcaggcttgttgcctgttgaaagaaggaaaaagacacggcgctggcaagtgataggaacattctggccagaggttaaagagcaggctgacatggctggccattaagctttataaaatcatgtgggctctgaaattgttcttttatgtgtctagcaagtatttaataaacccttgtatagtaattttgttgttgttgggtgctggtagctccagaattttgtgaccactattgtgggtaaaatgtctctgcatcacttgttaatgctactggtctaacttcattcagtatgcttcattcaccgaactttgtgctcaaaatgcgtatataccattttatgttgtattcctccatttcacttgcaaaacagaagtaaataagagttcgggacccagggtaaaatggtagcttcatccaatatatcattcaaatgcatctgatttctaaaacatattacattttatgctgatcttcagttcataattcttccaggaaaactcagtcttccaactgcaataaaatactgggtagaatcaaatgggaaaggggttgggtggggcaatacccatgagttgatagtgataagctcctaaggatttttaacttgtacttttgtgaacgaagagaatgcataaataatgttggtgaggataaagtacagatatttcatgtagaattaattgctagttatgatgcttgtggatagttaactgttttttttttagtcaaaatgatcatgctacgaaaagatgcttctgagagaatgtaatgagtaactgatttttcttcctgagtcgcccttgccaaatatgttactgtattaattaatctaatattgagtgattatttgtaaaattatgaatatgggaaatccatctatctacagcctaagttacacataagtttcagaaagtctgattagactaaagagatatttcttctgggacagccgccttcttggtaattttgaagttctttttacaagttccttcctcagtttcagttctttccagtgttttgtagctcactgtcactcactgaatagagaaacgtgtgccctatacttcctgtgacaatcattttgctgacagaatgatggatgtttaaaatattgcacaaagtactttaaagaaaggtctgttaggaccagaagcagagacaccacttttcaaaggacttcttggtttcagcataacctaagacagggaattgggagccatcatatgtcacagtgttcagaattcaagcatatttaagggcattttctttgattctcaaagttcagcattcattttgaattgagaagcctatacatttagctgacaaagtgcttatagaatttcttaacaactgaaccattcaaaaggattttttttgtttaaaactggatttcaatgtaagcaaatgaagaaaaaaatatagatttcatttccatagcttcttatccctgtattgaggtaataaattgttttactgacaatttttcctttttctacactaaaacaatatgtgatatatttcccctcttgaagaggcaattcattaaactctcaaattttctatagaatcaagatagaacctttagatactccaactcaccaaaatgtaaaaaaactaacaaaaatatttggtcttcaataatgctaaatatctacatttttagaatttatcaacatttaactagataattgggcatgtcttaattatgcatgtacttatccatactaataaaattgacaatgctagtgcatacttattggtttagtcctattatcaggatataatcatctgtgaggaggatattttaaatactgtaaatgataacagttaatgatatacacatttagactgagttgcacactggcagggagaccaaaaacattacttccatacttgtgtcatgattcttttttttttgagagagtctcactctgtcgccaggctggagtacagtggcatgatctcggctcactgcaacctctgcctcccgggttcaagcaattctcctgcctcagccacccaagtagctgggactacaggtgcgtgccaccacgcccagctaaattttgtatttttagtggagacggggtttcaccatgttggccaggatggtctcaatctcctgaccctgcgatctgcccacctcagcctcccaaagtgctgggattacaggcgtaagccaccgggcctggcctgttttatgattcttaatagttacttggtttaaatcacatttgatactatccttctgaaaagtctgagacagatctacaaactacagtcaaaattatagattaagaggaatgaatgcacctatttggctttaagttgaagatgaattatttctcatgctcattttcttgcggcagttatcttagaaagacccccaaaggctttgtgattgtaagcactgtcatgatcacagaatgcaagcttctggtaccatgatcctcaacttagagaggaagaaaccaagacagagagcttaactcacttctctcagggaaaattaggagttgagcacaggacaggaaatgggctttgccacttttagctccaggcttttctaaccagacttgatttcctcatgttctagaaagatcactaatggtcaagtggaacaagcactacacgactaacccctattggggtttttaacttaagggaggctaatttttaatttaaactgctcgagatatgagttctgcaaaaggtggtccgcatccttggccctctggacattatcactaaattgcttgtgcctgttaacaagaatactgaccagaatgctcttcatgtagcttatacagttggttcacttcatgcggttcttgacatgtttatttctacccttaatgcaatgaaatgtttcattaataaaaaaccactttatat

SEQ ID NO: 983 - DNA, 3653 bp, Homo sapiens
aaatccaagatggctaccaggaggccgtcagttctcggaagtgcggcacatcctcactcctgggaggctcaaaggctcaaacgccattggcagaatccccgacagctcatcctccgccccctgcagggggcggtaatgacagagtcctaatttccggttccggcagtaccggtagcccagtcgagatggaggaagatgcgaccggcagacggcattcgctgggaacgacggatagactgggggctgcggcctagaggtccgggcttggagttcgcctcagacgcggtggagccgccggagtctgagaaggtcttcaggcaccatggaggacaaacgcaacatccagatcatcgagtgggaacacctggacaagaagaagttctacgtgtttggtgtggcaatgacaatgatgatccgtgtcagtgtctacccattcaccctcatccgcacccggttgcaagttcagaaggggaagagcctctaccatgggaccttcgatgccttcatcaagatcctgcgagcagatggtatcactggcctctaccgagggttcctggtcaataccttcaccctcatctctggccagtgttatgtcaccacttatgagctcacccggaagtttgtagctgactacagccagagtaacacagtcaaatcactggtggctggtggctcagcctcccttgtggcccagagcatcacagtgcccattgatgtagtctcccagcacctgatgatgcaacgcaagggtgagaaaatgggccgctttcaggtgcgggggaacccagagggacaaggggtagttgcctttggccaaaccaaggacatcatcaggcagatcctgcaggctgatggacttcgcggcttctatcgaggctatgtggcttcactgcttacctatatcccaaacagtgctgtctggtggcccttctatcacttctatgcagagcagctctcctacctgtgtcctaaggagtgccctcacattgtctttcaagctgtctcggggcccctggctgcagccactgcctccatcctcaccaatcccatggatgtcatacgaacccgtgtgcaggttgagggcaagaactccatcatcctgaccttcagacagctgatggcagaagaagggccttggggcctcatgaagggcctctcggccagaatcatctcagccacaccttccaccattgtcattgtggtgggctatgagagcctcaagaaactcagcctccgacctgagctggtggactcgagacactggtaaccagtggtggggagagaagcctgctgttttccacactaccgtgggtcaggggcagagtggagaggacagcaccctctccaggtgctcccaccacacacccagccctgccctgggccaagtggcctatctgggatagggatagagactttgaactgctcttgctgaagaggctccacgcctggatcccttgcccccactatttaaaattctcttctgagctgggctccctcactcagtccctgtatttgatactggcctaaagaccccaccccccaccctgccagcccttcttctggcttccccttccatctgtgtccctgagaccctgagaagagctgtacatagagcttgcttactaccactggttcttcctcttgggctttcagcccagactccaagcagctgctatcaaccctctctcccttcatctcttagccttgcttatttttattttgggaccgagctgcccactagatgactctgcttttccctgcatttggggctaaggtgccaggtacttatttgcacagggagcaggagcagcaaaaaatctctggttctccagagcactcgtcctctctttggaggggttattaggttgggagaaatgttgatacttttgttttgtgtgtgtgtgtgtgtgtgtgtgtgtgtgtgtgtgtgtgtgtgttttaacatctgtgaaccaggctattagtcctgctaaagcgccaatcctgctgtcagagctcacccccttcctaagacaggtagaaaaatgtaatgtagctttttccacaagccacttccctgtcccttcagtctcaggagccctaggagagtctaagctggggcatcccctggcccagaggactcccgtggtgggcacagttctaagtggatcaggctgtcttgggtgcactggacttggagcactaccttgagaagtcaggttgagaaagtagttgatctagaaggcaacaagtgggcatgtgttccccagcacattacccaggccagcagagccaaacctaggagagggcagtgggtagattctctgccccaggcagccatgacatacacataaataccccaatcactcagacttacggcaacaagtgttgtctcactatggtgatctctaagatccacatcactggatgcgtagtcatcccagtcatggtaccctgtggaggaatgctggaagaacataaagagcagttcagaaagtcacccaataccaggaccactgcatttaccagcctgatactgccaagattatctgatgctctcctcaggagctaggagaggagtgctccttcctccctaccgctactctccccaagcctgtgttgcaggtagagaggtgcagcaaatagagaaggcatgtcaaaccctgcatttctacctgagacgtgtgacctggatgatcctccaaaccctattggtcccaccccctgggaaaggccatggtgccagtttgaaaggtgctagctacctgaagccttgatatttcttcatggctgccgcacattcttccaccttggccagaacaggttctgaaaaccacttctctaccttcaccaccaccactgcccatcttgatctctttgagggttttcccatttcacttgatcttatttttgtttatcccttcctgcactttgtcaagagagtcctccagtttctatccaggaatgttcacatccaaagggttggacccacggatcattctgaatcttcctgcccctcctcactgcttaaccctgagaaccacaaatataatggaagcagttccccccaccctcaccccatctctttaagctcatcctagcaagacctctagagaccctagagactcgactttagtccttccccgccatggcacagtggggaaggtgtcaatggggagtgtcacggacaggaggtaggatcctgccgctcgcgtcttagtgtttctccctcaagactttccttctgttttgttgtcttgtgcagtattttacagcccctcttgtgtttttctttatttctcgtacacacacgcagttttaagggtgatgtgtgtataattaaaaggacccttggcccatactttcctaattctttagggactgggattgggtttgactgaaatatgttttggtggggatgggacggtggacttccattctccctaaactggagttttggtcggtaatcaaaactaaaagaaacctctgggagactggaaacctgattggagcactgaggaacaagggaatgaaaaggcagactctctgaacgtttgatgaaatggactcttgtgaaaattaacagtgaatattcactgttgcactgtacgaagtctctgaaatgtaattaaaagtttttattgagcccccgaaaaaaaaaaaaaaaaaaaaaa

SEQ ID NO: 984 - DNA, 1709 bp, Homo sapiens
aaacagcggacggaggggccggcggtggcggagccggagcaagcaggggttcggcggcattacctgtacccattcaccggcggctaccggcggcggcgcgcagcgtgtcaggcggagagacccgccgccaggaatgaatctgaagtctgctgcagtaaaacacagaaggctttaaaatgttttcttgcataaaattcaaaacttttaagtagctgcttatgagaatagggaaggcagaaagctaatgtctgtctcaagatacaggacagctgtttgctcatcaacctcaactgtgtgtgcaactgaggaacatggctcaagaaactaatcacagccaagtgcctatgctttgttccactggctgtggattttatggaaaccctcgtacaaatggcatgtgttcagtatgctataaagaacatcttcaaagacagaatagtagtaatggtagaataagcccacctgcaacctctgtcagtagtctgtctgaatctttaccagttcaatgcacagatggcagtgtgccagaagcccagtcagcattagactctacatcttcatctatgcagcccagccctgtatcaaatcagtcacttttatcagaatctgtagcatcttctcaattggacagtacatctgtggacaaagcagtacctgaaacagaagatgtgcaggcttcagtatcagacacagcacagcagccatctgaagagcaaagcaagtctcttgaaaaaccgaaacaaaaaaagaatcgctgtttcatgtgcaggaagaaagtgggacttactgggtttgaatgccggtgtggaaatgtttactgtggtgtacaccgttactcagatgtacacaattgctcttacaattacaaagccgatgctgctgagaaaatcagaaaagaaaatccagtagttgttggtgaaaagatccaaaagatttgaactcctgctggaatacaaaattcttgagcatctgcaaactaaaaattgacttgaggttttttttttcctagtcattgggaatgtagagcagtgtatcttgcatgtcatcggaagaatagatttttgttttggttttgttttgaaaatgactctgaacatttatttccattgcaatttctgtggctgaggagacttaaactttacaagtattatccttttaagatcattttaattttagttgagtgcagagggcttttataacaaacgtgcagaaattttggagggctgtgatttttccagtattaaacatgcatgcattaatcttgcagtttattttctcattgtgtatgtatatatcgcttttctctgcagcacgatttctcttttgataatgccctttagggcacaactagttatcagtaactgaatgtatcttaatcattatggctgcttctgttttttcattaacaaaggttattcatatgttagcatatagtttctttgcacccactatttatgtctgaatcatttgtcacaagagagtgtgtgctgatgagattgtaagtttgtgtgtttaaacttttttttgagcgagggaagaaaaagctgtatgcatttcattgctgtctacaggtttctttcagattatgttcatgggtttgtgtgtatacaatatgaagaatgatctgaagtaattgtgctgtatttatgtttattcaccagtctttgattaaattaaatgaaaaaaaaaaaaaaaaaaaaaaaaaaaaa

SEQ ID NO: 985 - DNA, 2567 bp, Homo sapiens
ctccggcgcagtgttgggactgtctgggtatcggaaagcaagcctacgttgctcactattacgtataatccttttcttttcaagatgcctgaggaagtgcaccatggagaggaggaggtggagacttttgcctttcaggcagaaattgcccaactcatgtccctcatcatcaataccttctattccaacaaggagattttccttcgggagttgatctctaatgcttctgatgccttggacaagattcgctatgagagcctgacagacccttcgaagttggacagtggtaaagagctgaaaattgacatcatccccaaccctcaggaacgtaccctgactttggtagacacaggcattggcatgaccaaagctgatctcataaataatttgggaaccattgccaagtctggtactaaagcattcatggaggctcttcaggctggtgcagacatctccatgattgggcagtttggtgttggcttttattctgcctacttggtggcagagaaagtggttgtgatcacaaagcacaacgatgatgaacagtatgcttgggagtcttctgctggaggttccttcactgtgcgtgctgaccatggtgagcccattggcaggggtaccaaagtgatcctccatcttaaagaagatcagacagagtacctagaagagaggcgggtcaaagaagtagtgaagaagcattctcagttcataggctatcccatcaccctttatttggagaaggaacgagagaaggaaattagtgatgatgaggcagaggaagagaaaggtgagaaagaagaggaagataaagatgatgaagaaaaacccaagatcgaagatgtgggttcagatgaggaggatgacagcggtaaggataagaagaagaaaactaagaagatcaaagagaaatacattgatcaggaagaactaaacaagaccaagcctatttggaccagaaaccctgatgacatcacccaagaggagtatggagaattctacaagagcctcactaatgactgggaagaccacttggcagtcaagcacttttctgtagaaggtcagttggaattcagggcattgctatttattcctcgtcgggctccctttgacctttttgagaacaagaagaaaaagaacaacatcaaactctatgtccgccgtgtgttcatcatggacagctgtgatgagttgataccagagtatctcaattttatccgtggtgtggttgactctgaggatctgcccctgaacatctcccgagaaatgctccagcagagcaaaatcttgaaagtcattcgcaaaaacattgttaagaagtgccttgagctcttctctgagctggcagaagacaaggagaattacaagaaattctatgaggcattctctaaaaatctcaagcttggaatccacgaagactccactaaccgccgccgcctgtctgagctgctgcgctatcatacctcccagtctggagatgagatgacatctctgtcagagtatgtttctcgcatgaaggagacacagaagtccatctattacatcactggtgagagcaaagagcaggtggccaactcagcttttgtggagcgagtgcggaaacggggcttcgaggtggtatatatgaccgagcccattgacgagtactgtgtgcagcagctcaaggaatttgatgggaagagcctggtctcagttaccaaggagggtctggagctgcctgaggatgaggaggagaagaagaagatggaagagagcaaggcaaagtttgagaacctctgcaagctcatgaaagaaatcttagataagaaggttgagaaggtgacaatctccaatagacttgtgtcttcaccttgctgcattgtgaccagcacctacggctggacagccaatatggagcggatcatgaaagcccaggcacttcgggacaactccaccatgggctatatgatggccaaaaagcacctggagatcaaccctgaccaccccattgtggagacgctgcggcagaaggctgaggccgacaagaatgataaggcagttaaggacctggtggtgctgctgtttgaaaccgccctgctatcttctggcttttcccttgaggatccccagacccactccaaccgcatctatcgcatgatcaagctaggtctaggtattgatgaagatgaagtggcagcagaggaacccaatgctgcagttcctgatgagatcccccctctcgagggcgatgaggatgcgtctcgcatggaagaagtcgattaggttaggagttcatagttggaaaacttgtgcccttgtatagtgtccccatgggctcccactgcagcctcgagtgcccctgtcccacctggctccccctgctggtgtctagtgtttttttccctctcctgtccttgtgttgaaggcagtaaactaagggtgtcaagccccattccctctctactcttgacagcaggattggatgttgtgtattgtggtttattttattttcttcattttgttctgaaattaaagtatgcaaaataaagaatatgccgttttaaaaaaaaaaaaaaaaaaaaaaaaaaaaa

SEQ ID NO: 986 - DNA, 2531 bp, Homo sapiens
gtgcaaccttcctccctttcttaaatgcttggggtgagagagaagagaggctagggtggggcatggaggacacagagagagagagtgctgtgtattccttccccgctactgtcctgtcctcagctaacttgctctgggacagcttccccagggctacagatactgcactcagctgactgtcctttcttctgggcccctggtcccagagcagagctgacaaaggagattcctgagagagcaccttcttatcacagaaagtgctgagccaagagctcctagctgccccttttgcagatgtgaagggccagtgaaccttggacccagatggttgcttaatactcctttccccctccctcactccttcctttgcgggctgcctcacctcctccacccttcttgcttaaatccataggcatttgtctggccttcccttttactgctggctgggaaggaggagcatcagaccacagatcctggaaggcacttctctccctgactgctgctcacactgccgtgagaacctgcttatatccaggaccaaggaggcaatgccaggaagctggtgaagggtttcctctcctccaccatggttgacagcactgagtatgaagtggcctcccagcctgaggtggaaacctcccctttgggtgatggggccagcccagggccggagcaggtgaagctgaagaaggagatctcactgcttaacggcgtgtgcctgattgtggggaacatgatcggctcgggcatctttgtttcccccaagggtgtgctcatatacagtgcctcctttggtctctctctggtcatctgggctgtcgggggcctcttctccgtctttggggccctttgttatgcggaactgggcaccaccattaagaaatctggggccagctatgcctatatcctggaggcctttggaggattccttgctttcatcagactctggacctccctgctcatcattgagcccaccagccaggccatcattgccatcacctttgccaactacatggtacagcctctcttcccgagctgcttcgccccttatgctgccagccgcctgctggctgctgcctgcatttgtctcttaaccttcattaactgtgcctatgtcaaatggggaaccctggtacaagatattttcacctatgctaaagtattggcactgatcgcggtcatcgttgcaggcattgttagacttggccagggagcctctactcattttgagaattcctttgagggttcatcatttgcagtgggtgacattgccctggcactgtactcagctctgttctcctactcaggctgggacaccctcaactatgtcactgaagagatcaagaatcctgagaggaacctgcccctctccattggcatctccatgcccattgtcaccatcatctatatcttgaccaatgtggcctattatactgtgctagacatgagagacatcttggccagtgatgctgttgctgtgacttttgcagatcagatatttggaatatttaactggataattccactgtcagttgcattatcctgttttggtggcctcaatgcctccattgtggctgcttctaggcttttctttgtgggctcaagagaaggccatctccctgatgccatctgcatgatccatgttgagcggttcacaccagtgccttctctgctcttcaatggtatcatggcattgatctacttgtgcgtggaagacatcttccagctcattaactactacagcttcagctactggttctttgtggggctttctattgtgggtcagctttatctgcgctggaaggagcctgatcgacctcgtcccctcaagctcagcgttttcttcccgattgtcttctgcctctgcaccatcttcctggtggctgttccactttacagtgatactatcaactccctcatcggcattgccattgccctctcaggcctgcccttttacttcctcatcatcagagtgccagaacataagcgaccgctttacctccgaaggatcgtggggtctgccacaaggtacctccaggtcctgtgtatgtcagttgctgcagaaatggatttggaagatggaggagagatgcccaagcaacgggatcccaaatctaactaaacaccatctggaatcctgatgtggaaagcaggggtttctggtctactggctagagctaaggaagttgaaaaggaaagctcacttctttggaggcacctgtccagaagcctggcctaggcagcttcaacctttgaacttactttttgaaatgaaaagtaatttatttgttttgctacatactgttccagacttttaaaggggacaatgaaggtgactgtggggaggagcatgtcaggtttgggcttggttgttttagaagcacctgggtgtgcctacctactcctcttttcttttaaaagggcccacaatgctccaatttcctgtctcctttagagagacatgaaactatcacaggtgctggatgacaataaaagtttatgttcctaaaaaaaaaaaaaaaaaaaaaaaa

SEQ ID NO: 987 - DNA, 6614 bp, Homo sapiens
ctgcgcgccgctggcgctgaggggaggaagtttgctgtcgagcggcctgggttccgtgggcaaggccgtgggaggcagcgttggctgcttcgacacactgagggcggcgcgatgggagacgagatggatgccatgattcccgagcgggagatgaaggattttcagtttagagcgctaaagaaggtgagaatctttgactcccctgaggaattgcccaaggaacgctcgagtctgcttgctgtgtccaacaaatatggtctggtcttcgctggtggagccagtggcttgcagatttttcctactaaaaatcttcttattcaaaataaacccggagatgatcccaacaaaatagttgataaagtccaaggcttgctagttcctatgaaattcccaatccatcacctggccttgagctgtgataacctcacactctctgcgtgcatgatgtccagtgaatatggttccattattgctttttttgatgttcgcacattctcaaatgaggctaaacagcaaaaacgcccatttgcctatcataagcttttgaaagatgcaggaggcatggtgattgatatgaagtggaaccccactgtcccctccatggtggcagtttgtctggctgatggtagtattgctgtcctgcaagtcacggaaacagtgaaagtatgtgcaactcttccttccacggtagcagtaacctctgtgtgctggagccccaaaggaaagcagctggcagtgggaaaacagaatggaactgtggtccagtatcttcctactttgcaggaaaaaaaagtcattccttgtcctccgttttatgagtcagatcatcctgtcagagttctggatgtgctgtggattggtacctacgtcttcgccatagtgtatgctgctgcagatgggaccctggaaacgtctccagatgtggtgatggctctactaccgaaaaaagaagaaaagcacccagagatatttgtgaactttatggagccctgttatggcagctgcacggagagacagcatcattactacctcagttacattgaggaatgggatttagtgctggcagcatctgcggcttcaacagaagttagtatccttgctcgacaaagtgatcagattaattgggaatcttggctactggaggattctagtcgagctgaattgcctgtgacagacaagagtgatgactccttgcccatgggagttgtcgtagactatacaaaccaagtggaaatcaccatcagtgatgaaaagactcttcctcctgctccagttctcatgttactttcaacagatggtgtgctttgtccattttatatgattaatcaaaatcctggggttaagtctctcatcaaaacaccagagcgactttcattagaaggagagcgacagcccaagtcaccaggaagtactcccactaccccaacctcctctcaagccccacagaaactggatgcttctgcagctgcagcccctgcctctctgccaccttcatcacctgctgctcccattgccactttttctttgcttcctgctggtggagcccccactgtgttctcctttggttcttcatctttgaagtcatctgctacggtcactggggagcccccttcatattccagtggctccgacagctccaaagcagccccaggccctggcccatcaaccttctcttttgttcccccttctaaagcctccctagcccccacccctgcagcgtctcctgtggctccatcagctgcttcattctcctttggatcatctggttttaagcctaccctggaaagcacaccagtgccaagtgtgtctgctccaaatatagcaatgaagccctccttcccaccctcaacctctgctgtcaaagtcaaccttagtgaaaagtttactgctgcagctacctctactcctgttagtagctcccagagcgcacccccgatgtcgccattctcttctgcctccaagccagctgcttctggaccactcagccaccccacacctctctcagcaccacctagttccgtgccattgaagtcctcagtcttgccctcaccatcaggacgatctgctcagggcagttcaagcccagtgccctcaatggtacagaaatcacccaggataacccctccagcggcaaagccaggctctccccaggcaaagtcacttcagcctgctgttgcagaaaagcagggacatcagtggaaagattcagatcctgtaatggctggaattggggaggagattgcacactttcagaaggagttggaagagttaaaagcccgaacttccaaagcctgtttccaagtgggcacttctgaggagatgaagatgctgcgaacagaatcagatgacttgcatacctttcttttggagattaaagagaccacagagtcgcttcatggagatataagtagcctgaaaacaactttacttgagggctttgctggtgttgaggaagccagagaacaaaatgaaagaaatcgtgactctggttatctgcatttgctttataaaagaccactggatcccaagagtgaagctcagcttcaggaaattcggcgccttcatcagtatgtgaaatttgctgtccaagatgtgaatgatgttctagacttggagtgggatcagcatctggaacaaaagaaaaaacaaaggcacctgcttgtgccagagcgagagacactgtttaacaccctagccaacaatcgggaaatcatcaaccaacagaggaagaggctgaatcacctggtggatagtcttcagcagctccgcctttacaaacagacttccctgtggagcctgtcctcggctgttccttcccagagcagcattcacagttttgacagtgacctggaaagcctgtgcaatgctttgttgaaaaccaccatagaatctcacaccaaatccttgcccaaagtaccagccaaactgtcccccatgaaacaggcacaactgagaaacttcttggccaagaggaagaccccaccagtgagatccactgctccagccagcctgtctcgatcagcctttctgtctcagagatattatgaagacttggatgaagtcagctcaacgtcatctgtctcccagtctctggagagtgaagatgcacggacgtcctgtaaagatgacgaggcagtggttcaggcccctcggcacgcccccgtggttcgcactccttccatccagcccagtctcttgccccatgcagcaccttttgctaaatctcacctggttcatggttcttcacctggtgtgatgggaacttcagtggctacatctgctagcaaaattattcctcaaggggccgatagcacaatgcttgccacgaaaaccgtgaaacatggtgcacctagtccttcccaccccatctcagccccgcaggcagctgccgcagcagcactcaggcggcagatggccagtcaggcaccagctgtaaacactttgactgaatcaacgttgaagaatgtccctcaagtggtaaatgtgcaggaattgaagaataaccctgcaaccccttctacagccatgggttcttcagtgccctactccacagccaaaacacctcacccagtgttgaccccagtggctgctaaccaagccaagcaggggtctctaataaattcccttaagccatctgggcctacaccagcatccggtcagttatcatctggtgacaaagcttcagggacagccaagatagaaacagctgtgacttcaaccccatctgcttctgggcagttcagcaagcctttctcattttctccatcagggactggctttaattttgggataatcacaccaacaccgtcttctaatttcactgctgcacaaggggcaacaccctccactaaagagtcaagccagccggacgcattctcatctggtgggggaagcaaaccttcttatgaggccattcctgaaagctcacctccctcaggaatcacatccgcatcaaacaccaccccaggagaacctgccgcatctagcagcagacctgtggcaccttctggaactgctctttccaccacctctagtaagctggaaaccccaccgtccaagctgggagagcttctgtttccaagttctttggctggagagactctgggaagtttttcaggactgcgggttggccaagcagatgattctacaaaaccaaccaataaggcttcatccacaagcctaactagtacccagccaaccaagacgtcaggcgtgccctcagggtttaattttactgcccccccggtgttagggaagcacacggagccccctgtgacatcctctgcaaccaccacctcagtagcaccaccagcagccaccagcacttcctcaactgccgtttttggcagtctgccagtcaccagtgcaggatcctctggggtcatcagttttggtgggacatctctaagtgctggcaagactagtttttcatttggaagccaacagaccaatagcacagtgcccccatctgccccaccaccaactacagctgccactccccttccaacatcattccccacattgtcatttggtagcctcctgagttcagcaactaccccctccctgcctatgtccgctggcagaagcacagaagaggccacttcatcagctttgcctgagaagccaggtgacagtgaggtctcagcatcagcagcctcacttctagaggagcaacagtcagcccagcttccccaggctcctccgcaaacttctgactctgttaaaaaagaacctgttcttgcccagcctgcagtcagcaactctggcactgcagcatctagtactagtcttgtagcactttctgcagaggctaccccagccaccacgggggtccctgatgccaggacggaggcagtaccacctgcttcctccttttctgtgcctgggcagactgctgtcacagcagctgctatctcaagtgcaggccctgtggccgtcgaaacatcaagtacccccatagcctccagcaccacgtccattgttgctcccggcccatctgcagaggcagcagcatttggtaccgtcacttctggctcatccgtctttgctcagcctcctgctgccagttctagctcagctttcaaccagctcaccaacaacacagccactgccccctctgccacgcccgtgtttgggcaagtggcagccagcaccgcaccaagtctgtttgggcagcagactggtagcacagccagcacagcagctgccacaccacaggtcagcagctcagggtttagcagcccagcttttggtaccacagccccaggggtctttggacagacaaccttcgggcaggcctcagtctttgggcagtcggcgagcagtgctgcaagtgtcttttccttcagtcagcctgggttcagttccgtgcctgccttcggtcagcctgcttcctccactcccacatccaccagtggaagtgtctttggtgccgcctcaagtaccagtagctccagttccttctcatttggacagtcttctcccaacacaggaggggggctgtttggccaaagcaacgctcctgcttttgggcagagtcctggctttggacagggaggctctgtctttggtggtacctcagctgccaccacaacagcagcaacctctgggttcagcttttgccaagcttcaggttttgggtctagtaatactggttctgtgtttggtcaagcagccagtactggtggaatagtctttggccagcaatcatcctcttccagtggtagcgtgtttgggtctggaaacactggaagagggggaggtttcttcagtggccttggaggaaaacccagtcaggatgcagccaacaaaaacccattcagctcggccagtgggggctttggatccacagctacctcaaatacctctaacctatttggaaacagtggggccaagacatttggtggatttgccagctcgtcgtttggagagcagaaacccactggcactttcagctctggaggaggaagtgtggcatcccaaggctttgggttttcctctccaaacaaaacaggtggcttcggtgctgctccagtgtttggcagccctcctacttttgggggatcccctgggtttggaggggtgccagcattcggttcagccccagcctttacaagccctctgggctcgacgggaggcaaagtgttcggagagggcactgcagctgccagcgcaggaggattcgggtttgggagcagcagcaacaccacatccttcggcacgctcgcgagtcagaatgcccccactttcggatcactgtcccaacagacttctggttttgggacccagagtagcggattctctggttttggatcaggcacaggagggttcagctttgggtcaaataactcgtctgtccagggttttggtggctggcgaagctgagggcgtgtcagcaggcctttcgatccctgggaccaaccgcatcctcagcttcttccccgagaaatgctggagcaggctgttcagaccgacgttgccatcaaaacacatacacccagaaagaaacaacagaaaccaaaactcacaaggcgcatgattacttgttttatatttcatgttgggttttccctcccactattaaacagtctgtttccgtacaaaaaaaaaaaaaa

SEQ ID NO: 988 - DNA, 2214 bp, Homo sapiens
cctgtttcccaggaacggtccccggcttcgcgccccaatttctaacagcctgcctgtcccccgggaacgttctaacatccttggggagcgccccagctacaagacactgtcctgagaacgctgtcatcacccgtagttgcaagtttcggagcggcagtgggaagcatgcgggactacgacgaggtgatcgccttcctgggcgagtgggggcccttccagcgcctcatcttcttcctgctcagcgccagcatcatccccaatggcttcaatggtatgtcagtcgtgttcctggcggggaccccggagcaccgctgtcgagtgccggacgccgcgaacctgagcagcgcctggcgcaacaacagtgtcccgctgcggctgcgggacggccgcgaggtgccccacagctgcagccgctaccggctcgccaccatcgccaacttctcggcgctcgggctggagccggggcgcgacgtggacctggggcagctggagcaggagagctgcctggatggctgggagttcagccaggacgtctacctgtccaccgtcgtgaccgagtggaatctggtgtgtgaggacaactggaaggtgcccctcaccacctccctgttcttcgtaggcgtgctcctcggctccttcgtgtccgggcagctgtcagacaggtttggcaggaagaacgttctcttcgcaaccatggctgtacagactggcttcagcttcctgcagattttctccatcagctgggagatgttcactgtgttatttgtcatcgtgggcatgggccagatctccaactatgtggtagccttcatactaggaacagaaattcttggcaagtcagttcgtattatattctctacattaggagtgtgcacattttttgcagttggctatatgctgctgccactgtttgcttacttcatcagagactggcggatgctgctgctggcgctgacggtgccgggagtgctgtgtgtcccgctgtggtggttcattcctgaatctccccgatggctgatatcccagagaagatttagagaggctgaagatatcatccaaaaagctgcaaaaatgaacaacatagctgtaccagcagtgatatttgattctgtggaggagctaaatcccctgaagcagcagaaagctttcattctggacctgttcaggactcggaatattgccataatgaccattatgtctttgctgctatggatgctgacctcagtgggttactttgctctgtctctggatgctcctaatttacatggagatgcctacctgaactgtttcctctctgccttgattgaaattccagcttacattacagcctggctgctattgcgaaccctgcccaggcgttatatcatagctgcagtactgttctggggaggaggtgtgcttctcttcattcaactggtacctgtggattattacttcttatccattggtctggtcatgctgggaaaatttgggatcacctctgctttctccatgctgtatgtcttcactgctgagctctacccaaccctggtcaggaacatggcggtgggggtcacatccacggcctccagagtgggcagcatcattgccccctactttgtttacctcggtgcttacaacagaatgctgccctacatcgtcatgggtagtctgactgtcctgattggaatcctcaccctttttttccctgaaagtttgggaatgactcttccagaaaccttagagcagatgcagaaagtgaaatggttcagatctgggaaaaaaacaagagactcaatggagacagaagaaaatcccaaggttctaataactgcattctgaaaaaatatctaccccatttggtgaagtgaaaaacagaaaaataagaccctgtggagaaattcgttgttcccactgaaatggactgactgtaacgattgacaccaaaatgaaccttgctatcaagaaatgctcgtcatacagtaaactctggatgattcttccagataatgtccttgctttacaaaccaaccatttctagagagtctccttactcattaattcaatgaaatggattggtaagatgtcttgaaaacatgttagtcaaggactggtaaaatacatataaagattaacactcatttccaatcatacaaatactatccaaataaaaataacatcattgtattaacgcaaatattaggtgacaacaaaaaaaaaaaaaaaaaaaaaaaa

SEQ ID NO: 989 - DNA, 12172 bp, Homo sapiens
attttcttctgcacttctgtctggagaggtctgtagccactgagggccccggtcggggccgctttgcaggtccctagtcaggaccgagcaggggagtaggataggaatccccgccgcacctttgtacgagcctgaccccttccgtgggtttgttcctgggtcgccgtcaagctgcggtctctcctcccccgcccttcagccccgcggtctccaggggcggcgccctgggtctggaacgcggttgccaccgaggaggcggcggccctgcgtctggaacgccgttgccaccgaggaggcggcggccccgagcgcgcctggaagccccgggcaaccggccagggtcgggcacaggtggggtccgtcaggccgcccggggctcctctgtcccagctctgcggcccagggggtgacgtgatggcggcagcggtgctgacggaccgggcccaggtgtctgtgacctttgatgatgtggctgtgactttcaccaaggaggagtgggggcagctggacctagctcagcggaccctgtaccaggaggtgatgctggaaaactgtgggctcctggtgtctctggggtgtcctgttcccaaagctgagctgatctgccacctagagcatgggcaggagccatggaccaggaaggaagacctctcccaagacacctgtccaggcgacaaaggaaaacctaagaccacagaacctaccacttgtgagccagccttgtcagagggaatctcacttcagggacaagtgacacaaggaaactcagtggactcacagttggggcaagccgaggatcaggatgggctatcagaaatgcaggaaggacacttcagaccaggaatagatccccaggagaagtctcctgggaagatgagccctgaatgtgatggtttagggacagctgatggtgtgtgttcaaggattggacaggagcaagtctctccaggagatagagtccgtagccataactcatgtgagtcaggtaaagatcccatgattcaggaagaggaaaataactttaaatgcagtgaatgtggaaaagtatttaacaagaaacacctccttgctggacatgagaaaattcactctggagttaagccctatgaatgcacagaatgtgggaaaacctttattaagagcacacatctcctgcaacatcacatgatccacactggggagaggccctatgagtgcatggagtgtggaaaggccttcaaccgcaagtcataccttacccagcaccagcggattcacagtggagagaagccttacaagtgcaatgaatgcggaaaggccttcacccaccgctccaattttgtcttgcataacaggagacacactggagaaaaatcctttgtgtgcacagaatgtggccaagtctttcgacataggccaggctttctccggcactatgttgtccacagtggtgagaatccctatgagtgcttggagtgtggcaaggtcttcaaacacaggtcatatctcatgtggcaccagcagactcataccggggagaagccctatgagtgcagtgaatgtgggaaggtcttcttggagagtgcagccctgattcaccactatgtcatccacactggagagaagccctttgagtgcctcgagtgtgggaaggctttcaaccaccgatcctacctcaagaggcaccagcggattcacactggggagaagcccttcgtgtgcagtgaatgtggaaaggccttcacccactgctctacttttatcttgcataaaagggcccacactggagaaaagcctttcgagtgcaaagagtgtgggaaagcctttagcaatcggaaggacctcattcgccacttcagcatccacactggagagaagccctatgagtgcgtggagtgtggaaaggccttcacccgcatgtcgggcctcacgaggcacaagcggattcatagtggagagaagccctatgaatgtgttgagtgtgggaaatcgttttgctggagcacaaacctcattcgacatgccattatccacactggagagaagccctataaatgtagtgaatgtggaaaggccttcagtcgcagctcgtccctcactcagcatcaaaggatgcatactgggaaaaatcccatcagtgtaacagatgtgggaagaccttttacaagtggacaaacctcagttacccttcgagaacttcttttagggaaggactttttgaatgtaaccactgaggcaaatattttgccagaggaaacatcttcctctgcatctgatcaaccataccaaagagaaaccccacaagtgtcttcactgtgagaaaaccttctgttgctgaatattacttgtcatctgaagagtcatattagaaattcgttcagtctagagccttattctccatctgataatttatcctggagagagacccagtggttattgtgcacataggagaaccttcagctgcatctttctccttagtttacagtgcaattttatctcaggaattatttttaaaaggaggaggggacatagaaaaaatgaaatgcaagcacacatcttttcaggcttctctgccaagcctatggcgctttgtcatggatttcttagtgtatttgggggaagggaaatgtttcaaggtaaagaaccttgaccctttatgtgcttgtatgtacatttattgctatccagtgtcagaacagttagtttaggaaaagtatgcaaactttaatcgcacatcttctgtattccacaatagtacttactcttgagaagcataactttatgacaacttagggggcttgagccatgaaatactcacgtttaagtcagtaaggatacacatgttaacattcaggcttttgtcttgatgcccgtcttttggtttacgtcatcattgtagccatatggtaaatttttatttgttaaatttttaaaaattacttagctcaaaatgtcagtggtaaatttttaaattgagtaaagtgattcttctttgctcttatttaaaatcgacagcatttctagttcctttgacattccatataatttttaggattagtttgtacttatttacaaaacagtcttgttcagatttttacagaaattgagttaagtctgtggattaatctgttaagaattggtatctttactatgttgggtcttgtagttcatgagtgcaggagtaggcctcttaatttataatagttaagcattccttaaagtatttcattaatgttaaaaattttcagcgtatagatccctatgcatttttgttagaatttgcatcctagggtgcttttttgtttgtgtgtgtgtgtaatttgagtgattgtaaatggcattgatgtttgaactttgaattgcacacaatttttggtagtatacagaaatataatatttttggacattgttttgctaccctgcaaccttattgagttcacttattatttttagctatttctttcgacagaatccttggaattttctatatagaaatgtcatctgcaaatacagaccattttttatctttcatcttacctgtaatataccttttatttcctttttgtttgtcttattgcattgcacaagctgggacttccattatagcgttgaataggaatagtgagaaaggccatccttacctggttcctgatagtaggggggacaatgttcagttttttgtttttttgttttttgtttgagacagggtctcgctctgtcacccaggctggagtgcagtggcacgatcttgtctcaccatagccttaagttcctgggctcaagtgatccccccacctcagccctcaccaccccccagtagctggtactacaagcatgcaccaccagtcccagctaatttttgtattttttggtagagacagggtttcaccatggtgcccaggctggtcttgaactcctgggctcaagcaacctgcttgcctgggtctcccaaagtgctgggattacaggcgtgagccacagtgcacagcatgttcagtttttcatcatgaagtataatgtaagttttataaaacatatgtcctctataagggtaaaaaatttcctctgttcccagttttctgagactctgtgttgctatgaataagtgtggaattttgttcagtactttttctccaccagttgatgtcattatgctattttccttctacatcctattgatggaatgtattgctttgatcaagttttgaatattgagccagccttgcatccttagaataaaccatacttgtttgtagagtataattgtttttatatatcatttgacatcattccctttgtttgtattttgttgaggaaatattcctctaatttattggctaataatgtgtagttcttttttcttttgtttcttatgttctaaatgtcttatgtgtggttttgatgtctaggtgatcttgacctttcaacatgaattggaaggagttctcttctaatttttggaagactgtgtagaattggtgttatttgttcttgtcatgtttgatgacctctagtcaaccattgggccagagatttttcttctggaggcttttaaattacatatttattttattggataggtagaactattcgaagtatctatttcttgtgtaataaattttgatagtctgtcctgttgaaggaatatttcatctgtatttgtagcactcccttattcttttgatagcaggatctgcacttctttttatttttaatatttaaaatgtgcatactcattttatgattgagtcttcttagacatttatcagttttattgcgcatcatgctgaaagatgtaatttttgcttcatctctcacttcagagaactagcactttatattaatgatttgtctctattcttgatttctttgatttctgctctgatcggtattatattccacttgctttggttgtatttggctctttctaacttttcaaggtggggttttagattattgatttgagatttttttgcttttttaatgtaagcattacattgtataaatttacctcatatcactattggtttgatcccacaagttttaatgttttcattacattttaattctaatagtttttattttttgagacattctctcttagccatgaattatttaatagtatgcttaattttctggtgtttggcatatttgttactgatttctaatttgttccatgtttgatctgactgtttaaatgtgttaacatttttttatgacccaggatagggtctatcttgtttcgtatagctgcttgaaaagaatgggtgttctgctgttactgggtggagtttctataaatgtctctatgatcctgctcattgttattcaagtcagctatgtccttgctgattttctgtccagcatttctgtcagttgctgagaggggtgttgaagtcctgaacataggccgggtgcagtggctcacgcctgtaatcctagcactttgagaccactaaggcaggtggatcacctgaggccaggagttcgagaccagcctggccaacatggcaaaaccctgtctactaaaaatacaaaaattagccaggcatggtggcgtgtgcctgtaatcccagctgctggggggctgaggcaggaggatcagttgaacgtgggaggcagaggttgcagtgagctgagatctcaccactgcactccagcctgggcaacagagcgagactctgtctcaacaacaacaacaaaaagtcctgaacatgattgtggaagtgtgttgctctttcaagttctatcactttttgtttgcaaagttcaaagctgtattgtttggtacatatacatgtaggtttgccaagtctttgtggtgaattgactcttctgtcattatgtgatgtcatttttttgccttttaatagtcttgtcaatactttacctgatgttctcatagtgactcctgcatattttgattaatgtttgcatggttaatatttcttcattttattttaaagcttacctgtatcattacttatgaagtcagtttctttgaacagcatatactcaggccatgctttttttattcattctgcatatgtctctcttaattggtatgttgaaatgatttacattaaaataattattgatattttagggcttaagtgtgcccttaaatgatttttgtgttcttttttattgttcctctgttatttggggttgtttactagtcttcctataggttacttcaccttttttttttttaataatttgatttgatacatatgtagtgttttttagtatagatcctccttgacttatgatggggttatgtcacaataaacccattgcaagttgaaaatactatgtcaaatatgcatttaatacacctaccctgctgaacatcatagccgatcttgccttcagaatgctcagaaaatttacattagcctgcagttgggcaaaatcatctaacacaaggcctactttataataaagttactgcaaagaattttaaataaaaattcaagtgtggtttctactgaatgcatgtcgcattcgcaccattgtaaagtcaagtagtaagtcgaaccatcctaagtcagggactgtctgtatatatctgcattttttagtgattgttctactattacagtgtaaatatataacttatgacagtttaataagttatcagcaatttagcactttacttccattaggttcctttagcttacctactaatgtaactatcttaagtaatagtaattcctcttcaaaaattgagcgctatgttgcaagatgtaatttttcttttccttttttttgagaccaagtctcactctgtcacccacgctggagtgctgtgatgcgatctcggctctctgcaacctctgcctcccgggttcaagcaattaactgcctcagcttccctagtaatggattacaggcgcccgccaccacgcctggctaatttttgtatttttagtagagacggggtttcaccatcttggccaggttggtcttgaactcttgacctcatgatccacccgcctcggccccccaaagtgctggggttacaggtgtgagccactgcacccggccacaagatgtaatttttactttatctctcacacgtattttacaaaacgtcatgagaaacattgtctcttgaccttttttttttttttttttttttaaagagacagagtctcactctgtcacccaggctggagtgcagtggcacgatcttggctcactgcaacctccgcctcctgggttcaagcgattctcctgcctcagcctcctgagtagctgggattacaggtgtgcgccgccacacccagctaattttgtatttttagtagagacggggtttcaccatgttgctcaggctggtctcaaactcctgaccttgtgatccgccaaccttggcctgtcgacctctttacccattccattgttcattcttctttcttgaaatcccaaaccttctattaacatttcttttcagttatacactgaactttactgtagcctttcttctagagtaacaaatgttctttgttttccttcctctaaagatgtctttatgtttccttcattcccaaagaatatttttgtggaatataagattcagagttggcagttgttttcttttagacttcagagatgtatctctctgttctgtacattattgtttaatataagaaacctactagcattcaaataatcattccctattttacaatgcatcagttctgtcaagcttcattcaaagtgtttttcattgtctctagtgttcagaagtttggctgtgatgtgcgtggcatggaagtttttgggtgtattctatttggcgctccctggtgcttgcccagctttttgatctgtaggattatgccttttgcaaaatttggggaactttcaactattatttcttcaaatattttttcaccccccagtcttgtcttttttagggacttcaataacatgagtggcagatcttgttttacactcccatgggtccttcaggctctcatcttttttctttttccagtctattttctgtcttgttaatattgattaatttttattgaccttccatggtcctcactgattgttttctttgtcatacctaatctgttgagtttgtgcagtgagttttcattttggttttgtattttccagttgtttaatttccattgggtgggttcttttgtacaccttctgtttctttgcttattttttaacgccaaagaaagactctcagagaatagacaactatattccaaagtcatggttctctggtggtttgtcttgacatttgaatagaaatgttaaactatctgggggaatagaaagcccacagtcttctgagttgtgctacaccaatatttctatgaacagatcttacaactgagagtgatctgcagatttttcagagtcatgttctccatggaatgtttgtaaaattccctagctctctgcactgagctgagatcgtgccactgcactccagcctgggcaacagagcgagactccatctcaaaaaaaaaaaaaattctctagctctctatgccttgttgtatcctcaggaaggagtcacctctcttccaggatcactcttgccttttgttattggacacattttcctacctcctgcccagtcttttttaggctctctgtcatacttcctcgcctagtctttaacttgtctctgataaccagatttttcccccataatctgtatctgtattcaagtctctatcctcatccccaaatggatttcaccccgcttgtccatcagtctctgcccatttcttctgtctcccacagacatggtctgtgtagttgttctgcacactacccgtcctcgccccttctcatttccctcactccacggacagctacaggagggcttccatcatttgtcctcttacttccttgttagaactttgtgctgctgaccaccactctgaaccaaaacttctttcttggttcttgaaagttgctgtctttctcctccagagggtctgtgtcttccttccaactcttaaacatttttgtttcccagaatccatcattggccattgctttttcacttgccatgagctctgtgaatgagatggttcctgctgaagacatttactttcaatgatctacagaatttcccaaatctatgtctccagactggatgtttctcacgtctgtggcccactgggcatcttctgcactttctctgcatttgtaaacactgagcctgtatgcgtgtctatgtggccatggccctggccgtggggatgcacccataattataatgagagcaggtgaatgtcatgtggctatgtatgagacattgttgtgaatgttttacatgcatcagctctttcaacatttacagcatctgtgtgtggtaggtaatgttgtttccttcattttgcagagcagaatatagataggctcaggttaagaatttgcccaaggttacacagttatgaagtttggatttaggaatgggaggccacgtagactggcttcagaattcatgtctttaaccactttattgcttctcatgttggggggtttgttttctggtcactatttttactaaagttgattcaacaatgctataatctgttactctcattcgacaatacatcttgactgtttcttcaacttgaggaaggtaaaccaaagccactctttaatgggtgcaaatatctgttgtaactatgtagaagatacagtgtctgggtttgaggacaggggagtgggaaaactgagtagggaagcggtaagacatgcatctggctttaggagtgtttgaagtgcctaaagatcagggtgaatttcccaaatttgaatcttgttgcccaagccacattgcaaccacctctttttctcttacctcgtccccacatccaggcactgccccattctgttcattccacctttttttttagtagaccctccatatatgtgtgtgttttggtgaatggccacacacagcaaagttatttttattgcaattttgttgttgttgtttgagacacagagtctcatactctgccacccagactgaagtgcagtggtgcgatctcagttcactgcaacctccatccccccatgttcaagcaattctcctgcctcagcctcccaagtagctgggattacaggcatgggccaccatgcccggctaatttttgtattttttgtagacacggggtttcaccatgttggccaggctggtctcacactcctgacctcaggtgatccacccgcctcggcctcccgaagtgctggcattacaggcatgagccaccacacccagcctttattgcaatttttggttccctcacagaatgtttaccatgaagctgtgcgtataggtggtaccatgtatgacataccttgacctcaaagataatctacctgggctttttttgtttgtttgttttgagatggagtctcactctgtcacccatgctggtgtgcagtggcgtgatcttggctcacagcagcctctgcctcccgggttcaagcgattctcctgcctcagcctcctgagtagctgggactacaggtgcctgcgaccacacccagctaatttttgtatttttagtagtagtgggatttcaccatgttggccaggatggcctccacctcctgacttcatgatccacccgcctcggcctcccaaagtgctgggattacaggcgtgagccaccgcacctggcctacctgggcttttttggacagatgtacatgattttagaaattgttatgaatgactgtcttgggatcctcaagaacacccccaggtttgacgatttgctgagaagactcaggtctcagcattctgtcatactcaacagctatgatttactgcagcaaaaaaatacaaagcaaatagtaaagggaaaaagccaaaattcagagaaaaccaggcacaatcttctgagtcttgtttcagtgaagtcacaggatgtgccttatttaagttccatctggtacttatgacaacacatgctatatgtccactgggaagcttattagagactcagtgccagggtttttattgggcatgttttctagcacatcccacaattctggacttccagaaggttagcaggggttcagcttttcagctgaaaacgttatccccctttcagctggggggaaaaaaaggcaccgaaaaacagggcagtgagctactcctgttttgggtgggtggagcagtagtaagcctcccaaaatctaaggtcccacactccagcaagggtgaaccttgcaaactcaaaaggatagcagtctccaacctgctgttttatacagtgacttaagtggtactaaaatgctatataagtcaaatttacgtaacattaagcaaataattttttttcagcaaaaaaataatggtcatgactttgtggtgaaggcttatgtaatgattgtaataaattcaggtggctcacgcctgtgataccagcacttttgggaggctgaggcgggtggatcacttgaggtcaggagtttgagaccagcctagccaacatggtgaaatcccatctctacaaaaatgaaaaattagccgggcgtagtggtacatgcatttagtcctagctacttgggaggctgaggcaggaaaatcgcttgaacctgggaggcagaggttgcagtgagccgagatcatgccactgcactccagcctgggtgacagagtgagactgtgtctcaaaaaaaaaaaaaaaaaaaaaatgcctcagttttgttaagaggaaaaagcaaatcctaagttacagtggaacttatgaacaccctagcctagagatttaatttagtgatgaaaaggtacagagagagtctttcaagaaaggacctagtctgctcgcgttctctctctctctctctctatatatatatatgtatatgtgtgtgtacatatggaccacttcaagctacacacacacacacacatatacacgtgtatgaatatatatatatggctataagtggtgcgacttgcaggtactccctttgttcacctttgtaaagatgttattgccagttcagtgtgtatttctatagtatatatgtaaacaatttgtcatccttttgttgctgcttttgaaactagttcatggcttcagtgggggagagatttaaataatatgggtttataatttctgcattattaaatgcagataacttgtgattaaagagtatgttattggaaaaaaaaaaa

SEQ ID NO: 990 - DNA, 3651 bp, Homo sapiens
aatcagcgatcagactccggagtttggcccgggagctggggagctcaccgatcccccgcccagcagttctggccgctgtcccggtgcgcacggacgtggctcgagtttcctctgctctccgctctcgcccgctagctctcctcccttccgctcctgcttctctccgggtctcccgctccagctccagccccacccggccggtcccgcacggctccgggtagccatggaggaccccacgctctatattgtcgagcggccgcttcccgggtaccccgacgccgaggccccggagccttcctccgctggggctcaggcagcggaggagccgtcgggggccggctcagaagagctgatcaagtcggaccaggtgaacggcgtgctggtgctgagcctcctggacaaaatcatcggggccgtagaccagatccagctgactcaagcacagctggaggagcggcaggcggagatggagggcgcagtgcagagcatccagggcgagctgagcaagctgggcaaggcgcacgccaccacgagcaatacggtgagcaagctgctggagaaggtgcgcaaggtcagcgtcaacgtgaagaccgtgcgcggcagcctggagcgccaggcggggcagatcaagaagctggaggtcaacgaggccgagctgctgcggcgccgcaactttaaagtcatgatctaccaggatgaagtgaagctgccggccaaactgagcatcagcaaatcgctgaaagagtcggaggcgctgccagagaaggagggcgaggagctgggcgagggcgagcggcccgaggaggacgcagcggcgctggagctttcgtcggacgaggcggtggaggttgaggaggttattgaggagtcccgcgcagagcgtatcaagcgcagcggcctgcggcgcgtggacgacttcaagaaggccttctccaaggagaagatggagaagaccaaggtgcgtacccgcgagaacctggagaagacgcgcctcaagaccaaggaaaacctggagaagacgcggcacaccctggagaagcgcatgaacaagctgggcacgcgcctggtgcccgccgagcggcgcgagaaactgaagacgtcgcgggacaagttgcgcaaatccttcacgcccgaccacgtggtgtacgcgcgctccaagaccgcggtctacaaggtgccacccttcaccttccacgtcaagaagatccgcgagggccaggtggaagtgctcaaggccaccgagatggtggaggtgggcgccgacgacgacgagggcggcgcggagcgcggggaggccggcgacctgcggcgcgggagcagccccgacgtgcacgcgctgctggagatcaccgaggagtcggacgccgtgctggtggacaagagcgacagcgactgagccgcccccgctgccacccaccccattcctcgctccttccgaacttcctctttcgcattctctctcggctcgagctggctgagatttttctaaattgaaaacacgcccccctccccacacctccaggaactccactcccagtcttagagctgttaggacccgatggggaggcagcccccgcagtggacaacccccgcttggacacagtccgagtggaatgggaagggaatggtcaatccctgtcctggttgtccaagtcgggatctcagaggaaattgcagtgattccacggttaggcccccctgggggggctgccttcccctcagcctctccccacaccacccacccagctgctgtcattccgctcactgagctcttcttcattctcaccctgatccctgggggactcaaagccaaaactgcccaaagaggaaagattgaatcctaaaggggatccctgcccccatgggaggccccctactagaaggacgtgaaagcagcttttgggggaaactgaggcagtggggaagacagagcagaatgagccctcaccctggctgggggtccagcacaggctgtatctgcagagggtcccagaggaacgctggagccaagagaagccctgggaaggaggggtggggaacgacatgcatgtgagggatggcacactgatgtgtttatgcacctgtacacaggagcgcatggccatggctttggaaaggagaatggaaaaatagaagaaggtcggccgggcttggtggcttatgcctgtaaccccagcactttgggaggccgaggtgggcggatcacctgaagtcaggagttcgggaccagcctggcaaacaccccatctctactaagcgaaaacccatctctactaaaattacaaaaattagctgggcatggttgcgcatgcctgtaatcccagctactttggaggctgaggtggggagaattgcttgaacctgggaggtggaggttgcagtgagccaaggtcgcgacactgcactccagcctgggtgacagagtgagactccatctcaacagaaggaaaaaaaaggaaaataggagaaggtggaaatgggtgaagagagaagtcccctcactagctgcatgagaaatctatcttactgtggttctccatgggcagcaggaccatttttcagaatcaagagggaggacagtgtgagaaggcgatgatccaaagaagacagagaggtcagccccacccgatccctcaaatgggctcttggaggcacccccaggggcagcccatttctcaaagtccagaaaattagggtcccagaagggggcagcagcaggctgggagttaggagggagagcagggtgccggccctgccaccaagttgagagctggaggggaggtggggagagaacatcacagagcagccagccctggttcactcctggcagtttcttctcaagctccttccctaggagcatggtggcacgtgcctgtggtctcagctacttgggaggctgaggcgggaggatcgccagagcccaggagtttgaggctgcagtgagctatgagggtgcctctgtgctccatcctaggcaacagagtgatacgctgtttaaaaaggaaaaaatccttccctagagctagtatcctaaagctgcagagctagcccagacctcattggtttccttgtccttggggtgcttttcctgaatctttgcgggtgaagggagtgttgctcccagtccagaggcctgattctgtttggactgggttctcaagacacgaccaggttctcaagacacgagtccccttgttcctccccattaaagggggtttgtcagaagcaagaacagcccctctccccagtcacagcctgaagggaggccccgagagcttcctccttccccccacctgctccttaccttctctgccctgctttttagaactgcagttcattgttttaagggattgggggagggagcctggggacacaaaccttttatacaatacaaagctttgctttttttttttttttcttccttttccctttctcggttctcttctctcctctgaatggctgaagacccctctgccgagggaggttggggattgtgggacaaggtcccttggtgctgatggcctgaaggggcctgagctgtgggcagatgcagttttctgtgggcttggggaacctctcacgttgctgtgtcctggtgagcagcccgaccaataaacctgcttttctaaaaggaaaaaaaaaaaaaaaaaa

SEQ ID NO: 991 - DNA, 2073 bp, Homo sapiens
gaatttagataatgggctgtgtgcaatgtaaggataaagaagcaacaaaactgacggaggagagggacggcagcctgaaccagagctctgggtaccgctatggcacagaccccacccctcagcactaccccagcttcggtgtgacctccatccccaactacaacaacttccacgcagccgggggccaaggactcaccgtctttggaggtgtgaactcttcgtctcatacggggaccttgcgtacgagaggaggaacaggagtgacactctttgtggccctttatgactatgaagcacggacagaagatgacctgagttttcacaaaggagaaaaatttcaaatattgaacagctcggaaggagattggtgggaagcccgctccttgacaactggagagacaggttacattcccagcaattatgtggctccagttgactctatccaggcagaagagtggtactttggaaaacttggccgaaaagatgctgagcgacagctattgtcctttggaaacccaagaggtacctttcttatccgcgagagtgaaaccaccaaaggtgcctattcactttctatccgtgattgggatgatatgaaaggagaccatgtcaaacattataaaattcgcaaacttgacaatggtggatactacattaccacccgggcccagtttgaaacacttcagcagcttgtacaacattactcagagaaagctgatggtttgtgttttaacttaactgtgattgcatcgagttgtaccccacaaacttctggattggctaaagatgcttgggaagttgcacgtcgttcgttgtgtctggagaagaagctgggtcaggggtgtttcgctgaagtgtggcttggtacctggaatggaaacacaaaagtagccataaagactcttaaaccaggcacaatgtcccccgaatcattccttgaggaagcgcagatcatgaagaagctgaagcacgacaagctggtccagctctatgcagtggtgtctgaggagcccatctacatcgtcaccgagtatatgaacaaaggaagtttactggatttcttaaaagatggagaaggaagagctctgaaattaccaaatcttgtggacatggcagcacaggtggctgcaggaatggcttacatcgagcgcatgaattatatccatagagatctgcgatcagcaaacattctagtggggaatggactcatatgcaagattgctgacttcggattggcccgattgatagaagacaatgagtacacagcaagacaaggtgcaaagttccccatcaagtggacggcccccgaggcagccctgtacgggaggttcacaatcaagtctgacgtgtggtcttttggaatcttactcacagagctggtcaccaaaggaagagtgccatacccaggcatgaacaaccgggaggtgctggagcaggtggagcgaggctacaggatgccctgcccgcaggactgccccatctctctgcatgagctcatgatccactgctggaaaaaggaccctgaagaacgccccacttttgagtacttgcagagcttcctggaagactactttaccgcgacagagccccagtaccaacctggtgaaaacctgtaaggcccgggtctgcggagagaggccttgtcccagaggctgccccacccctccccattagctttcaattccgtagccagctgctccccagcagcggaaccgcccaggatcagattgcatgtgactctgaagctgacgaacttccatggccctcattaatgacacttgtccccaaatccgaacctcctctgtgaagcattcgagacagaaccttgttatttctcagactttggaaaatgcattgtatcgatgttatgtaaaaggccaaacctctgttcagtgtaaatagttactccagtgccaacaatcctagtgctttccttttttaaaaatgcaaatcctatgtgattttaactctgtcttcacctgattcaactaaaaaaaaaaaagtattattttccaaaagtggcctctttgtctaaaacaataaaattttttttcatgttttaacaaaaaccaa

SEQ ID NO: 992 - DNA, 2884 bp, Homo sapiens
tcgattctcaagagggtttcattggtctcaacctggccccccaggcaacccacccctgattggacagtctcatcaagaaggttggtcaagagctcaagtgtttctgagaatctgggtgatttataagaaacccttagctgaatgcagggtggggagaacgaaagacaaaagcatcttttttcagaagggaaactgaaagaaagaggggaagagtattaaagaccatttctggctgggcagggcactctcagcagctcaactgcccagcgtgaccagtggccacctctgcagtgtcttccacaacctggtcttgactcgtctgctgaacaaatcctctgacctcaggccggctgtgaacgtagttcctgagagatagcaaacatgcccaacagtgagcccgcatctctgctggagctgttcaacagcatcgccacacaaggggagctcgtaaggtccctcaaagcgggaaatgcgtcaaaggatgaaattgattctgcagtaaagatgttggtgtcattaaaaatgagctacaaagctgccgcgggggaggattacaaggctgactgtcctccagggaacccagcacctaccagtaatcatggcccagatgccacagaagctgaagaggattttgtggacccatggacagtacagacaagcagtgcaaaaggcatagactacgataagctcattgttcggtttggaagtagtaaaattgacaaagagctaataaaccgaatagagagagccaccggccaaagaccacaccacttcctgcgcagaggcatcttcttctcacacagagatatgaatcaggttcttgatgcctatgaaaataagaagccattttatctgtacacgggccggggcccctcttctgaagcaatgcatgtaggtcacctcattccatttattttcacaaagtggctccaggatgtatttaacgtgcccttggtcatccagatgacggatgacgagaagtatctgtggaaggacctgaccctggaccaggcctatagctatgctgtggagaatgccaaggacatcatcgcctgtggctttgacatcaacaagactttcatattctctgacctggactacatggggatgagctcaggtttctacaaaaatgtggtgaagattcaaaagcatgttaccttcaaccaagtgaaaggcattttcggcttcactgacagcgactgcattgggaagatcagttttcctgccatccaggctgctccctccttcagcaactcattcccacagatcttccgagacaggacggatatccagtgccttatcccatgtgccattgaccaggatccttactttagaatgacaagggacgtcgcccccaggatcggctatcctaaaccagccctgctgcactccaccttcttcccagccctgcagggcgcccagaccaaaatgagtgccagcgaccccaactcctccatcttcctcaccgacacggccaagcagatcaaaaccaaggtcaataagcatgcgttttctggagggagagacaccatcgaggagcacaggcagtttgggggcaactgtgatgtggacgtgtctttcatgtacctgaccttcttcctcgaggacgacgacaagctcgagcagatcaggaaggattacaccagcggagccatgctcaccggtgagctcaagaaggcactcatagaggttctgcagcccttgatcgcagagcaccaggcccggcgcaaggaggtcacggatgagatagtgaaagagttcatgactccccggaagctgtccttcgactttcagtagcactcgttttacatatgcttataaaagaagtgatgtatcagtaatgtatcaataatcccagcccagtcaaagcaccgccacctgtaggcttctgtctcatggtaattactgggcctggcctctgtaagcctgtgtatgttatcaatactgtttcttcctgtgagttccattatttctatctcttatgggcaaagcattgtgggtaattggtgctggctaacattgcatggtcggatagagaagtccagctgtgagtctctccccaaagcagccccacagtggagcctttggctggaagtccatgggccaccctgttcttgtccatggaggactccgagggttccaagtatactcttaagacccactctgtttaaaaatatatattctatgtatgcgtatatggaattgaaatgtcattattgtaacctagaaagtgctttgaaatattgatgtggggaggtttattgagcacaagatgtatttcagcccatgccccctcccaaaaagaaattgataagtaaaagcttcgttatacatttgactaagaaatcacccagctttaaagctgcttttaacaatgaagattgaacagagttcagcaattttgattaaattaagacttgggggtgaaactttccagtttactgaactccagaccatgcatgtagtccactccagaaatcatgctcgcttcccttggcacaccagtgttctcctgccaaatgaccctagaccctctgtcctgcagagtcagggtggcttttcccctgactgtgtccgatgccaaggagtcctggcctccgcagatgcttcattttgacccttggctgcagtggaagtcagcacagagcagtgccctggctgtgtccctggacgggtggacttagctagggagaaagtcgaggcagcagccctcgaggccctcacagatgtctaggcaggcctcatttcatcacgcagcatgtgcaggcctggaagagcaaagccaaatctcagggaagtccttggttgatgtatctgggtctcctctggagcactctgccctcctgtcacccagtagagtaaataaacttccttggctcctgct

SEQ ID NO: 993 - DNA, 971 bp, Homo sapiens
cactcgttgcataaatttgcgctccgccagcccggagcatttaggggcggttggctttgttgggtgagcttgtttgtgtccctgtgggtggacgtggttggtgattggcaggatcctggtatccgctaacaggtcaaaatgcagatcttcgtgaaaacccttaccggcaagaccatcacccttgaggtggagcccagtgacaccatcgaaaatgtgaaggccaagatccaggataaggaaggcattccccccgaccagcagaggctcatctttgcaggcaagcagctggaagatggccgtactctttctgactacaacatccagaaggagtcgaccctgcacctggtcctgcgtctgagaggtggtatgcagatcttcgtgaagaccctgaccggcaagaccatcaccctggaagtggagcccagtgacaccatcgaaaatgtgaaggccaagatccaggataaagaaggcatccctcccgaccagcagaggctcatctttgcaggcaagcagctggaagatggccgcactctttctgactacaacatccagaaggagtcgaccctgcacctggtcctgcgtctgagaggtggtatgcagatcttcgtgaagaccctgaccggcaagaccatcactctggaggtggagcccagtgacaccatcgaaaatgtgaaggccaagatccaagataaagaaggcatcccccccgaccagcagaggctcatctttgcaggcaagcagctggaagatggccgcactctttctgactacaacatccagaaagagtcgaccctgcacctggtcctgcgcctgaggggtggctgttaattcttcagtcatggcattcgcagtgcccagtgatggcattactctgcactatagccatttgccccaacttaagtttagaaattacaagtttcagtaatagctgaacctgttcaaaatgttaataaaggtttcgttgcatggta

SEQ ID NO: 994 - DNA, 2428 bp, Homo sapiens
gcgctgtcggatacttggggtgagcggaaagcatggcggggacctccgcgccaggcagcaagaggcggagcgagcccccggcgcctcgccccggcccgccgccgggcaccgggcaccccccgagcaagcgggcccggggcttctccgcagccgctgccccggaccctgacgacccgttcggcgcgcatggggacttcactgccgacgacctggaggagcttgacaccctcgcgtcacaggccctgagccaatgtccggccgcggctcgggacgtgtccagtgatcataaggtccacagattattagatggcatgtcaaaaaatccttcagggaaaaacagagaaactgttccaattaaagataatttcgaattagaggtacttcaggcacaatacaaagaacttaaagaaaagatgaaagtaatggaagaagaagttctcattaagaatggagaaattaaaattttgcgagactcactacatcagacggaatccgttctagaggaacagagaagatcacattttcttcttgagcaagagaaaacccaagcactcagtgacaaggaaaaggaattctccaaaaagctccaatcattgcagtctgaactccagtttaaagatgcagagatgaatgaattaaggacaaagctccagaccagtgaacgagcaaataaactggctgctccctctgtttcccatgtcagtcctaggaaaaacccttctgtggttataaagccagaagcatgttctccacaatttggaaaaacatcttttcctacaaaggagtcttttagtgctaacatgtcccttccccacccctgccagacggagtcaggatacaagcctctggtgggcagagaggatagtaagccccacagtctgagaggtgactccataaaacaagaagaggcccagaaaagctttgttgacagctggagacagagatcaaacactcaaggttccattttgataaacctgctcctgaagcagcctttgatcccagggtcatccctaagcctttgccacctcctgagtagtagttctgagtctcctgctggcacccccctgcagccaccagggtttggcagtaccttggctggaatgtcaggcctcaggaccacaggttcttatgatgggtcattttccctctcagccctgagagaagcacagaacctggcattcactggactgaatctggttgcccggaatgagtgctcacgtgatggagacccagcagagggaggcagaagggccttcccactctgccagcttcctggagccgtgcatttcctcccccttgtacagttcttcatcggcttacactgccaggccctgcaggacttggcagctgctaagagaagcggagcacctggggactcaccgacacattcctcctgcgtgagctctggggtagagaccaaccctgaggactcagtgtgcatcctggaaggcttctctgtgactgcacttagcattcttcagcacctggtgtgccacagcggagcagtcgtctccctattactgtcaggagtgggggcagattctgctgctggggaaggaaacaggagcctggttcacaggcttagtgatggagatatgacctcagccctaaggggggttgctgatgaccaaggacagcacccactgttgaagatgcttcttcacctgttggctttctcttctgcagcaacaggtcaccttcaagccagtgtcctgacccagtgccttaaggttttggtgaaattagccgaaaacacttcctgtgatttcttgcccaggttccagtgtgtgttccaagtgctgccaaagtgcctcagcccagagacacccctgcctagcgtgctgctggctgttgagctcctctccctgctggcggaccacgaccagctggcacctcagctctgttcccactcagaaggctgcctcctgctgctgctgtacatgtacatcacatcacggcctgacagagtggccttggagacacaatggctccagctggaacaagaggtggtcagagcgctcacggtgatgttgcacagacagtggctgacagtgcggagggcagggggacccccaaggaccgaccagcagaggcggacagtgcgctgtctgcgggacacggtgctgctgctgcacggcctatcgcagaaggacaagctcttcatgatgcactgcgtggaggtcctgcatcagtttgaccaggtgatgccgggggtcagcatgctcatccgagggcttcctgatgtgacggactgtgaagaggcagccctggatgacctctgtgccgcggaaaccgatgtggaagaccccgaggtggagtgtggctgaggccctgagtgtccagccacatggtggcaccagcaccactcctttccttaccacatcaactgattaaagcagtgaccagcaggaactgcccagagaactgg

SEQ ID NO: 995 - DNA, 1953 bp, Homo sapiens
agtcgtctttgtgagcccgccccggcggggaggagctgcccggctcaggccccgcccacccggaggatcttggggctggtctgagtccgctcctgagacgtgaccacccgccccgcatggggccccagtcccagctgcttgatccggctcagccccgaggtgtttgcagcagctctttatgaaagtccagccatctgttacctgcgttgcttcctggggagggatagtccacctggaggcattcggagacccagtgattgtgctccgcggagcctgggctgtgccccgcgttgactgcctcatagataccctacgaaccccaaatgccagctgcatgagaaaagggactcaccttctggttccctgcctggaagaggaagagctggcattgcacaggagacggctggacatgtctgaggcactgccctgcccgggcaaggagacccccaccccaggctgcaggctgggggccctgtattgggcctgtgtccacaatgatcccacccagctccaagccatactggatggtggggtctccccagaggaggccacccaggtggacagcaatgggaggacaggcctcatggtcgcatgctaccacggcttccagagtgttgtggccctgctcagccactgtcctttccttgatgtgaaccagcaggacaaaggaggggacacggccctcatgttggctgcccaagcaggccacgtgcctctagtgagtctcctgctcaactactatgtgggcctggacctggaacgccgggaccagcgggggctcacggcgttaatgaaggctgccatgcggaaccgctgtgctgacctgacagcagtggaccctgttcggggcaagacggccctggaatgggcagtgctgaccgacagcttcgacaccgtgtggaggattcggcagctgctgaggcggccccaagtggagcagcttagccagcactacaagcccgagtggccggccttgtccgggctcgtggcccaggcccaggcccaggcccaggttgccccttcactcctagaacggctgcaggctaccttgagcctcccctttgccccgtctcctcaggaggggggtgttctggaccaccttgtgactgccacaaccagcctggccagtcccttcgtcaccactgcctgccacactctgtgccctgaccatccaccttcgctgggcacccgaagcaagtccgtgccagagctgttaggtactgccccgccccctcccctggttccccagtccccgccagggagtccccagaggtccccgtgggtcttcgtcccctaccagagccctcagggcatattgagcaagtgccttcagtggctacaacccagggatagcaccagccccaggccccaagtccccaagatcctcctctccaaggcatcctcatcctcccaccagtgccagccgaagcccagtccttcaggacaccaaagtctggcccttcctctctggcgataccaggagctcaggatagagaagaggaaacaggaggaggaggccagaatggcacagaagtaggggaagatgggataggacaggctgggaacaggtaatcaggcccctcccagggcttctttcccctctggagtgcctccggcctccccatccacctctgcctaagtaaatctgctctcaacctatatatatacaaggtcattcattctagcattgtttgcaagagtgaaagagtggaaacacccgaagtgtccatcagtaagggacaggctagattgattacggatgtaattgctgtccatccatacagagcatactctacagtgtattctaaaataagactaaggaagctgtttatattctgatatgaaactaccatcaagatgtataaagtaaaaataactaaggagtggaacagtgtatatggcatattattatttgtcgaagtaaaattttcacgaagataaacatgactaaga

SEQ ID NO: 996 - DNA, 1202 bp, Homo sapiens; identical to SEQ ID NO: 137

SEQ ID NO: 997 - DNA, 4140 bp, Homo sapiens
gaagccagaggctgggggagctgctggagcctcgcgaagccgcggccggcgccctgcgccgtcgccgccgcctgctagtttcctccgggttctcagccccgggtactgaggcttcggtctataaatagcaggttacagctcctcctgggcgcgcacacgctcacacgctcgcaagcgaacgcaggaaagtcaggctaaaagtgtctgctgctgctgccgccccccactccgcctccgggagagaatacaaagaaatggtgttacctggcaagaggtcttctgtcttttatgaaaaattagacaaaggctttacaggaggcatagtactggaaatctgctcctgatgaggtctcagaaagcttccactcgtggtggaaggcaaaggaggagcaggcacatcacatgagccttgaaaccagcgaaacaataatcaaagagcagttctgtcaaagaaaacaacataaatcaggtacagaatttcagagtgggatatcagatctttagtgtgaagatacatctacattaaaccaggaatcactagaactgacatttggacaagaaaatttggaaaattttaaaactgtgaaggttgatcatggaaattaaagaggaaggggcatcagaagaagggcagcactttcttcctacagcccaggccaatgatcccggggactgtcagttcacaagtatccagaagactccaaatgaaccgcagttggaattcatccttgcatgcaaggatctcgtggctcctgtccgtgatcgtaaactgaatacactggtgcagatctccgtaatccaccccgtggagcagagtctgacaagatactccagcaccgaaattgtggagggaacaagggacccactgtttttgactggtgtcacattcccatctgagtatcccatctatgaggagaccaaaataaaactaacagtctatgatgtcaaggataagtctcatgacaccgttcgaaccagtgtcctaccagaacataaggatcccccgccagaagttgggcgaagtttcttgggctatgccagttttaaagtgggagagctgctgaagtcaaaggagcaattgctggtcctgagcctgagaacttcagatggtggcaaagtggttggcaccatagaagtcagtgtcgtgaagatgggggagattgaggatggggaagccgaccacatcaccacagatgtacagggacaaaagtgtgccctggtatgtgaatgtacagccccggaaagtgtgagcggaaaagataacttaccttttttgaattcagtgttaaagaacccagtatgtaaattatatagatttcccacatctgacaataagtggatgcgaattcgagagcagatgtcagagagcattctttcctttcatattcctaaggaattgatttcccttcacattaaagaagatttgtgcagaaaccaggagataaaagaacttggtgagctttctccacattgggacaatctgcgaaaaaatgtccttactcactgtgatcaaatggtgaatatgtaccaagacattctgacagaacttagcaaggaaacagggtcctctttcaaatcaagcagcagcaaaggagagaaaacattagaatttgttccaataaatctacatctgcaaagaatgcaggtacacagccctcacttgaaagatgctctctacgatgtcatcactgtgggagccccagctgcccattttcagggatttaagaatggtggtcttcggaagctactccatagatttgaaacagaaagaagaaataccggataccagtttatttactattcacctgaaaacacagccaaagcaaaggaagttctcagcaacatcaatcaactacaacctcttatagcaacccatgcagacctactgcttaattctgcaagccagcattctccagacagcttgaagaattctttaaagatgctttcagaaaaaacagagctttttgtacatgccttcaaggatcaacttgtcaggagtgctcttttagcactctacactgcaaggccaggaggcattcttaagaagccaccctctcctaagagcagcacagaggagagcagtccccaagaccaacccccagtgatgagagggcaggactccataccacatcattcagactatgatgaggaagagtgggacagggtgtgggccaatgtggggaagagcctgaactgcattattgctatggtggacaaactgattgaaagagatggtggcagtgaaggcagtggcggcaacaatgatggagaaaaggaaccttcattaacagatgccattccctctcacccaagagaggactggtatgaacagttgtatcccctcatccttaccctgaaggactgcatgggagaagtggtgaaccgagccaagcagtccctgacatttgtgctccttcaggaacttgcgtacagcttgccccagtgtctgatgctgacgctaagaagagacatcgtcttcagccaagcacttgctggattggtttgtggttttatcatcaaattacagacaagtctgtatgacccaggcttcctacagcagcttcacacagtggggttgatagtacaatatgaaggactgctaagtacatacagcgatgaaattggaatgctagaggacatggccgttggcatttccgatttaaagaaagttgcatttaaaataattgaagccaaatccaatgatgtgttgccagttataacaggaagacgagaacattacgtggtagaggtcaagcttccagccagaatgtttgagtcactacctctacagattaaagaaggacagttgcttcatgtgtatccagtactttttaatgttggaatcaatgaacagcaaactctggctgaaaggtttggagatgtctctttgcaagaaagtattaatcaggaaaacttcgaacttctacaagaatattacaagatatttatggaaaagatgcctcctgattatatttcacattttcaggaacaaaatgatttaaaagcattgctagaaaatctccttcaaaatatccaatccaaaaaaagaaagaatgtagaaattatgtggctggctgcaacgatttgccgcaaactgaatggtattcgtttcacctgttgtaaaagtgccaaagacaggacatcgatgtcagtgacacttgaacaatgctcaatcttgagagatgagcaccagttacacaaggacttctttatccgagcgctggattgcatgagaagagaaggatgccgcatagagaatgtactgaagaatatcaaatgcagaaagtatgctttcaacatgctacagctgatggctttccccaagtactacagacctccagaggggacttatggaaaagctgacacctaagtttaccaacatgttaataaacaggaacacaaatacatttcagttggataatcttcaccttggtcttttttgtttgtttttattgtcatgaatttgtggtgggggagatgatcacagatgtttcccaaaatctaggaactacttcaattcatcatcagcatattgctctgaaagaaatccattttaaaaaatcttacatgattcagtactgtcatttctagttctaagcttctatgtgttgagcctagctgattgagattggttcacaaagtgtaaatttcattcatgagtatttaaatgtttctgaggaaacatggatcatttcaataggactaggggtgattcacagagcaccactctccaaccaaatggaagagaggagagggggaaaaggaacatattttttttgtgatacaacttaatagcctatgagaacacagtcaacctgagaatcaatgtaagggatttaaaaaaaatgtgtagccactcaattaggtagagttaactcatgatctggaatactgaggcagtttgcaggtatgttccacaatgatctctatcatccagtcaaggtgtgactcctcccttgcaacaggcatatgcatggagtgagtaaagtggtcaacagacctttcaaaaccatggcatcttttcagaactctgacttgggttgtgtgatctagctgtgaatgtagcaatatagaacgtttaatagaatgataagcaaaacactgcaatgatctaaaattacaaaaaaaaaaaaaaaaaaa

SEQ ID NO: 998 - DNA, 2737 bp, Homo sapiens
ctgaacctcagccgcgccgggaggcgagcccgttggcgaggggcggggcagatggcgagggagcggggcgagctgctttttgaggctgcgcactcgcatggccccacctcgcaggtccacttccggcgccgcggctgttccgggcggagaccgcttgtgctggagtcggagttgtaacgctccactgactgatagagcgaccggccgaccatggcgcccggagtggcccgcgggccgacgccgtactggaggttgcgcctcggtggcgccgcgctgctcctgctgctcatcccggtggccgccgcgcaggagcctcccggagctgcttgttctcagaacacaaacaaaacctgtgaagagtgcctgaagaacgtctcctgtctttggtgcaacactaacaaggcttgtctggactacccagttacaagcgtcttgccaccggcttccctttgtaaattgagctctgcacgctggggagtttgttgggtgaactttgaggcgctgatcatcaccatgtcggtagtcgggggaaccctcctcctgggcattgccatctgctgctgctgctgctgcaggaggaagaggagccggaagccggacaggagtgaggagaaggccatgcgtgagcgggaggagaggcggatacggcaggaggaacggagagcagagatgaagacaagacatgatgaaatcagaaaaaaatatggcctgtttaaagaagaaaacccgtatgctagatttgaaaacaactaaagcgctccagcacatcagtcccgacgcttcctgtgaggtgcacgctccgcagcccagcccagccgggagaccacgtggccattgcggtctcctgaccttggccagtgaacctgccagccttccaggacaggcggccggagagctgcccctgaaggacagtcctctcgtcttgcagactggtgaccttctattccctgttcatctctgtttctagatttagtcacttgaaataagaaatctttggggtttgggcttttttatactcttctcagtttgtgaaacgctaactgcacacgaagccgcctgacggcacccagcgctgtggctgtcattctcccagggcagaaccctgcgtttctctctgtccactaacaagcttcacacgcaacacagggaagtcggtttgacttttgtcatgaggagaactgaccagccctcatcattccccataaaaccacggacagcgtctgtgtgcgcatcttgagtcttcacacctgttgactcacacggcttttgctgatgacacggggctccagtacacagtctgataaggacttaacgtcctaacctcaattgtattaaatagcattggggaatagctaaacctttttaaaaaaatttattggattttcctccctgcttaaaagatttcaccagaaaaccttcatataaaaattcaggccctttttggacaatttttaaaatttgtatctttactagaacatgagaatctttttcccttggaagcttgaattataaatgtggtgtttggcctgcctcagcagcaccagttgactgctcgtgtgccagcggtgtggggaggacggggcaggacgctgcagctctctccagccctgttggcatcctcagtgcctgcaggcctctcgctgcctgttgggctgtctggggggtggccatttagggatcgtggggacggggtccaccccaagaagaaagaaaggcccgtccacaggcccggctctgggccacgtgccccggaagcaggtgtgtccagagtcagctgagggctctccccacaccacccagcaggcgctggtgctccttctgcctcatgggaccagtccagcttccagccgctctggctcgagggtggtctgagcacttccttctgagtgggcttctctgggagctctccagtggcactgctggacctgcccacgtttctgtaaaatcaggatacgtggctttagtaagcagaccaagcgcttcgtggcagggaaagcagcgtgcggggaagtcactgaaaagtgctgcctaaggaagtttggaaatagtccccgttccagattgccttgaattttaaaacattttgctttgggaaagtaggtcagcagcacctaagatcaaggatgcgttccattttcacacttcacagtcatgaaaactgagaagactgtcttcagcgtgaactaaagttcacaggcagatcactgatccagaacacttcaagaactcgtcaaacagctcgataagcctttttgactgtgtacatctgtaccgggaataacattcctaggctgaaatttccacaaagaatagaacctgtacccagttcttcaggctgatttccctgacctcttgggcatttgtatttgtagtaaagtattgcagagattcctaagtattttatagcagccatcaaaattggactttgtattgtttattcataaaagacacttggtaatagacttcagtgaactctgtatgaatgcagtagtgtgcgtgcaaaatccgcttcctgagcgtagggtgctgagctggcgctagggctcggttgtgaaatacagcgtagtcagcccttgcgctcagtgtagaaacccacgtctgtaaggtcggtcttcgtccatctgcttttttctgaaatacactaagagcagccacaaaactgtaacctcaaggaaaccataaagcttggagtgccttaatttttaaccagtttccaataaaacggtttactacctga

SEQ ID NO: 999 - DNA, 2114 bp, Homo sapiens
agtgcccgcccgtcggcacgtggctccgcctactcgggggaggaacttaaagggccggctgtttcggcggccgcgggatgcccctgcgctgaccgccaggggcaggtgcccgcccgcgtagacgcacccggcctgaccccgcgccaccatgtaaacggcgccagcaggcggacgctggcttctccgcctgggacccctccgccccgacccgggccccgcggccctcgatgaggacacaccatgctgaccggggtgaccgacggtatcttctgttgcctgctgggcacgccccccaacgccgtggggccactggagagcgtcgagtccagcgatggctacacctttgtagaggtcaagcccggccgcgtgctgcgggtgaagcatgcaggacccgccccagccgctgccccacctccaccatcatccgcatcctcggatgcagcccagggggacctctccggcttggtccgctgtcagcgccggatcaccgtgtaccgcaatgggcggttgctggtggaaaacctgggccgagcccctcgagccgacctcctacacgggcagaatggctctggggagccgccggccgccctggaggtggagctggcagatccggcgggcagcgatggccgcttggcccccggcagcgcaggcagcggcagcggcagtggcagtggtgggcggcggcggcgagccaggcgccccaagaggaccatccatattgactgtgagaagcgcatcactagctgcaaaggcgcccaggccgacgtggtgctctttttcatccatggtgtcggcggttccctggccatctggaaggagcagctggacttctttgtgcgcctaggctatgaggtggtggctcctgacctggccggccacggggccagctctgcgccccaggtggccgcagcctacaccttctatgcgctggctgaggacatgcgagcaatcttcaagcgctatgccaagaagcgaaatgtgctcattggccattcctacggtgtctctttctgcacattcctggcacatgagtacccagacctagtgcacaaggtgatcatgatcaatggcgggggccctacggcgctggagcccagcttctgctcaatcttcaacatgcccacctgcgtcctgcactgcttgtcgccctgcctggcctggagcttcctcaaggccggcttcgcccgccaaggagccaaggagaagcagctgttaaaggagggcaacgctttcaacgtgtcatccttcgtactccgggccatgatgagcggccagtactggcccgagggcgacgaggtctaccacgccgagctcaccgtgcccgtcctgcttgtccacggcatgcacgataagtttgtgccggtggaggaagaccagcgcatggccgagatcctgctcctggcattcctgaagctcatcgacgagggcagccacatggtgatgctggaatgccctgagacggtcaacacgctgctccacgaattcctgctctgggagcccgagccctcgcccaaggctctaccggagccactgccggcgcctccagaagacaagaagtagccgctgggccggcggggcatcgcttggtgagcacagccgcagcaggaggaggcccgagcctgcgccaggtctgcagcgcagaccacctgggcgggccgttcgctccggtgggcggggccaggtcagggagacgcccccaggctgcctgggcggggcgtggcatccgagggagcccagcggacattccgctctccgcttccgtcccgcggggcccatcggcgttttggggccgcagccgggaccctcacggaagatgaccttgtacagaagctctccctcaccttccccccaacgccacggccaaggcaggccccccaccccgctgtcttccgtgtcagccgtgcttgatcctgggacccacgagccccacagggaccctcgaggccccatcccgttatccgagacccttcctaccccccattcctcggcgctgggagctatttttgcccaagggggggggatgggggggctggcgccaccgaacctgcacatctcaacttgtaactcaataaacagaagtgacaatcggaaaaaaaaaaaaaaaaaaaaaaaaa

SEQ ID NO: 1000 - DNA, 3858 bp, Homo sapiens
gccaggccggccaggcctgcgccgccgccgccgccgccgtcgccgccgcgccgaccatgtcggcagccaaggagaacccgtgcaggaaattccaggccaacatcttcaacaagagcaagtgtcagaactgcttcaagccccgcgagtcgcatctgctcaacgacgaggacctgacgcaggcaaaacccatttatggcggttggctgctcctggctccagatgggaccgactttgacaacccagtgcaccggtctcggaaatggcagcgacggttcttcatcctttacgagcacggcctcttgcgctacgccctggatgagatgcccacgacccttcctcagggcaccatcaacatgaaccagtgcacagatgtggtggatggggagggccgcacgggccagaagttctccctgtgtattctgacgcctgagaaggagcatttcatccgggcggagaccaaggagatcgtcagtgggtggctggagatgctcatggtctatccccggaccaacaagcagaatcagaagaagaaacggaaagtggagccccccacaccacaggagcctgggcctgccaaggtggctgttaccagcagcagcagcagcagcagcagcagcagcagcatccccagtgctgagaaagtccccaccaccaagtccacactctggcaggaagaaatgaggaccaaggaccagccagatggcagcagcctgagtccagctcagagtcccagccagagccagcctcctgctgccagctccctgcgggaacctgggctagagagcaaagaagaggagagcgccatgagtagcgaccgcatggactgtggccgcaaagtccgggtggagagcggctacttctctctggagaagaccaaacaggacttgaaggctgaagaacagcagctgcccccgccgctctcccctcccagccccagcacccccaaccacaggaggtcccaggtgattgaaaagtttgaggccttggacattgagaaggcagagcacatggagaccaatgcagtggggccctcaccatccagcgacacacgccagggccgcagcgagaagagggcgttccctaggaagcgggacttcaccaatgaagcccccccagctcctctcccagacgcctcggcttcccccctgtctccacaccgaagagccaagtcactggacaggaggtccacggagccctccgtgacgcccgacctgctgaatttcaagaaaggctggctgactaagcagtatgaggacggccagtggaagaaacactggtttgtcctcgccgatcaaagcctgagatactacagggattcagtggctgaggaggcagccgacttggatggagaaattgacttgtccgcatgttacgatgtcacagagtatccagttcagagaaactatggcttccagatacatacaaaggagggcgagtttaccctgtcggccatgacatctgggattcggcggaactggatccagaccatcatgaagcacgtgcacccgaccactgccccggatgtgaccagctcgttgccagaggaaaaaaacaagagcagctgctcttttgagacctgcccgaggcctactgagaagcaagaggcagagctgggggagccggaccctgagcagaagaggagccgcgcacgggagcggaggcgagagggccgctccaagacctttgactgggctgagttccgtcccatccagcaggccctggctcaggagcgggtgggcggcgtggggcctgctgacacccacgagcccctgcgccctgaggcggagcctggggagctggagcgggagcgtgcacggaggcgggaggagcgccgcaagcgcttcgggatgctcgacgccacagacgggccaggcactgaggatgcagccctgcgcatggaggtggaccggagcccagggctgcctatgagcgacctcaaaacgcataacgtccacgtggagattgagcagcggtggcatcaggtggagaccacacctctccgggaagagaagcaggtgcccatcgcccccgtccacctgtcttctgaagatgggggtgaccggctctccacacacgagctgacctctctgctcgagaaggagctggagcagagccagaaggaggcctcagaccttctggagcagaaccggctcctgcaggaccagctgagggtggccctgggccgggagcagagcgcccgtgagggctacgtgctgcaggccacgtgcgagcgagggtttgcagcaatggaagaaacgcaccagaagaagattgaagatctccagaggcagcaccagcgggagctagagaaacttcgagaagagaaagaccgcctcctagccgaggagacagcggccaccatctcagccatcgaagccatgaagaacgcccaccgggaggaaatggagcgggagctggagaagagccagcggtcccagatcagcagcgtcaactcggatgttgaggccctgcggcgccagtacctggaggagctgcagtcggtgcagcgggaactggaggtcctctcggagcagtactcgcagaagtgcctggagaatgcccatctggcccaggcgctggaggccgagcggcaggccctgcggcagtgccagcgtgagaaccaggagctcaatgcccacaaccaggagctgaacaaccgcctggctgcagagatcacacggttgcggacgctgctgactggggacggcggtggggaggccactgggtcaccccttgcacagggcaaggatgcctatgaactagaggtcttattgcgggtaaaggaatcggaaatacagtacctgaaacaggagattagctccctcaaggatgagctgcagacggcactgcgggacaagaagtacgcaagtgacaagtacaaagacatctacacagagctcagcatcgcgaaggctaaggctgactgtgacatcagcaggttgaaggagcagctcaaggctgcaacggaagcactgggggagaagtcccctgacagtgccacggtgtccggatatgatataatgaaatctaaaagcaaccctgacttcttgaagaaagacagatcctgtgtcacccggcaactcagaaacatcaggtccaagagtctgaaggaaggcctgacggtgcaagaacggttgaagctctttgaatccagggacttgaagaaagactaggtgtgtcccatccaagttgagcacgcgccttccccagcttgcagcagcacaccccaagcgctgcttttcacctgtacctttgttttattattattattattattgctgttgttgtcatcgttaactgtgggcatggaatgcgtgaggctggcttctgggttgtccacaccactctctgctgtgttgacttcctgttgtcttcatcaaagcttttttccgtggtattctaaaattaggccagcagtgggggctgggagggcatctgtgttagtcctttcctggctgtgacccgccacactcactgtcagtattaaggcccagcagcctgttgataagctaccctgtctcaccatgtgctggtgtggaaacggggcccagccagcacgcctcaaggtagatggaatccccactggtcagagaaaaagctatgcggacactccagcttggcctgggtcacagcactgactcctcacccgctagtctggctgttaagaggagaaagtgcactgccttccagcccaggaggaggacagcattttgtatttgttccactgatgcagcttagaaccacacccctgagagtcgtggcaaacctttcacaacctggaaaatgttgaaagcaaccattcctatttttgtttgttttttattaaatcttgcacaaaaaaaaaaaaaaaaaaaaaaa

SEQ ID NO: 1001 - DNA, 1396 bp, Homo sapiens
tcctttccgcttccggtgtcccctacagtcatggctgccgccgtcgctgctgccggtgcaggggaaccccagtccccggacgaattgctcccgaaaggcgacgcggagaagcctgaggaggagctggaggaggacgacgatgaggagctagatgagaccctgtcggagagactatggggcctgacggagatgtttccggagagggtccggtccgcggccggagccacttttgatctttccctctttgtggctcagaaaatgtacaggttttccagggcagccttgtggattgggaccacttcctttatgatcctggttcttcccgttgtctttgagacggagaagttgcaaatggagcaacagcagcaactgcagcagcggcagatacttctaggacctaacacagggctctcaggaggaatgccaggggctctaccctcacttcctggaaagatctagattgttattgctgtttgagctgtctcagtgggataagtttgaaattcaagtgtttgaactgctgataatttggatttttttttttttttaactttggcacattgatctatctaaacctggtggggagaattatccccacattgtctcatggaaagactcaacttgcaactgtgccctccacactatccttacttctgtctccactctgataccagagtgcagccatgcagatggttattccagctctggtcacccgactcctttcaccaaattgctcctaactggaagatctcactttccccttgtggggtaggaaccgatgccagtgggagggatgtgcccctgaccattaacgactgttttttttttttttttttaaagaatggagttgttggggcaggacatgcacacaatgtgaaacagacaaaatgcattacacctgtagtgtaaagtggccactatgaatccctatgtatgagaggagggaggcaggctgcagcttcagccacagaatggggactatggaagacagcaggagctcatttcctctgcacattttggctgttagacctgtgtgtgtgtttaaaaaaagagaagtcagtgctcactttttgtatttaaatattaaaaatgattccaactgaaagtgtcatcctaagtaccttgaaatgagaccacgtcagagacatgtactgcccctcacattttctcacctaaaccagcagcacctccatcttaacagccataggcccaaattgtttccaagtgaaaattcatttttagccaagtacttcatagcaatctttgccctgaatttaggcagtcactttgagatccatcagcctaaaacaaaggattgggtctatgtacttctttagtctataatgacactgtgtaattataaagtatttgtagggaaaaaaaaaaaaaaaaaaaa

SEQ ID NO: 1002 - DNA, 4093 bp, Homo sapiens
aatttcgctaaccgtgacgtcatctcggtgcgccgttacagcgcttaactggaaactgcgatttagtttttggtgaaaggagtggaaaaaaaccatgaactgacctaccccgccccattttgcttttagtccttcacactggcttcgcctgcactttgggcaatggagcgggaaaggaaaaggcacgcaggctgagctcaaagtcgcgccagccggggatgactcggcgacgccgccaggcgcgttacccggcgtgctccgcgcggcgccggcgaagggacgtgggggaaggggcagggaggaggaagcggtggctgctgcggatgtcggtgtgagcgagcggcgcctgaacacacggcggctgccgagcgcctgacccgggcctgcgccagagcctgcaccgagctccggggccccacacccgctacggtggccctgcgcccgttgctactgaggcggcgtgctctgcattcttcgctgtccaggcctgccggctctggtgtctgctggctcctccttgctcgcctgctccctcctgcttgcctgagtcaccgccgccgccgccgccacagccatggccgagagtggtgaaagcggcggtcctccgggctcccaggatagcgccgccggagccgaaggtgctggcgcccccgcggccgctgcctccgcggagcccaaaatcatgaaagtcaccgtgaagaccccgaaggaaaaggaggaattcgccgtgcccgagaatagctccgtccagcagtttaaggaagaaatctctaaacgttttaaatcacatactgaccaacttgtgttgatatttgctggaaaaattttgaaagatcaagataccttgagtcagcatggaattcatgatggacttactgttcaccttgtcattaaaacacaaaacaggcctcaggatcattcagctcagcaaacaaatacagctggaagcaatgttactacatcatcaactcctaatagtaactctacatctggttctgctactagcaacccttttggtttaggtggccttgggggacttgcaggtctgagtagcttgggtttgaatactaccaacttctctgaactacagagtcagatgcagcgacaacttttgtctaaccctgaaatgatggtccagatcatggaaaatccctttgttcagagcatgctctcaaatcctgacctgatgagacagttaattatggccaatccacaaatgcagcagttgatacagagaaatccagaaattagtcatatgttgaataatccagatataatgagacaaacgttggaacttgccaggaatccagcaatgatgcaggagatgatgaggaaccaggaccgagctttgagcaacctagaaagcatcccagggggatataatgctttaaggcgcatgtacacagatattcaggaaccaatgctgagtgctgcacaagagcagtttggtggtaatccatttgcttccttggtgagcaatacatcctctggtgaaggtagtcaaccttcccgtacagaaaatagagatccactacccaatccatgggctccacagacttcccagagttcatcagcttccagcggcactgccagcactgtgggtggcactactggtagtactgccagtggcacttctgggcagagtactactgcgccaaatttggtgcctggagtaggagctagtatgttcaacacaccaggaatgcagagcttgttgcaacaaataactgaaaacccacaactgatgcaaaacatgttgtctgccccctacatgagaagcatgatgcagtcactaagccagaatcctgaccttgctgcacagatgcagaatcctgatacactatcagcaatgtcaaaccctagagcaatgcaggccttgttacagattcagcagggtttacagacattagcaacggaagccccgggcctcatcccagggtttactcctggcttgggggcattaggaagcactggaggctcttcgggaactaatggatctaacgccacacctagtgaaaacacaagtcccacagcaggaaccactgaacctggacatcagcagtttattcagcagatgctgcaggctcttgctggagtaaatcctcagctacagaatccagaagtcagatttcagcaacaactggaacaactcagtgcaatgggatttttgaaccgtgaagcaaacttgcaagctctaatagcaacaggaggtgatatcaatgcagctattgaaaggttactgggctcccagccatcatagcagcatttctgtatcttgaaaaaatgtaatttatttttgataacggctcttaaactttaaaatacctgctttatttcattttgactcttggaattctgtgctgttataaacaaacccaatatgatgcattttaaggtggagtacagtaagatgtgtgggtttttctgtatttttcttttctggaacagtgggaattaaggctactgcatgcatcacttctgcatttattgtaattttttaaaaacatcaccttttatagttgggtgaccagattttgtcctgcatctgtccagtttatttgctttttaaacattagcctatggtagtaatttatgtagaataaaagcattaaaaagaagcaaatcatttgcactctataatttgtggtacagtattgcttattgtgactttggcatgcatttttgcaaacaatgctgtaagatttatactactgataattttgttttatttgtatacaatatagagtatgcacatttgggactgcatttctggaaacatactgcaataggctctctgagcaaaacacctgtaactaaaaaagtgaagataagaaaatactcttaaagctgagtatttcctaattgtatagaatcttacagcatctttgacaaacatctcccagcaaaagtgccggttagtcaggtttgttgaaaatacagtagaaaagctgattctggttatctctttaaggacaattaattgtacagacacataatgtaacattgtctcaacattcattcacagattgactgtaaattaccttaatctttgtgcagactgaaggaacactgtagtataccccaaagtgcatttgcctaggacttctcagcttctcccataggtagtttaacaggcattaaaatttgtaattgaaatgttgctttcactgaaaaagtgtcttgatgtttcagttatttttaatcgccataaaaaaatagaactatcttttgggtttatctgttttctcatgcacaggcaatacacaaatttaaaatgagttgtgagccaattgtttctgaagtgttttggtagttctattaagaaatagttaaatattgtgcttttcagagcctcagagaaagggggacggggtgggggggtggggcagcggaatctgtcctggatggggccagcttaaataatactggcaaccaagattctgttaggatttctgtgcatatagtgtagtaaagaagtatcattcaggggtgaaaaacaaagagccgttttaatgatgttgagtacatttggctgttttatagcctttttcttccctcccccaaagaattctgtttgcctaactcccaaactgttggggtggtacattcctttaggaccaattaaaacataattgagggtcagtgatacatttggctgactctggttcagtattctcttaggtgattatattctctcatgtacagttacaggaaattaaaatgttaaagtaacctaaaatgaattcagaccaataaaatcaagggaaatacaagttgattgcattacttctgtatgttgcttgctattaaaaaggttaagaggccaggttacccaccagtccttgcactgttctgacactttccccaggaggaaaacaagtacaaaggttacggtggaggcataagtagaagagattgttaagaagggtattcatgtgtctttgctctttctgctttatgcctcagtttggtttaaaaacttctgtactggcaaatggtggtattcagtgtgggatagtgtcataactaatttgacaatttattaatcataaaataacaataaatctctagcttttacacttgaaaaaaaaaa

SEQ ID NO: 1003 - DNA, 3334 bp, Homo sapiens
ctccccgaactgcggcggcggcgagcgccggccgcatctgagcagagctgcagcggcggccgcgggcaccagagtgccgagcccaggacgcccccggcccaggcccttggggtggacaagtccttcacttctcgccggagtgtgtggaggagcgatgggcagaaccagcacttccctcaggcactagacctgtcacgagtgaacttagttccctcctatactccttcactctaccctaagaacacagatctatttgagatgattgagaagatgcagggaagcaggatggatgaacaacgctgctccttcccgccgcccctcaaaacagaggaggactacattccatacccgagcgtgcacgaggtcttggggcgagaaggacccttccccctcatcctgctgccccagtttgggggctactggattgagggcaccaaccacgaaatcaccagcatccccgagacagagccactgcagtcgcccacaaccaaggtgaagctcgagtgcaaccccacagcccgcatctaccggaagcactttctcggcaaggagcatttcaattactactcactggacgctgccctcggccaccttgtcttctcactcaagtacgatgtcatcggggaccaagagcacctgcggctgctgctcaggaccaagtgccggacataccatgatgtcatccccatctcctgcctcaccgagttccctaatgttgtccagatggcaaagttggtgtgtgaagacgtcaatgtggatcggttctatcctgtgctctaccccaaggcttcccggctcatcgtcacctttgacgagcatgtcatcagcaataacttcaagtttggcgtcatttatcagaagcttgggcagacctccgaggaagaactcttcagcaccaatgaggaaagtcccgctttcgtggagttccttgaatttcttggccagaaggtcaaactgcaggactttaaggggttccgaggaggcctggacgtgacccacgggcagacggggaccgaatctgtgtactgcaacttccgcaacaaggagatcatgtttcacgtgtccaccaagctgccatacacggaaggggacgcccagcagttgcagcggaagcggcacatcgggaacgacatcgtggctgtggtcttccaggatgagaacactcctttcgtgcccgacatgatcgcgtccaacttcctgcatgcctacgtcgtggtgcaggctgagggcgggggccctgatggccccctctacaaggtctctgtcactgcaagagatgatgtgcccttctttggaccccccctcccggaccccgctgtgttcaggaaggggcctgagttccaggaatttttgctgacaaagctgatcaatgctgaatatgcctgctacaaggcagagaagtttgccaaactggaggagcggacgcgggccgccctcctggagacgctctatgaggaactacacatccacagccagtccatgatgggcttgggcggcgacgaggacaagatggagaatggcagtgggggcggcggcttctttgagtctttcaagcgggtcatccggagccgcagccagtccatggatgccatggggctgagcaacaagaagcccaacaccgtgtccaccagccacagcgggagcttcgcgcccaacaaccccgacctggccaaggcggctggaatatcactgattgtccctgggaagagccccacgaggaagaagtcgggcccgttcggctcccgccgcagcagcgccattggcatcgagaacatacaggaggtgcaggagaagagggagagccctccggctggtcagaagaccccagacagcgggcacgtctcacaggagcccaagtcggagaactcatccactcagagctccccagagatgcccacgaccaagaacagagcggagaccgcagcgcagagagcagaggcgctcaaggacttctcccgctcctcgtccagtgccagcagcttcgccagcgtggtggaggagacggagggtgtggacggagaggacacaggcctggagagcgtgtcatcctcaggaacaccccacaagcgggactccttcatctatagcacgtggctggaggacagtgtcagcaccactagtgggggcagctccccaggcccctctcgatcaccccacccagacgccggcaagttgggggaccctgcgtgtcccgagatcaagatccagctggaagcatctgagcagcacatgccccagctgggctgttagccgggccaccccctctgaaggtgaaactgagcagatgaggccacagaagcacaaggggaaggtgccgtgtcaagcccaggcagacgagacctctgccctgaagaccaacaccagcccgtgggctgccccctgcctccccaccctccccatggcccacccatctgggctgtctctgcagggcagagccgtccagacctgggatcagggaagctgctggcatcgtccccacccccagcctgggggtctgggctggggcagggattgctcagtggaagcaggactgggggtctggcttgccccctccctgggcctccatcacccctgagcatccctctggactcagagggaacaaggtgggagagagagtttgagacagctccgtgtggagagcttagcccctggaggcagcacaaggaggatgtgatatgtgggggagtgagcactgggttgggagccgggtcctggtttccaatttgggttctgctgtgtgactctgggcaagtcactctccctctctgggcatgtctgctacaaatggacaagattatttcagaggtcactgaagactgtgattacatgcacctgccttagaaggtaggattttcttcccagggacctcctatcaccctaccctgcttcttgaggtccctggagccccaggtgggctgaggggcagggagccggctgtgcccagtatgcctcctggaccctccagttctgccacaggtctgccgatgccctgtccactgcctacacatgacagacaagtaaccccctcatgggggatggggacctacctggctcctcagccagcacccagcttaacccctgccatcccatgctgggccctccaggccaagagtctcagctggccgagagtccaggccttgcctcccccgaccgccatggagggggcagcccggcacagctgctgggagcccttgtgtgtctggtcacactttttaggcgtcacgccaaaggccagcctcctggccccaatacccattttggaagcccctgtggccgtgtggatgtcggtaacagttgtataaaataaattctatttatcgctattgtacccaga

SEQ ID NO: 1004 - DNA, 2196 bp, Homo sapiens
cttgatcccagggcgcccctgacctttgagccggctcgggttccggctctggcgcgtgcacactcgcctcgccgttcgggaccagccagatcgcggcggcctcgcgggcggtttggtcggtgaggtcttggccgcgcgcggcaatgctgaggctgctggcgtccgggtgcgcccggggcccggggcccggcgtgggcgcgcgtcctgccgcagggctctttcatccggggcgccgccagagccgccaggcttccgacgcgccccggaaccagccccccagccccgagttcgtggcccggccggtgggcgtctgctccatgatgcgcctgccggtgcagacctcccccgaggggctggacgctgccttcatcggggtgcccctggatactgggacctccaaccggcctggggcgagattcggacctcgccgcatccgggaagaatcagtgatgcttgggacagtcaatcctagcacgggggccctccccttccagtccctcatggttgcagacctaggcgatgtgaatgtcaatctttacaaccttcaggacagctgccggcgaattcaagaggcctatgagaaaattgtagcagctggctgtattcctctgaccttgggtggagatcacacaatcacatatcccatattgcaagcgatggcaaaaaagcatggcccagtggggctgctgcacgtggatgcgcacacggacacgaccgacaaggccctaggagagaagctctaccacggggcgcccttccgccggtgtgtggatgagggtctcctggactgtaagcgtgtggtgcagattggcatccggggctcttccacgaccttggatccctacagatacaaccggagccagggcttccgggtagtcctggctgaagactgctggatgaagtcgctggttcctctgatgggggaagtcaggcagcagatgggaggcaaacccatttatatcagctttgatattgacgctctggatcctgcctatgcgccagggacagggacacctgaaattgctggtctcactcctagtcaggctctggagatcatcaggggttgtcaaggcctgaacgtgatgggctgtgatcttgtcgaagtttcaccaccgtatgatctttctgggaacacagccctgctggcggctaacctgctgtttgagatgctatgtgctctccccaaagtgacaaccgtctgagtcttgtgctcttcaagacaaaacagattgcgtcgctgacaagttctcaagaagaacttatgagtaagcagtctgagaactaaagagtttatgccaagaaaactttctgctgaaagtgtcattgctggctgtgaagtcgggataatcagtagaattctcacccaaacagcaacatttctaaggaacttggattaattgggggaaaaaaaaaggagtacttgtactgctttgattttttttcctttgatgaaagatggaggataaaggggaagtgaggagaatttctttcaagattatctaaacattagaaacatgacatttaaaaaaactatgaaataatactgtataagcattccatatttctatatcttccttttaaacatttttttttttgagatggagttttgcttgtcacccaggctggagtgcaatggcatgatctcggttcattgcaacctccgcctcccgagttcaatcgattctcctgcctcagcctcctgagtacctgggattacgggtgcctgccaccacgcctggctaatttttgtatttttagtccagacagggtttcaccacattggccaggctggtcttgaactcctgacctaaggtgatccgcccgcctcagcctccttaaagtgctgggattacaggcatgagccaccgcacccagccgctttttaaaattttgatgatctgcttcctagagtattgagtatcttcctttaaactacagctcctcctcggacgctgcagtgagctgagatcgcaccactgcactccagcctgggtgccagagcaagactccatctcaaaaaaaaaaaaaaaaaatacagcttctcctatgaggtgcttagggctgcatcttggttttaggaccactgtgaacgtaagtaaaaagtataaagtaacacggagagcctaatgaagaaacttcttgctcagaggcctagaagggtacacaaaatgtcttctaaactagaaaacctaaggc

SEQ ID NO: 1005 - DNA, 1017 bp, Homo sapiens
cccttggccagcgagatgctttgacacagccccttaagatgttttaagggctatcccataaagccgggaaggcacaacgggtggagctggcggccgccgggggcaggcacttttgagctaaggaggaagcgggggagggaaggagggcgggaaggacgcgccacctacttcctgaatcccctgcaaaccccagaggagctcggcctgcgctgcgccacgatgtccggggagtcagccaggagcttggggaagggaagcgcgcccccggggccggtcccggagggctcgatccgcatctacagcatgaggttctgcccgtttgctgagaggacgcgtctagtcctgaaggccaagggaatcaggcatgaagtcatcaatatcaacctgaaaaataagcctgagtggttctttaagaaaaatccctttggtctggtgccagttctggaaaacagtcagggtcagctgatctacgagtctgccatcacctgtgagtacctggatgaagcatacccagggaagaagctgttgccggatgacccctatgagaaagcttgccagaagatgatcttagagttgttttctaaggtgccatccttggtaggaagctttattagaagccaaaataaagaagactatgctggcctaaaagaagaatttcgtaaagaatttaccaagctagaggaggttctgactaataagaagacgaccttctttggtggcaattctatctctatgattgattacctcatctggccctggtttgaacggctggaagcaatgaagttaaatgagtgtgtagaccacactccaaaactgaaactgtggatggcagccatgaaggaagatcccacagtctcagccctgcttactagtgagaaagactggcaaggtttcctagagctctacttacagaacagccctgaggcctgtgactatgggctctgaagggggcaggagtcagcaataaagctatgtctgatattttccttcactaatatgaataaaaaaaaaaaaaaa

SEQ ID NO: 1006 - DNA, 1179 bp, Homo sapiens
ctgcgctggggttggagtggccgcaacgggcggggcggggcggggccgggcaagtttgttccccgagttcggagcctaggagccccccgcggctgcggcgcaggtgccctcggcctgagtcgggatggagctgcctgctgtgaacctgaaggtgattctcctaggtcactggctgctgacaacctggggctgcattgtattctcaggctcctatgcctgggccaacttcaccatcctggccttgggcgtgtgggctgtggctcagcgggactccatcgacgccataagcatgtttctgggtggcttgctggccaccatcttcctggacatcgtgcacatcagcatcttctacccgcgggtcagcctcacggacacgggccgctttggcgtgggcatggccatcctcagcttgctgctcaagccgctctcctgctgcttcgtctaccacatgtaccgggagcgcgggggtttccttgggtcttctcaggaccgtagtgcctaccagacgattgactcagcagaggcgcccgcagatccctttgcagtcccagagggcaggagtcaagatgcccgagggtactgaagccagccacgctgcgcccggccctgccccgggccttcctcgtgcctgggaggtcgttctagggatgctcctgacctccgtctcttggacctaagatggaatgtgtccccagctcagggattgcctgaaccaagaggccaggagcccccatgggccgcccagtaccatgcacactcctgtcccgaactccctgaggcctcccctcccttcagggcacccactggttcccaggctggaaccagggtctctctttacctcctaccccatggtggcaccacagaggccctcagccgagtcctgcctgagtgttgcaagctcaggcctttaaggactgctgatgccccctcaggcctcccccaagtttgctgggctttggtggaagccctgagagcttcaggtcctgctcagcccgaggagcagtctggcatgggagtgaggccccgtccttctcactgcctggtcacatggtgcctagggatgcagggctggaggccagaggtgtcagcaacactgtgtcccaccacaacctccagcctcccttttcagagcacagcattaaagtttggggaattctgtagaaaaaaaaaaaaaaaaaa

SEQ ID NO: 1007 - DNA, 992 bp, Homo sapiens; identical to SEQ ID NO: 469

SEQ ID NO: 1008 - DNA, 3762 bp, Homo sapiens
acagaggctgtggctggaaggagctgggcatccggcctgaggcgcagcggtcgcgttagttcggcccaatggcggcaccgctgcttcacacgcgtttgccgggagatgcggccgcttcgtcctctgcagttaagaagctgggcgcgtcgaggactgggatttcaaatatgcgtgcattagagaatgactttttcaattctcccccaagaaaaactgttcggtttggtggaactgtgacagaagtcttgctgaagtacaaaaagggtgaaacaaatgactttgagttgttgaagaaccagctgttagatccagacataaaggatgaccagatcatcaactggctgctagaattccgttcttctatcatgtacttgacaaaagactttgagcaacttatcagtattatattaagattgccttggttgaatagaagtcaaacagtagtggaagagtatttggcttttcttggtaatcttgtatcagcacagactgttttcctcagaccgtgtctcagcatgattgcttcccattttgtgcctccccgagtgatcattaaggaaggcgatgtagatgtttcagattctgatgatgaagatgataatcttcctgcaaattttgacacatgtcacagagccttgcaaataatagcaagatatgtaccatcgacaccgtggtttctcatgccaatactggtggaaaaatttccatttgttcgaaaatcagagagaacactggaatgttacgttcataacttactaaggattagtgtatattttccaaccttgaggcatgaaattctggagcttattattgaaaaactactcaagttggatgtgaatgcatcccggcagggtattgaagatgctgaagaaacagcaactcaaacttgtggtgggacagattccacggaaggattgtttaatatggatgaagatgaagaaactgaacatgaaacaaaggctggtcctgaacggctcgaccagatggtgcatcctgtagccgagcgcctggacatcctgatgtctttggttttgtcctacatgaaggatgtctgctatgtagatggtaaggttgataacggcaaaacaaaggatctatatcgcgacctgataaacatctttgacaaactcctgttgcccacccatgcctcctgccatgtacagtttttcatgttttacctctgtagtttcaaattgggattcgcagaggcatttttggaacatctctggaaaaaattgcaggacccaagtaatcctgccatcatcaggcaggctgctggaaattatattggaagctttttggcaagagctaaatttattcctcttattactgtaaaatcatgcctagatcttttggttaactggctgcacatataccttaataaccaggattcgggaacaaaggcattctgcgatgttgctctccatggaccattttactcagcctgccaagctgtgttctacacctttgtttttagacacaagcagcttttgagcggaaacctgaaagaaggtttgcagtatcttcagagtctgaattttgagcggatagtgatgagccagctaaatcccctgaagatttgcctgccctcagtggttaacttttttgctgcaatcacaaataagtaccagctcgtcttctgctacaccatcattgagaggaacaatcgccagatgctgccagtcattaggagtaccgctggaggagactcagtgcagatctgcacaaacccgctggacaccttcttcccctttgatccctgtgtgctgaagaggtcaaagaaattcattgatcctatttatcaggtgtgggaagacatgagtgctgaagagctacaggagttcaagaaacccatgaaaaaggacatagtggaagatgaagatgatgactttctgaaaggcgaagtgccccagaatgataccgtgattgggatcacaccaagctcctttgacacgcatttccgaagtccttcaagtagtgtgggctccccacccgtgttgtacatgcaacccagtcccctctgacggcagaaatttgtgactgagatgtgacatttgggattccccatcacttgtcatgccctcagcacccagcttgtgccattgggcattgatggcattgaactagagcgagtgcctgcctcggctgtggcacttccaggttcgactgaatcaagcatctgaagactgggtttttttgttgttgttgttccccttacagacaaaatgaagactatcatgtgcaatcttttacagtggggttgatgatacatttggaaggatttgcttgtttaatatgtacattttttgtgttaacagctttttgacacaattactgggtaatttctaatataggcagcagactgttttacgggttgctgttttaacatgggtttttgtcagatccatggtcttaggacttgactgatgagctttcagtgaagaatcctctaagataaaacttctatttaaagactttaactagaaagtgtttattttggctacattgttcaccttctgctgtattggtatttgtctgttgggatttcaagggagtgtagagaagacagaaggaaagctgagagctggcccgacatggtctgggacacagagttggagctggcactgaagatctccagggacttcagagaccaataaaagcccatagggaagagagagaggatatagggaaacagaatcagatgtgtaatatacttggcacagcgaaaaaatggatttaaaagacaaaaatggaggtccaggtagatgtaattcacacagactgaaagtgagttcgggcttgtgtaaaacacatgagattggatttgaccccttggctctcaagtgtccccttagatctagaactgctccttggtggccattagatcgagtcagttttgatctgcatcacttagttattgggaatttctttgttggaaacaggaaaatttttttagattatttggtgtacggttttgctcacaacaataggtggaagttgctagtgcagtcttggtctgatggctgtgtgcatcgcacattcggcttggtgaaatccttctctaaagcctctttttgtatttttataactaaacagaggaagtcttcagaagacctcgctttaaaacaaatttgtgcaaacactgctagagtcattttgaagctcaagcattttcactttgtttcttacatgtgtacttttttgtttacttgtgaaaatggccatctttaagcatatttattttctgccactttatttaaaggcaagcaatattttcttgatcataaatattttgtaatgaaatacttcctcttttccagggctttgtatgcacttgtataattacattgatggcaatgtagagtttgaatttcagtctgtaaatacttttttggaaaatagaaatttttattgctttaaagttttggatatgggtggttttcttttccgggtttggtggaaagtaatttgagaactttaaggttgtctttttaactgctggcaaaatgttgattttttaatattagataaaacgagtaaacgaaattccccagaaattagtagtaagtggggtctttgtgggttgggaagtagttttaatgtagaaagacatttacatataagtctgtttaatttcaaaggagtttgtgaaaaaaaatccatggtgaaaatgaaacaatgacatggttaatctggaacttacgttcttataccaataaaaggtacctcaatacatgttctttcaaaaaaaaaaaaaaaaaa

SEQ ID NO: 1009 - DNA, 10187 bp, Homo sapiens
ttcctccctctcagggctgcgcgcccaggtctgcgccgcgctccgcctccagccgcgcgcagacttgcgcacgcgtcgtgagagcgaccgcctccgtctctcgctgggctcgctagggctgcgcgttgggccagcgggggcgccgcagctgaagccgccccggagccggtgaaccgaattacctcgagggaggggcgtggggaaggcggcgggaggaggagcgcacgggccggctgccgtgcccaccacggctgaggaacatggttttcgagtcggtggtcgtggacgtgttgaaccggttcttgggggactatgtggtggacttggacacgtcccagctctctctgggcatctggaaaggagctgtggccctcaagaatcttcaaattaaagaaaatgccctgagtcaactggatgtaccatttaaagttaaagttggtcacataggtaatcttaaacttataattccatggaaaaacctttatactcaacctgttgaagccgtattggaagaaatttatttacttatagtgccttcttctagaataaaatatgatcctttaaaagaagagaaacaactcatggaagcaaagcaacaggaactgaaaagaatagaagaagcaaaacaaaaagtagttgatcaagaacaacatctgccggaaaaacaggacacttttgcagaaaaattagttacacagatcataaaaaatcttcaggtgaaaatttccagtatccatattcgttatgaagatgatatcacaaatcgggacaaaccgctgtcatttggtatttcccttcaaaatctgagcatgcagacaactgatcaatactgggttccatgtttacatgatgaaactgagaaactggttcgtaagttaatccgattggataacctgtttgcctattggaatgtgaagtctcagatgttttatcttagtgattatgataactccttggacgacttgaagaatggcattgtcaatgaaaatattgttccagaaggttatgattttgtatttcgtcccatatctgctaatgccaaacttgtgatgaatcgccgatctgattttgacttttctgcccccaaaataaacttggaaattgagttacataacatagcaattgaatttaataaaccacagtatttcagtattatggagcttcttgaatcagttgatatgatggcacaaaatctgccatataggaagttcaaacctgatgtgcctcttcaccaccatgccagagaatggtgggcttatgctatacatggcgttcttgaagtaaatgtttgccccaggttatggatgtggtcatggaagcatattagaaaacataggcaaaaagtgaagcaatataaagaactgtataaaaaaaagttaacaagtaagaagccacctggtgaacttctcgtgtctttggaggagttggaaaaaaccttggatgtctttaatataactatagctagacagacggcagaagttgaggtaaagaaagctggatacaaaatttacaaagaaggagtaaaagatccagaggataataaagggtggtttagctggctatggtcttggtcagaacaaaatactaatgaacagcaaccagatgttcaacctgaaactcttgaagaaatgttgacacctgaagaaaaagctttactctatgaagcaattggctatagtgaaacagcagttgatccaactttactaaaaacatttgaagccttgaagttttttgtccacttgaaaagtatgtctattgttctaagagaaaatcatcaaaaacctgagctggtagatattgtaatagaagaatttagcaccttaattgtgcaaagaccaggagcacaagcaataaaatttgaaactaaaatagattcatttcatattactggcttaccagataattcagaaaaaccccgcctcctgtcttcattggatgatgcaatgtcacttttccaaattacatttgagataaatccattagatgaaactgtttctcagaggtgtatcatagaagctgaacctttagaaatcatatatgatgcaaggacagtgaatagtatagtggaattcttcagacctccaaaagaggtacatctagcacagctcactgcagcaactttgacaaaactggaagaatttcgcagtaagacagcaacaggtctactgtatattattgaaacacagaaagttcttgatctcaaaattaatttgaaggcttcatatattattgtcccacaagatggaatttttagtcctacatcaaatctgcttcttttggaccttggtcatctaaaggtgacgagtaaaagtcgttctgaattaccagatgtgaaacaaggtgaggccaatcttaaagagataatggatagagcttatgattcatttgatattcaacttacaagtgtacagctgctttacagtagagttggtgataattggagagaagcacgaaaactcagtgtatctacccagcatattttggtacccatgcacttcaatttggaactgtctaaggccatggttttcatggatgtaaggatgcccaaattcaagatttatggaaagttacctcttatttctttacgaatctcagataaaaaactacaagggattatggaattgattgaaagcattccaaaacctgaaccagtaactgaagtatctgcccctgtcaaatcattccagattcaaacatctacttctttgggaacatcacagatttcacagaaaataattcctctcttggaacttccatctgtttctgaagatgattcagaggaggaattttttgatgcaccatgtagtcccttggaagaacctcttcagtttccaactggagttaaaagtattcgaaccagaaagttacaaaagcaggattgttcagtaaatatgactacatttaaaataagatttgaagtaccaaaggttttgatcgagttttatcaccttgttggagattgtgaactatctgtggtagaaattcttgttttaggattgggtgcagaaattgagattagaacatacgatttgaaagcaaatgcctttttgaaagagttctgcttaaaatgcccagaatacttggatgaaaacaagaaaccagtttatttggttacaaccctggataacacaatggaagacctgttaacgctggaatatgtaaaggctgaaaagaatgtacccgacttgaaaagtacctataacaatgttttacaattgattaaggtaaatttttcctctttggatattcatttacacactgaagcacttctgaatacaataaattatcttcataatatccttccgcaatcagaggaaaaatcagccccagtgtccactacagagactgaagacaaaggagatgtcattaaaaaattagctttaaaactatccacaaatgaagatatcattactttgcagattttagcagaattatcgtgtttacagatctttattcaagatcagaaatgtaacatttctgaaattaagattgaagggcttgattctgagatgattatgaggccttcagaaactgaaataaacgcaaagctaaggaatataattgttttagattctgatataacagctatatacaaaaaggctgtttatatcactggaaaagaagttttcagcttcaaaatggtttcttacatggatgcaactgctggttctgcatacacagatatgaatgtggttgacattcaggttaatttaatagttggttgcattgaagtagtttttgtcacgaaatttctatattctatattggcttttatagataattttcaggcagctaaacaagccttggctgaggcaactgttcaggcagctggaatggctgctactggtgtaaaagaactcgcacaaaggagttccagaatggcactggatattaacatcaaagccccagttgtggtcatcccgcagtctccagtttctgaaaatgtttttgttgctgattttggactaattacaatgacaaatacctttcatatgataacagagagccagagctctcccccacctgttattgatttgataacaataaagctgagtgaaatgcgactatacagatctcgatttattaatgatgcataccaggaagtactggatctactcctgccattaaatcttgaggttgtggttgaacgaaatttatgctgggagtggtaccaggaagttccttgttttaatgtaaatgctcagctgaaaccaatggagttcattcttagtcaagaagatataacaactatttttaaaacattgcatggcaatatatggtatgaaaaagatggtagtgcctcacctgctgtaacaaaagaccaatacagtgccactagtggagttactactaatgcttcacaccattcaggaggagcaactgtggtgacagctgctgtggtagaagtacattcacgtgccttactagttaagacaacactaaacataagcttcaaaactgatgatctcaccatggtgctgtatagtccaggtcctaaacaggcttcctttacagatgttcgtgatccttctctgaaacttgctgaatttaaattggagaatattataagtactttaaaaatgtatacagatggctcaacattttcttccttctcattaaaaaactgtattttagatgataaaagacctcatgtcaagaaagcaactcctcgaatgataggactgacagttggttttgacaaaaaagacatgatggatataaagtacaggaaagtcagagatggttgtgtgactgatgcggtctttcaagaaatgtatatttgtgcaagcgtagaatttctgcagactgttgcaaatgtctttcttgaggcctacaccacaggcactgctgtagaaaccagtgtgcaaacatggactgctaaggaagaagtacctacacaggaatcagtgaagtgggaaattaatgttattattaaaaatcctgaaattgtgtttgtagctgacatgacaaaaaatgatgctcctgctttagtcattacaacacaatgtgaaatttgctataaaggtaaccttgaaaatagtacaatgactgctgccattaaagatctccaagtgagagcctgcccgtttcttccagtcaagagaaaaggcaaaatcactactgttttgcagccctgtgacttgttttatcaaactactcagaaaggtacagatccacaagtgatcgatatgtcagtaaaatccctgacactaaaggtttcaccagttattataaatactatgattaccataacttcagcactgtatacaactaaggaaaccatcccagaagaaacggcttcttctactgcacatttatgggaaaagaaggatacaaagactttaaaaatgtggtttcttgaagaatcaaatgaaactgaaaaaatagctcccacaactgaattggtacccaaaggcgagatgataaaaatgaacattgattctatttttatagttcttgaggctggaattggtcatagaacagtacctatgcttctggcaaagtcacgtttttcaggggaaggcaaaaactggagttccctaataaatctgcactgtcagcttgagctagaagtgcattattataatgaaatgtttggtgtatgggagcctttgcttgaacccttagaaattgatcagactgaggattttagaccatggaatcttggtatcaagatgaaaaagaaagcaaaaatggccattgttgagtcagatcctgaagaagaaaactacaaagtgccagaatataaaactgtcatcagtttccattcaaaagaccaattaaacattacattatccaaatgtggtcttgtaatgttaaacaatttagtcaaggcatttacagaagctgccactggatcttcagctgacttcgtaaaggatctagcaccatttatgattttaaattcccttggacttactatttctgtttcgccaagtgattcttttagtgtactcaacattcctatggcaaaatcatatgtattgaaaaatggagaaagtttaagtatggattatatccgaaccaaggacaatgatcatttcaatgcaatgaccagcctaagcagcaaactcttcttcattcttcttacacctgttaaccattctactgctgataagattcctttaacaaaagtgggacgacgtctgtacactgtaagacacagagagtctggcgttgaaagatctattgtttgtcaaattgatacagtagaaggaagtaagaaggtcacaattcgctccccagtgcagataagaaatcatttttcagtcccactgtctgtttacgaaggggataccttattgggaactgcctcacctgaaaatgaattcaacataccattaggatcttaccgatcattcatttttctgaagccagaagatgagaactatcaaatgtgtgaaggaattgactttgaagagattataaaaaatgatggtgctcttctaaagaagaaatgtagatctaaaaacccttctaaggaatcatttctcattaatattgttccagaaaaagataatttaacatctctatcagtgtattcagaagatggttgggatttaccatacataatgcatttgtggccacctatcctgctccgaaatcttcttccttacaaaattgcttattatatagagggaattgaaaattcggtttttactctaagtgaaggacattcagcccagatttgtactgcacagttgggtaaagccaggctacatttaaaattacttgactatctcaatcacgattggaaaagtgaatatcacataaagcctaatcagcaagacattagttttgtcagttttacttgtgttacagaaatggaaaagactgatttagatattgctgtccatatgacttacaatactggtcagacagttgtggcatttcatagtccttattggatggtcaataaaactggccgcatgttacagtacaaagcagacggaattcatcgaaagcatccacctaattataaaaagccagttctcttttcttttcagccaaatcacttttttaataacaataaggttcaacttatggtaactgatagtgagttgtccaatcagttttcaattgatactgttggtagtcatggagctgttaaatgtaaaggcctgaaaatggactatcaagttggtgtcactatagacctgagcagttttaacattactagaattgtgacatttacccctttttatatgattaaaaacaaaagcaaataccatatatcagtggctgaagaaggaaatgataaatggctctctcttgatttggagcagtgtatccccttttggcctgagtatgcttctagtaaacttcttattcaagtcgaaaggagtgaagatcctcccaaaaggatatattttaacaagcaggaaaattgtattctattgcgtctagataacgagcttggaggtattatagcagaagtgaatttggccgagcattctacagttattacatttttagattatcatgatggagcagctacattcctcttaataaatcacacaaagaatgaacttgttcaatacaatcaaagttctctcagtgaaatagaagattccctccctcctggtaaagccgtgttttatacatgggctgatccggtgggctctagaaggctgaagtggagatgtagaaaaagccatggtgaagtaacacagaaggatgatatgatgatgcctatagatttgggggaaaagacaatatatttagtttcattctttgaaggtttacaacgcattattttattcactgaagatccaagggtatttaaagtaacatatgaaagtgagaaagcagagttagcagagcaagaaattgcagtggcattacaagatgttggaatttctcttgtcaacaattacacgaagcaagaagtagcctatataggcattacaagttctgatgtggtttgggaaacaaagcccaagaagaaggcaagatggaagccaatgagtgtaaagcacactgagaagttagagagagaatttaaggaatatactgaatcttctccttcagaagataaggttattcagttggacactaatgttccggttcgcctaacccctactggtcataacatgaaaattctgcagccgcatgtaatagctctacgaagaaattatcttccagcattaaaagtggaatataacacatctgcacatcaatcatcatttagaattcagatttacagaatacagatccaaaatcagatacatggtgctgtatttccctttgtgttttatcctgttaaacctccaaagtcggtcaccatggattcagcaccaaagccctttacagatgtcagtattgtcatgagatctgcaggacattcccagatatcacgtattaagtatttcaaagtattgattcaagaaatggatctcaggttagatcttgggtttatctatgctttaacagaccttatgacagaagctgaggtgactgaaaatacagaggttgagctttttcataaagatatagaagctttcaaagaagaatataaaacagcctcattagtagatcaatcacaagtcagcctctatgaatattttcatatatctcctatcaagttacatttaagtgtttcactgagttccggcagagaagaagctaaagattcaaaacaaaatggaggactgattccagttcattctttaaatcttttgctgaagagtattggtgccacactgacagatgtacaagatgtagtttttaagcttgcattttttgaactcaactatcagttccatacaacatccgatctacagtctgaagtcataagacactattcaaaacaggccattaagcagatgtatgtactcattcttggacttgatgttttgggaaatccatttggcttaattagagaattttctgaaggtgtagaagcatttttttatgaaccttaccagggagccatccagggtcctgaagagtttgtggaaggaatggcactaggacttaaggcactagttggtggagctgttggtggattggctggtgctgcctccaaaatcaccggtgctatggctaagggggtagcagctatgaccatggatgaagactaccaacagaagagaagagaagccatgaataagcaaccagctggttttagagaaggcatcactcgtggaggaaaaggcttagtttctggatttgttagtggcataacaggaattgttacaaaaccaatcaaaggagctcaaaaaggaggagcagctggtttctttaaaggtgttgggaaaggtttagtaggagcggtagcaaggccaactggaggcatcatagacatggctagcagtacatttcagggaataaaaagagctacagagacttctgaagtggagagtctgcgacctcctcggttcttcaatgaagatggagttatcagaccgtacaggttgagggatgggactggaaatcaaatgttacaggcatcaaaaagtttgatatgaaaagttaatgcatgactttgcaagtgaaagccaacagtagattttagtcttaaaatttacaaactacgtacagctgtttcagtattttgaatacaaagaaaaccttttgtattggtaacttttaataggaattttaatgaatctggtttttttatagggtgttcttagttctgcactggatttgctagatttgttggaagcctttgtaccttatgtatcctcgtcattggtggtacttacttaaccaattaaaccatttctgttgtggggttattaaaccactggtagcttttataccagatatataatccttatatccaattacacatgaagaaggaaaagcaaaactcaggaacactgctattgtgaattactcttggattcttgtgctttgcctttgaaaatgcttaaatggccatgaccctcttcctgctttattctagtgtagtctttataaaacttgtgggatttgataagcagttcacatgcaaaccagtatcttttaataatacaaagtagcatctggaacaatagacagtttgaagttagaatctgcttagacaactttcttacttggtaaattcgactttttaaaacctggattatgctgtaggtaactagtaatcatatataggctataccagtgtcatgttgtttctgtggtttagaggtggaatactaaattaaatcatttgtttgaaaacaaaaaaaaaaaaa

SEQ ID NO: 1010 - DNA, 3073 bp, Homo sapiens
tgtgtcatccgccattttgtgagaagcaaggtggcctccacgtttcctgagcgtcttcttcgcttttgcctcgaccgccccttgaccacagacatgtctcgggatcggttccggagtcgtggcggtggcggtggtggcttccacaggcgtggaggaggcggcggccgcggcggcctccacgacttccgttctccgccgcccggcatgggcctcaatcagaatcgcggccccatgggtcctggcccgggccagagcggccctaagcctccgatcccgccaccgcctccacaccaacagcagcaacagccaccaccgcagcagccaccgccgcagcagccgccaccgcatcagccgccgccgcatccacagccgcatcagcagcagcagccgccgccaccgccgcaggactcttccaagcccgtcgttgctcagggacccggccccgctcccggagtaggcagcgcaccaccagcctccagctcggccccgcccgccactccaccaacctcgggggccccgccagggtccgggccaggcccgactccgaccccgccgcctgcagtcacctcggcccctcccggggcgccgccacccaccccgccaagcagcggggtccctaccacacctcctcaggccggaggcccgccgcctccgcccgcggcagtcccgggcccgggtccagggcctaagcagggcccaggtccgggtggtcccaaaggcggcaaaatgcctggcgggccgaagccaggtggcggcccgggcctaagtacgcctggcggccaccccaagccgccgcatcgaggcggcggggagccccgcgggggccgccagcaccacccgccctaccaccagcagcatcaccaggggcccccgcccggcgggcccggcggccgcagcgaggagaagatctcggactcggaggggtttaaagccaatttgtctctcttgaggaggcctggagagaaaacttacacacagcgatgtcggttgtttgttgggaatctacctgctgatatcacggaggatgaattcaaaagactatttgctaaatatggagaaccaggagaagtttttatcaacaaaggcaaaggattcggatttattaagcttgaatctagagctttggctgaaattgccaaagccgaactggatgatacacccatgagaggtagacagcttcgagttcgctttgccacacatgctgctgccctttctgttcgtaatctttcaccttatgtttccaatgaactgttggaagaagcctttagccaatttggtcctattgaaagggctgttgtaatagtggatgatcgtggaagatctacagggaaaggcattgttgaatttgcttctaagccagcagcaagaaaggcatttgaacgatgcagtgaaggtgttttcttactgacgacaactcctcgtccagtcattgtggaaccacttgaacaactagatgatgaagatggtcttcctgaaaaacttgcccagaagaatccaatgtatcaaaaggagagagaaacccctcctcgttttgcccagcatggcacgtttgagtacgaatattctcagcgatggaagtctttggatgaaatggaaaaacagcaaagggaacaagttgaaaaaaacatgaaagatgcaaaagacaaattggaaagtgaaatggaagatgcctatcatgaacatcaggcaaatcttttgcgccaagatctgatgagacgacaggaagaattaagacgcatggaagaacttcacaatcaagaaatgcagaaacgtaaagaaatgcaattgaggcaagaggaggaacgacgtagaagagaggaagagatgatgattcgtcaacgtgagatggaagaacaaatgaggcgccaaagagaggaaagttacagccgaatgggctacatggatccacgggaaagagacatgcgaatgggtggcggaggagcaatgaacatgggagatccctatggttcaggaggccagaaatttccacctctaggaggtggtggtggcataggttatgaagctaatcctggcgttccaccagcaaccatgagtggttccatgatgggaagtgacatgcgtactgagcgctttgggcagggaggtgcggggcctgtgggtggacagggtcctagaggaatggggcctggaactccagcaggatatggtagagggagagaagagtacgaaggcccaaacaaaaaaccccgattttagatgtgatatttaggctttcattccagtttgttttgtttttttgtttagataccaatcttttaaattcttgcattttagtaagaaagctatctttttatggatgttagcagtttattgacctaatatttgtaaatggtctgtttgggcaggtaaaattatgtaatgcagtgtttggaacaggagaatttttttttcctttttatttctttattttttcttttttactgtataatgtccctcaagtttatggcagtgtaccttgtgccactgaatttccaaagtgtaccaatttttttttttttactgtgcttcaaataaatagaaaaatagttataatattgatcttcaactttgccattcatgcttctatgcatattaggctacgtattccacattgaaagcatgagagtgtctaggcctttgaatggcatatgccatttctgggaaatgcatctggaggctaagtattgctttctacaaataattgccccctttgttttaaaaagaagaaatgcatattgaagtagtttgatgatttgtttggcatataggaagcacgctggtgctaagtattttttaaatggttatgtaagcaaagctgaactgtaaatcttcaggaatatgtattaagattgtggaatgggtgtaagacaattggtagggggtgaaagtgggtttgattaaatggatcttttatggccctatgatctatcctttacttgaaagcttttgaaaagtggaaaggtcattttgttgcatttccccatttcttgtttttaaaagaccaacaaatctcaagccctataaatggcttgtattgaacttttacatttgaattaaagatgttaaacatgaa

SEQ ID NO: 1011 - DNA, 916 bp, Homo sapiens
ggacgcagagaagccagagactttcgcttccggctgccgcaggcgcttcgctggtgcaggtaagctccgcacactctcggccggtcccgagtccgactccctcaagggtgacgcgagctctgccctttaaccggaaacgtctccctgctcaccccacccccgcgcagacgcagtgctgagcacacagctaccggacaaagagtgacgcccggagctggagttatggcggctacggagccgatcttggcggccactgggagtcccgcggcggtgccaccggagaaactggaaggagccggttcgagctcagcccctgagcgtaactgtgtgggctcctcgctgccagaggcctcaccgcctgcccctgagccttccagtcccaacgccgcggtccctgaagccatccctacgccccgagctgcggcctccgcggccctggagctgcctctcgggcccgcacccgtgagcgtagcgcctcaggccgaagctgaagcgcgctccacaccaggccccgccggctctagactcggtcccgagacgttccgccagcgtttccggcagttccgctaccaggatgcggcgggtccccgggaggctttccggcagctgcgggagctgtcccgccagtggctgcggcctgacatccgcaccaaggagcagatcgtggagatgctggtgcaagagcagctgctcgccatcctgcccgaggcggctcgggcccggcggatccgccgccgcacggatgtgcgcatcactggctgagcggtggagctgcgggcggccagggccgggcgctctgtgcggactggggccatgatcgggcccgggggcctgagcctgggaccccaccccgtgttaatgaaaaatgagttttggcagcgccaaaaaaaaaaaaaaaaaaaaaaaaaaaaaaaaa

SEQ ID NO: 1012 - DNA, 9243 bp, Homo sapiens
atttcatttcttccactaaagcgtttgcggagacttcaaggtataatctatcccagatcctttcccagagagaaacttggcgatcacgttttcacatgatgctcacgctcagggcgcttcaattatccctccccacaaagataggtggcgcgtgtttcagggtctctcgtctctctcctacagaaaagaaaaagaaaaaaatgtcattagaagaggcgtaacacgtcagtccgtccccaggtttgtgtttcctggagtggccgaaagagatcagttctaacctgctctgcaggaataacggtcctgcctcccgacactcttggcgaggtttttgtacagtttgctccgggagctgtttcttcgcttccacctttttctcccccacacttcgcggcttcttcatgctttttcttctcaccatttctggccaaaactacaaacaagacttcgcagatcgagcctgcgtgctgccgaagcagggcgccgagtccatgcgaactgccatctgatccgctcttatcaatgaagcagccgatcatggcggatggcccccggtgcaagaggcgcaaacaagccaatcccaggaggaaaaacgtggtgaactatgacaatgtagtggacacaggttctgaaacagatgaggaagacaagcttcatattgctgaggatgacggtattgccaaccctctggaccaggagacgagtccagctagtgtgcccaaccatgagtcctccccacacgtgagccaagctctgttgccaagagaggaagaggaagatgaaataagggagggtggagtggaacacccctggcacaacaacgagattctacaagcctctgtagatggtccagaagaaatgaaggaagactatgacactatggggccagaagccacgatccagaccgcaattaacaatggtacagtgaagaatgcaaattgcacatcagattttgaggaatactttgccaaaagaaaactggaggaacgcgatggtcatgcagtcagcatcgaggagtaccttcagcgcagtgacacagccattatttacccagaagcccctgaggagctgtctcgccttggcacgccagaggccaatgggcaagaagaaaatgacctgccacctggaactccagatgcttttgcccaactgctgacctgcccctactgcgaccggggctacaagcgcttgacatcactgaaggagcacatcaagtaccgccacgagaagaatgaagagaacttttcctgccctctctgtagctacacgtttgcctaccgcacccagctcgagcggcatatggtgacacacaagccagggacagatcagcaccaaatgctaacccaaggagcaggtaatcgcaagttcaaatgcacagagtgtggcaaggccttcaaatataaacaccatctgaaagaacacctgcgaattcacagtggtgaaaaaccttacgagtgcccaaactgcaagaaacgtttctcccattctggttcctacagttcgcacatcagcagcaagaaatgtattggtttaatctctgtaaatggccgaatgagaaacaatatcaagacgggttcttcccctaattctgtttcttcttctcctactaattcagccattacccagttaagaaacaagttggagaatggaaaaccacttagtatgtctgaacagacaggcttacttaaaattaaaacagaaccactagacttcaatgactataaagttcttatggctacacacgggtttagtggcactagtccctttatgaatggtgggcttggagccaccagccctttaggagttcatccatctgctcagagtccaatgcagcacttaggtgtagggatggaagcccctttacttgggtttcccaccatgaatagtaatttaagtgaggtacaaaaggttctacagattgtggacaatactgtttccaggcaaaaaatggactgcaaggctgaagaaatttcaaagttgaaaggttatcacatgaaggatccatgctctcaacctgaggaacaaggagttacttctcctaatattccgcctgtcggtcttccggtagtgagtcataatggtgccactaaaagtattattgactatacgttggaaaaagtcaatgaagccaaagcttgcctccagagcttgactactgactcaaggagacagatcagtaatataaagaaagagaagctacgtactttaatagatttggtcactgatgacaaaatgattgagaaccacaacatatccactccattttcatgccagttctgtaaagaaagttttcctggccccatccctttgcatcagcatgaacgttacctttgtaagatgaatgaagagatcaaggcggtcctgcagcctcatgaaaacatagtccccaacaaagccggagtttttgttgataataaagccctcctcttgtcatctgtactttctgagaaaggaatgacaagccccatcaacccatacaaggaccacatgtctgtactcaaagcatactatgctatgaacatggagcccaactccgatgaactgctgaaaatttccattgctgtgggccttcctcaggaatttgtgaaggaatggtttgaacaacgaaaagtctaccagtactcaaattccaggtccccatccctggaaagaagctccaagccgttagctcccaacagtaaccctcccacaaaagactctttattacccaggtctcctgtaaaacctatggactccataacatcaccatctatagcagaactccacaacagtgttacgaattgtgatcctcctctcaggctaacaaaaccttcccattttaccaatattaaaccagttgaaaaattggaccactccaggagtaatactccttctcccttaaatctttcctccacatcttctaaaaactcccacagtagttcatacactccaaacagcttctcttctgaggagctccaggctgagcctttagacttgtcattaccaaaacaaatgaaagaacccaaaagtattatagccacaaagaacaaaacaaaagctagtagcatcagtttagatcataacagtgtttcttcctcatctgaaaactcagatgagcctctgaacttgacttttatcaagaaggaattttcaaattcaaataatctggacaacaaaagcactaacccagtgttcagcatgaacccatttagtgccaaacctttatacacagctcttccacctcaaagcgcatttccccctgctactttcatgccaccagtccagaccagtattcctgggctacgaccatacccaggactggatcagatgagcttcctaccacatatggcctacacctacccaactggagcagctacttttgctgatatgcagcaaaggagaaagtaccagcggaaacaaggatttcagggagaattgcttgatggagcacaagactacatgtcaggcctagatgatatgacagactccgactcctgtctgtctcgcaaaaagatcaagaagacagagagtggcatgtatgcatgtgacttatgtgacaagacattccagaaaagcagttcccttctgcgacataaatacgaacacacaggaaaaagaccacatcagtgtcagatttgtaagaaagcgtttaaacacaagcaccaccttatcgagcactcaaggcttcactcgggcgagaagccctatcagtgtgataaatgtggcaagcgcttctcacactcgggctcgtactcgcagcacatgaatcacaggtattcctactgcaagcgggaggcggaggagcgggaagcggcggagcgcgaggcgcgcgagaaagggcacttggaacccaccgagctgctgatgaaccgggcttacttgcagagcattacccctcaggggtactctgactcggaggagagggagagtatgccgagggatggcgagagcgagaaggagcacgagaaagaaggcgaggatggctacgggaagctgggcagacaggatggcgacgaggagttcgaggaggaagaggaagaaagtgaaaataaaagtatggatacggatcccgaaacgatacgagatgaagaagagactggagatcactccatggacgatagttcggaggatgggaaaatggaaaccaaatcagaccacgaggaagacaatatggaagatggcatgtaataaactactgcattttaagcttcctatttttttttccagtagtattgttacctgcttgaaaacactgctgtgttaagctgttcatgcacgtgcctgacgcttccaggaagctgtagagagggacagaaggggcggttcagccaagacagatgtagacggagttggagctgggtattgttaaaaactgcattatgcaaaaattttgtacagtgttaaggcctaaaaactgtgtggttcagagactaattcctgtgtttaatagcatttatactttaagcacaactagaaaattgtaagaattgcactctacttatgtatcactacaaactttaaaaaactatgtctaatttatattaatacattttaaaaaggtgcccgcactaccatacatcagtatttttattattattattgttattcctttttaatttaatgtgctcgcactacaatgcatcagtattatgattcctctgtactttcctttcgctattcatcaatttcccattttttttttcagcttaagtaaccacacaattttaggcctcaatttttttttttttctgtgaaggaacttgaagtgatgcatgtgtgaatttaagataccgaagtcttaaagtgacctggacgtgaaggaaaaagtaagatgagaaataaagaaagcctttgtaaggtggttttaaaagccttatatgcaaaccttttaatctgtgtttctgcaagtgccatccttgtacagtgttaagagggtaacatgggttacctttgcaccagcttcagtgttaagctcaccctgttctttgaagcacccatgtcagtattagaagaataggcagcagttccttagtttacatatgtttgtgcaattattttctgtacttttttgttcattaattttgtcagtattacaccaaactgtttttgcaacaaaaaaattttttttgcattcatttaattttaggtcaaataacattttatttatgtggctcattttatatttcctaattttatttatttcatactgtagtgtacagtattatagttcttcaatatatagatatattttagtaaaaaaggaacatgacgttgatcatttgggcaaattttacgtaaagagaagagcatttattgtgttttggaacattaattgtgagatgggatttttcaattttattattttatttttgtttttttccaattactggaaattccaaatttgggaacttttgatacgatcttgtgaaaacactgtattttcgactgaaaattccactttcttcatcttgttttttagctaaaaagagggactgttaaatacaatgtatgataccatgacaaaaatctttcctgaattgtctttgtaaaagtattattgaattttcaatttgtaatttcttttgaaaatgaccatgctcgaataaaaatgtagccaaactaagaatgtagttaatgagttctgtacttttagagagttttccttcaatgaccattaacatgtaacatgctttatgcttataataatgctaattatgtttttttcatataattttagtttagcaataattttgactggtaccaataactgttttttaaaattccatacctatgtacagcaattttacagcttttctcaactgatcctgattccagattgtgtatttttatgtgaggttatattattcaaatttagtctatttactttacagacatttctacttttgcattacgagtatttagagattatgtgttaaaaattcacttctctgtccaaggggtctttgtgatttattcaaaaaaaagtctaatttcaaaaagacagctattattcagtgttatttataatatgtaaccttttttaaaggattgggatagtttatctcactttttgaaatgcagacagtagtttaccgtttatctgaaactagaaggcgtgggtgggagaggaaaagctaaaagcaaatgctaacaaaaataaccgtgattttctaagacagtttttcagtttttacaagatgaccctaatattcagaatatgaatgtattcgtaggttttacataatgacttttatcaagaaactagattctgcttcttaaatctaattgccaagtgaagaataacagaaaaaacagattaccttatcaaatttacagctcttgaatatacagaactataatatagtagctgtccatgtattttttctactttagaatcaaagaagaaaagcatcattttgctattaaatttgctaaaattttgagtatgatatttccagttggcaagaacaacatatttatatttattccttagccataataccactttcctaaatttcacaaaagtcattctttgcaacttgaaactcaatagaaagtgtgtatgtgtgtgtgtgtatatatatatatatatacacacacacacatacacagaaaggatgtaatgaagatacagtaatagttgagcagacctttttagaaaaacatgtttttagctctatcttcaaactttctggcagagggggtggggggggcagggggaggagtggcatcaaaatgctatgcctcctgttatccacagcctagagtttttatatttggaaagtttagaaaattctatcctcgtttctccttctttgaatggcacaaataaatacactacataaatttttctggtttgaaaggctctaggcgataactttattaattcaacctgaaaatatcaagccattaaattttgtccgggtagaataaatccctgtggcctcttttaaagcaatgtaggtctctgttgcccatggggcatatctgtgtcccaatccacaagagataggaccaacaaacaatgaatgtgcaacctaactctttctccttggaaagaagaaagtgtgcacgaagtagaggagggtgggcagaccctgccttgcccctcctgttacccccttctctgtcatttgttcctaactccatttcataggcaggctcagaatacctgagtctgaaaatatcaggataacacttgtgaattgtgacaatcactacaatgtcccatatctgaggagttttttttaatgctatttatccgctggacacgattgcacattagggctgcataatcctctaactctagggaaaaataaaaacttttgatttgtcttaagattcttctccaaggtcgcaaacaagaaattcccctccacaaccaagagatgtgcattttagtaacatcagatgtgttcttctgttttatcaactacttactcttcccacacgcttagttctaaatctaacctttcccccctcgaatagggggcaggggaggatgaggaaacactggaacaactgaacacccctgcccattttctccaagagccttttgtattctagcatatctgtgcaatcttttcttttttcttcacatgacactgtaagcttaggcctgaaataactgggaagagagatgcgtatcagaatttctccgcaagagctaaacaaaacatacatcttccttagcatgaattggactgggggcggagtgggagggcttggaggaaaggggaaagaagggactatatttgaataaatatgaataaatgtattagatacttttcacaatcagataacttttaaaaaggtcattttttatctttctaataatgtaagccttaataaaagcaaatcttagtcacaaatttgaggagactgcccaataataagtttacatgtatttgaactgaaaaattgttaaccatgcttttgctccaagatgtgtgaggccattcaggggctgtagggccctggatatacacacaaacaagtgtgtgtatatctggagccccacacattgtaataaacacagctgcatttatttgactatgtgatcccatgtacatgtaaaaacattcaaacaaacacactcagcggatttatttattgtgcaatggggcaattattcaaataaacatgctcaatgcaattatttgaatctcacattgcatgttcatcaatcatagcactaaaaaaagagggggaaaaaacaccaaagaattcacatggggaaaaaatatatatatgaaaaccaccttattatagattttatagggcagctgaggttatggctcccttcttaactgtaactcaactattctgtattcaatgacatttgtttctaatgattaattggttcactcacttgatcatataatagcaaactttataaacctgtattgtgtagagatgtgaaatctctatatttcaagagcagaagagttctttctagacaccttacatcaagggacactggtccaattattatcgcttatataagcactcctataaattctgaaaaattttatacatgcaacaaaacattcctacatttgaagacattaagaaaaatcacaggtgactcatctgatcattctatatattaataaatattatgacatatatgtgaacacatcacaaatcatattggtgtaccaagaggcaatttatgcctctcttaagtatgtactgacataacctaatatactaaaatgggaaggggcttttagtcactgaaatatgcatcgtgtaacaaagatgaagaaaatacatggcttgtgcccatcataaaaaaagattcagactgaaggcttagctttggttttttcaattaaattgttaaactgtgcacagtgatttttttttagaacttgagacatttgtgatgttggctgtttaaatctttgttaccttcgctgtgaattgaaattgtacatatttagtaaatcatgcagacaaaacaaactttttagacaatatttttattggagagttttcttttcctgtatccatgttaaaaaaaaaaaagacctcctttcccaaaataaaaatgtcaatactaaatttaaagaagtataaaggaatgattgcttcctttagagcaaaatatttaaataaacatggagataattggcaacatgttctttttgggctagtaggctgtgtccaattttttgggtctgatgtttcagagggcctctgtttcagggttgaagatgatatattaatctcggaattaaacaaatgctattaaataac

SEQ ID NO: 1013 - DNA, 2640 bp, Homo sapiens
gagcagccatgctgggcgcgcgggcctggttgggccgcgtccttctgctgccccgcgccggtgcaggcctcgccgcgagccgcaggtgtcctggagtctggcccaggacctggccccacaggagtcccagcaggggtagctcctcccgggacaaggaccgaagtgcgacggtcagtagttcagtgcccatgcctgctggagggaaaggaagccatccttcatctacaccccagagggtccccaaccgcctgatccacgagaagtcaccatacctcctacaacatgcctacaatcctgtggactggtacccctggggacaggaagccttcgacaaggccaggaaggaaaacaagccgattttcctctcagtcgggtactccacctgccactggtgccacatgatggaagaggagtccttccagaatgaggagattggccgcctgctcagtgaggactttgtgagtgtgaaggtagaccgtgaggagcggcctgacgtggacaaggtgtacatgacgttcgtgcaggccaccagcagcggcgggggctggcccatgaatgtgtggctgactcccaacctccagccctttgtcgggggcacctatttccctcctgaggatggcttgacccgagtcggcttccgcacagtgttgctgagaatacgagaacagtggaaacagaacaagaacaccctgctagaaaatagccagcgtgtcaccactgccctgctggcccgatcagagatcagcgtgggtgaccgccagctgccgccctctgccgccaccgtgaacaatcgctgcttccagcagctggatgagggctatgatgaggaatacggtggcttcgctgaggcccccaagtttcccacgccggtgatcctgagcttcctgttctcctactggctcagccatcgactgactcaggatggctctcgggcccagcagatggccttgcataccctgaaaatgatggctaacgggggcatccgggaccatgtggggcagggctttcaccgctactccacagaccgccagtggcacgtccctcactttgagaagatgctctatgaccaggcacagctcgctgtggcctattcgcaggccttccagctctctggtgatgaattctactctgacgtggccaaaggcatcctgcagtacgtggctcggagcctgagccaccggtccggaggcttctatagcgcagaagatgcagactcgcccccagagcggggccagcggcccaaagagggcgcctactatgtgtggacggtcaaagaggttcagcagctcctcccggagcctgtgttgggtgccaccgagccgctgacctcaggccagctcctcatgaagcactacggcctcacagaggctggtaacatcagccccagtcaggaccccaagggggagctgcagggccagaatgtgctgaccgtccggtactcgctggagctgactgctgcccgctttggcttggatgtggaggccgtgcggaccttgctcaattcagggctggagaagctcttccaggcccggaagcatcggcccaagccgcacctggacagcaagatgctggctgcctggaatggcttgatggtgtcaggctatgctgtgactggggctgtcctgggccaagacaggctgatcaactatgccaccaatggtgccaagttcctgaagcggcacatgtttgatgtggccagtggccgcctgatgcggacctgctacaccggccctggggggactgtggagcacagcaacccaccctgctggggcttcctggaggactacgccttcgtggtgcggggcctgctggacctgtatgaggcctcacaggagagtgcgtggctcgagtgggctctgcggctgcaggacacacaggacaagctcttttgggactcccagggtggcggctacttctgcagtgaggctgagctgggggctggcctgcccctgcgtctgaaggacgaccaggatggagcagagcccagcgccaattccgtgtcagcccacaacctgctccggctgcatggcttcacgggccacaaggactggatggacaagtgtgtgtgcctattgaccgccttttccgagcgcatgcgtcgtgtcccggtggcgttgcccgagatggtccgcgccctctcagcccagcagcagaccctcaagcagatcgtgatctgtggagaccgtcaggccaaggacaccaaggccctggtgcagtgcgtccactctgtctacattcctaacaaggtgctgattctggctgatggggacccctcgagcttcctgtcccgccagctgcctttcctgagtaccctccgacggttggaagaccaggccactgcatatgtgtgtgagaatcaagcctgctcagtgcccatcactgatccctgcgaattacgaaaactactacatccatgactgccccaacccccttggggtggggcagaaggtgaagcatcccaactgactagagactcaggccctgcagggccctatagaacctgtggccatccctgagcaccctgccaccaggtgacctcggccatactcactgccccccttgggcacccactcaccctagaataaacttaacagtgtcccgtggtaaaaaaaaaaaaaaaaaaaaaaaaaaaaaaaaaaa

SEQ ID NO: 1014 - DNA, 1766 bp, Homo sapiens
gtgaggtgctgcgggaggccccgggcaccatggcccaggccctgggggaggacctggtgcagcctcccgagctgcaggatgactccagctccttggggtccgactcagagctcagcgggcctggcccatatcgccaggccgaccgctatggattcattgggggcagctcagcagagccagggccgggccacccacctgcagacctcatccgccaacgggagatgaagtgggtggagatgacctcgcactgggagaaaaccatgtcccggcggtacaagaaggtaaagatgcagtgccggaaaggcatcccgtctgccctgcgcgcccgatgctggcccctgttgtgtggggcccatgtgtgccagaagaacagccctggcacctatcaggagctggcagaggcccctggagacccacagtggatggagaccattggcagggacctgcaccgtcaattccctctgcacgagatgtttgtgtcgcctcagggccacgggcagcaggggctcctgcaggtgctcaaggcctacaccctgtatcgaccggagcagggctactgccaggcccaggggcccgtggctgctgtgctgctcatgcacctgcccccagaggaggccttctggtgcctggtgcagatctgtgaggtctacctccctgggtactacgggccccacatggaggctgtgcggctggacgccgaggtgttcatggccctgctgcggcggctgcttccgcacgtgcacaagcacctgcagcaggtgggcgtcggacccctgctgtacctgcccgagtggttcctgtgcctcttcgcccgctccctgcccttccccacagtgctgcgtgtctgggatgccttcctcagtgagggtgccagagtactgttccgtgtggggctgacactggtgcgcctggcgctgggcactgcagagcagcgaggggcctgccctggcctcctggagacactgggagcccttcgagccatcccccccgcgcagctgcaggaggaggccttcatgtcacaggtgcacagcgtggtgctgtcagagcgggacctgcagcgggagatcaaggcccagctggcccagctgcccgattccgcgccgggacccccgccccggccacaggtccgcctcgccggggcccaagccatctttgaggcccagcagctggcaggagtgcgacgaggcgccaagcctgaggtgcctcggattgtggtgcagcccccggaggagcccagaccaccgcggcggaaaccccagacccgcggcaagactttccatgggctcctgactcgggcccggggcccccccatcgaggggccccccaggccccaacgaggctccacctccttcctggacacccgcttctgagaggaccatggacttagtgtcccccagtctcaattgcctgatggctgatgccagcccggcaaataggcaccgcactttactcttgggactcggggacttggcttccttcctggcaaggaccaggcagtggggaaggaggaggtcctccgtggtacatactgggtcaggcactagcatggaggagggtcacagagtggggcacgtgaggacccatggaaccgtcctggtgcccaggccctcacaagtaccaaagccagcaccaaaggagtcagggaaggggttggctgagtcaagggaccccagagggcaccaggaataaaatcttcttgaacagaaaaaaaaaaaaaaaaaaaaaaaaaaaaaaaaaaaaaaaaaaaaaaaaaaaaaaaaaaaaaa

SEQ ID NO: 1015 - DNA, 2428 bp, Homo sapiens
acctggccgccatgcgcctctcctcctccccacctcgtggcccgcagcagctctccagctttggctccgtggactggctctcccagagcagctgctcagggccgacccacacccccaggcctgccgacttctccctggggagcctccctggcccaggccagacatccggcgcccgggagccccctcaggccgtcagcatcaaggaggccgccgggtcctcaaatctgcctgcgccggagaggaccatggccgggttgagtaaggagccaaataccttgcgggccccccgtgtccgcacagccttcaccatggagcaggtccgcaccttggagggcgtcttccagcaccaccagtacctgagccctctggagcggaagaggctggccagggagatgcagctctcagaggtccagataaaaacctggtttcagaatcgccgcatgaaacacaaacggcaaatgcaggacccccagctgcacagccccttctcggggtctctccatgcgcccccagctttctactcaacgtcttctggccttgccaatggcctgcagctgctgtgcccttgggcacccctgtccgggccccaggctctgatgctgccccctggctccttctggggtctctgccaagtggcacaagaggccctggcatctgcgggagcttcctgctgcgggcagcctctggcgtcccacccccctaccccaggccggccttcgctgggaccagccctgtccacggggccccggggcctgtgtgctatgccacagacgggggatgcattttgaggaggcacctctgactcccacactcgcggtcttgctgatcgcacctggctcctacctggaggactcagttgttctgtttacatcctggtggcacctctcaccctgacccacacaaaggttctggagattactggagaatatatataaatatatatatgtacgtatatatgtaaatacacatatacgtatatataaatatatatatacatatgtgtgtgtatatatatatatatttttttttttttttttttttttgagacggagtgttgctctgtcacccaggctggagtgcaatgacgcaatctcggctcactgcaacctccgcctcctgggttcaagcgattctccagcctcagcctcccgagtagctgggattacagacacccgccaccacgcccggctaattttttctatttttagtagaaatggggtttcaccatgttagccaggctggtctcaaactcctgaccctgtgatccgcccgcctcggcctcccaaagtgctgggattacaggcatgagccactgcacccggccctgagaatatatttattaaagccacctcttcactgaaagttaccgaaagagtcggtttaggaaggaaacgaagggtcagtgaacagagtcaaatgcagaagtgggcttgtcatgggtagggctttcggcgtacgataaaaggatcatttgttttttaaaaggggttggaaaaactggttttccagttggaaacagtaaaggttgtaagctttgtgtgtacaaaagaaaacagggaatgcaggtgtgtttatagcgttgtggttcaagtccctcttaacaagaactccaaagctggaaagcaggagggaacaaaggtgaacatgaaggcgaggatgctggggccctgcagtgcgctctaggctgtgcgtgagccgggactgtacccacagcttgctgagggctgctcttcttgggccagggaaagcagggcagccgggacctgcggctgtgcctggactgaagctgtcccgcaggtccccaccctccaacacgtgctcacctgtccccctcctcgcagcagcctcgggacaaaacaatgactcaaggacagcacttctcgcagaaggtctggaagtgcccagaatgggaggcacggaagcccctcccggggaggactcccgcgttgatggaccgttcttggtgcagactcctgactgcgtgcatgaaacctgagacaagtgcaattccttccatgtcgccccagagtgcccaggaggcaggcagtgcggggtgcccaggcagacgggttcagcctgcagaactggaggcgacctgtgaaacccacccgggcaccccaacaggaacagaagcgtggtcctgcggctgcgtccccagcgagtttcactttccccttgctcgtttctcccttgttgtaagtgtttacaactggcatgtgcttttaaacgtcaggtaagaggggaacagctgctgtacatcgtcctggcgagtgacaatgtgacagaagcctgggcgaggccctcggagggcagcagctggacaggggctactgggtttggcctggacagcactgatttgtggatgtggatgggggcacgttgtccgtgataaaagtacaagtgcccctcacaaaaaaaaaaaaaaaaa

SEQ ID NO: 1016 - DNA, 1039 bp, Homo sapiens
gttatatgaggccccgctccggccccacgcggaacccgcggctccgagccttcgccggcgtcccgacccgaggccggacccgaggccagtcccgccgctgcgcagccgaagccagtgcggggcctgagagggacgcgcgccccggggcccccgccgcgggcaccatgggcgctgcccactccgcgtctgaggaggtgcgggagctcgagggcaagaccggcttctcatcggatcagatcgagcagctccatcggagatttaagcagctgagtggagatcagcctaccattcgcaaggagaacttcaacaatgtcccggacctggagctcaaccccatccgatccaaaattgttcgtgccttcttcgacaacaggaacctgcgcaagggacccagtggcctggctgatgagatcaatttcgaggacttcctgaccatcatgtcctacttccggcccatcgacaccaccatggacgaggaacaggtggagctgtcccggaaggagaagctgagatttctgttccacatgtacgactcggacagcgacggccgcatcactctggaagaatatcgaaatgtggtcgaggagctgctgtcgggaaaccctcacatcgagaaggagtccgctcgctccatcgccgacggggccatgatggaggcggccagcgtgtgcatggggcagatggagcctgatcaggtgtacgaggggatcaccttcgaggacttcctgaagatctggcaggggatcgacattgagaccaagatgcacgtccgcttccttaacatggaaaccatggccctctgccactgacccaccgccacctccgcggagaaactgcactttgcaatggggccgcctccccgcgtagctggagcagcccaggcccggcggacagcctcttcctgcagcgccggtacatagccaaggctcgtctgcgcaccttgtgtcttgtagggtatggtatgtgggacttcgctgtttttatctccaataaaaaaaaaaaaaaggtttgttaattaaaaaaaaaaaaaaaaaaaaaa

SEQ ID NO: 1017 - DNA, 5532 bp, Homo sapiens
ggcccaccgccgcccaggcaaggccgccctgccttgggcgcagcgctgccatggctgggggccgtggggcccccgggcgcggccgggacgagcctccggagagctacccgcaacgacaggaccacgagctacaggccctggaggccatctacggcgcggacttccaagacctgcggccggacgcttgcggaccggtcaaagagccccctgaaatcaatttagttttgtaccctcaaggcctaactggtgaagaagtatatgtaaaagtggatttgagggttaaatgcccacctacctatccagatgtagttcctgaaatagagttaaaaaatgccaaaggtctatcaaatgaaagtgtcaatttgttaaaatctcgcctagaagaactggccaagaaacactgtggggaggtgatgatctttgaactggcttaccacgtgcagtcatttctcagcgagcataacaagccccctcccaagtcttttcatgaagaaatgctggaaaggcgggctcaggaggagcagcagaggctgttggaggccaagcggaaagaagagcaggagcaacgtgaaatcctgcatgagattcagagaaggaaagaagagataaaagaagagaaaaaaaggaaagaaatggctaagcaggaacgtttggaaattgctagtttgtcaaaccaagatcatacctctaagaaggacccaggaggacacagaacggctgccattctacatggaggctctcctgactttgtaggaaatggtaaacatcgggcaaactcctcaggaaggtctaggcgagaacgtcagtattctgtatgtaatagtgaagattctcctggctcttgtgaaattctgtatttcaatatggggagtcctgatcagctcatggtgcacaaagggaaatgtattggcagtgatgaacaacttggaaaattagtctacaatgctttggaaacagccactggtggctttgtcttgttgtatgagtgggtccttcagtggcagaaaaaaatgggtccattccttaccagtcaagaaaaagagaagattgataagtgcaaaaagcagattcaaggaacagaaacagaattcaactcactggtaaaattgagccatccaaatgtagtacgctaccttgcaatgaatctcaaagagcaagacgactccatcgtggtggacattttagtggagcacattagtggggtctctcttgctgcacacctgagccactcaggccccatccctgtgcatcagcttcgcaggtacacagctcagctcctgtcaggccttgattatctgcacagcaattctgtggtgcataaggtcctgagtgcatctaatgtcttggtggatgcagaaggcaccgtcaagattacggactatagcatttctaagcgcctcgcagacatttgcaaggaggatgtgtttgagcaaacccgagttcgttttagtgacaatgctctgccttataaaacggggaagaaaggagatgtttggcgtcttggccttctgctgctgtccctcagccaaggacaggaatgtggagagtaccctgtgaccatccctagtgacttaccagctgactttcaagattttctaaagaaatgtgtgtgcttggatgacaaggaaagatggagtccccagcagttgttgaaacacagctttataaatccccagccaaaaatgcctctagtggaacaaagtcctgaagattctgaaggacaagattatgttgagactgttattcctagcaaccggctacccagtgctgccttctttagtgagacacagagacagttttcccgatacttcattgagtttgaagaattacaacttcttggtaaaggagcttttggagctgtcatcaaggtgcagaacaagttggacggctgctgctacgcagtgaagcgcatccccatcaacccggccagccggcagttccgcaggatcaagggcgaagtgacactgctgtcacggctgcaccatgagaacattgtgcgctactacaacgcctggatcgagcggcacgagcggccggcgggaccggggacgccgcccccggactccgggcccctggccaaggatgaccgagctgcacgcgggcagccggcgagcgacacagacggcctggacagcgtagaggccgccgcgccgccacccatcctcagcagctcggtggagtggagcacttcgggcgagcgctcggccagtgcccgtttccccgccaccggcccgggctccagcgatgacgaggacgacgacgaggacgagcacggtggcgtcttctcccagtccttcctgcctgcttcagattctgaaagtgatattatctttgacaatgaagatgagaacagtaaaagtcagaatcaggatgaagattgcaatgaaaagaatggctgccatgaaagtgagccatcagtgacgactgaggctgtgcactacctatacatccagatggagtactgtgagaagagcactttacgagacaccattgaccagggactgtatcgagacaccgtcagactctggaggctttttcgagagattctggatggattagcttatatccatgagaaaggaatgattcaccgggatttgaagcctgtcaacatttttttggattctgatgaccatgtgaaaataggtgattttggtttggcgacagaccatctagccttttctgctgacagcaaacaagacgatcagacaggagacttgattaagtcagacccttcaggtcacttaactgggatggttggcactgctctctatgtaagcccagaggtccaaggaagcaccaaatctgcatacaaccagaaagtggatctcttcagcctgggaattatcttctttgagatgtcctatcaccccatggtcacggcttcagaaaggatctttgttctcaaccaactcagagatcccacttcgcctaagtttccagaagactttgacgatggagagcatgcaaagcagaaatcagtcatctcctggctgttgaaccacgatccagcaaaacggcccacagccacagaactgctcaagagtgagctgctgcccccaccccagatggaggagtcagagctgcatgaagtgctgcaccacacgctgaccaacgtggatgggaaggcctaccgcaccatgatggcccagatcttctcgcagcgcatctcccctgccatcgattacacctatgacagcgacatactgaagggcaacttctcaatccgtacagccaagatgcagcagcatgtgtgtgaaaccatcatccgcatctttaaaagacatggagctgttcagttgtgtactccactactgcttccccgaaacagacaaatatatgagcacaacgaagctgccctattcatggaccacagcgggatgctggtgatgcttccttttgacctgcggatcccttttgcaagatatgtggcaagaaataatatattgaatttaaaacgatactgcatagaacgtgtgttcaggccgcgcaagttagatcgatttcatcccaaagaacttctggagtgtgcatttgatattgtcacttctaccaccaacagctttctgcccactgctgaaattatctacactatctatgaaatcatccaagagtttccagcacttcaggaaagaaattacagtatttatttgaaccataccatgttattgaaagcaatactcttacactgtgggatcccagaagataaactcagtcaagtctacattattctgtatgatgctgtgacagagaagctgacgaggagagaagtggaagctaaattttgtaatctgtctttgtcttctaatagtctgtgtcgactctacaagtttattgaacagaagggagatttgcaagatcttatgccaacaataaattcattaataaaacagaaaacaggtattgcacagttggtgaagtatggcttaaaagacctagaggaggttgttggactgttgaagaaactcggcatcaagttacaggtcttgatcaatttgggcttggtttacaaggtgcagcagcacaatggaatcatcttccagtttgtggctttcatcaaacgaaggcaaagggctgtacctgaaatcctcgcagctggaggcagatatgacctgctgattccccagtttagagggccacaagctctggggccagttcccactgccattggggtcagcatagctatagacaagatatctgctgctgtcctcaacatggaggaatctgttacaataagctcttgtgacctcctggttgtaagtgttggccagatgtctatgtccagggccatcaacctaacccagaaactctggacagcaggcatcacagcagaaatcatgtacgactggtcacagtcccaagaggaattacaagagtactgcagacatcatgaaatcacctatgtggcccttgtctcggataaagaaggaagccatgtcaaggttaagtctttcgagaaggaaaggcagacagagaagcgtgtgctggagactgaacttgtggaccatgtactgcagaaactgaggactaaagtcactgatgaaaggaatggcagagaagcttccgataatcttgcagtgcaaaatctgaaggggtcattttctaatgcttcaggtttgtttgaaatccatggagcaacagtggttcccattgtgagtgtgctagccccggagaagctgtcagccagcactaggaggcgctatgaaactcaggtacaaactcgacttcagacctcccttgccaacttacatcagaaaagcagtgaaattgaaattctggctgtggatctacccaaagaaacaatattacagtttttatcattagagtgggatgctgatgaacaggcatttaacacaactgtgaagcagctgctgtcacgcctgccaaagcaaagatacctcaaattagtctgtgatgaaatttataacatcaaagtagaaaaaaaggtgtctgtgctatttctgtacagctatagagatgactactacagaatcttattttaaccctaaagaactgtcgttaacctcattcaaacagacagaggcttatactggaataatggaatgttgtacattcatcataatttaaaattaaattctaagaagaggctgggtgcagtggctcacacctttaatcccagcactttgggaagccaaggcaggaagactgcttgaaaccaggagtttgagaccagcctgagcaacaaagcaagaccccatctctataaaaactaaaaaaattagttgggcatggtggcacatgcctgtagtcccagctactccagaggctgagatggatcatctgagcctcaggaggttgaggctgcagtgagctgtgactgcgccactgcactccagtctgggacaacagagcaagaccctgtcttaaaaaaaaaaagaaaaaaaaaatttttttctaagaagctgtcctacaaagttgagctttgttagtttttcatgtgtaatatattataaatttatcttttgggatataataaatgctttcatatacctgcaaaaaaaaaaaaaaaaaaaa

SEQ ID NO: 1018 - DNA, 5243 bp, Homo sapiens; identical to SEQ ID NO: 244

SEQ ID NO: 1019 - DNA, 6921 bp, Homo sapiens
agggggtgctcccgggggcggcggttgcccggatgggccgttagtcggggctcagccgcggagtgagcgagggagacgggaggagccgaacccggcgccatccgccgccatcctcccccgccccaccgccatcccgtcccggggagcccctaggcccgggtcccggatccccgcgcacccggccaggctctggcacgttttgggggaggtgcctgcaggacccaacatactcaatgagcttccagcgcaatgtccgatcgctcggggccgactgccaagggaaaggatggaaagaagtattcctcgctcaacctgtttgatacgtataagggcaagtccttagagatccagaaacccgctgttgcccctcgccatggcctgcagagtctcgggaaagttgccattgcccggcgtatgccacctccagccaaccttccaagcctgaaagccgagaacaaaggcaatgaccccaatgtctcactagtgccaaaagacggaacaggatgggcaagcaaacaggagcagtccgaccccaagagttccgatgcctcaaccgctcagccgccggaatcgcagccactgccggcttcacagacgcctgcctccaaccagccgaaacgacccccagcagcccccgagaacactcctttggttccaagcggggtaaagtcctgggcacaagccagcgtcacccatggagcacatggagatggtggaagggcatcaagcctactgtcacgattctctcgagaggaatttccgaccctgcaggcggctggcgaccaggacaaggctgccaaggaaagggagtctgccgaacagtcgtctgggcccggaccaagcctccgcccccaaaattctacaacttggagggacggaggtgggcgtggccctgatgagctggagggcccggactccaaacttcatcatggtcatgatccccggggtgggctacagccttcaggcccaccccagttccctccctaccgcggaatgatgccgcctttcatgtatcccccatatctcccgttccctccgccctatggaccccaggggccttaccgataccccactcctgatgggcccagccgttttccccgtgtggcgggcccccgaggctcagggccaccaatgcgcttagtagagcctgtgggtcgtccctctattctcaaagaggataatctcaaagagtttgatcagttggatcaggagaatgatgatggttgggcaggggcccatgaagaggttgactacactgaaaagctcaagttcagcgatgaggaagatgggcgagactctgatgaggagggtgctgagggccacagggattcccaatcagcttctggtgaggaacggccccctgaagcagatggcaaaaagggcaactcccccaacagcgaaccgcccactcctaagacggcctgggcagaaacctctcggcctccagagacagagccgggacctcctgccccaaagcctcccctacccccacctcaccggggccccgccgggaactggggcccccctggggactacccagatcgtgggggtcctccctgcaagcccccagcacctgaagatgaggatgaggcatggcggcagcgacgaaagcagtcgtcatctgagatttccctggcagtggagcgggcccggcgacggcgagaagaagaggagcggcgcatgcaagaagagcgccgggcagcctgtgctgagaagctcaagcgactcgatgaaaagtttggggcacctgacaagcggctcaaagcagagcctgctgccccacctgctgccccttctaccccagctccaccacctgcagtccctaaagaactccctgcacctccagctccacctccagcatcagccccaacaccagagacagaacctgaagagccagcacaggcccctcctgcccaatctactcctactccaggtgtggctgcggctcccactctggtgagtggtggtggcagtaccagtagcaccagcagtggcagcttcgaagccagcccagtggaaccacaactgccctcaaaagagggtcctgaaccaccagaagaggttcctcctcctaccacacccccagttccaaaggtggaacccaagggtgatgggattggtcccacccgccagccccctagtcagggcttgggctaccccaaatatcagaagtcgttgcctcctcgtttccagcggcagcagcaggagcagctcctgaagcagcagcagcagcaccagtggcagcagcatcaacagggctctgcccctcctaccccagtgcccccatcaccaccacagcctgtgaccctgggggctgtgccagctccacaggctccacccccgccccccaaggccctgtacccaggtgctctgggccggcccccacccatgcccccaatgaactttgatccccgatggatgatgattcctccttatgtggacccccggctcctccagggtcgtccccctctagacttctaccctcctggtgtgcatccctctggcctagttccccgagagcgttcagacagtgggggctcaagctcagagccatttgaccgtcatgcacctgctatgttacgggaacggggcactccaccggtggatccaaagttggcctgggtaggagatgtcttcaccgccacacccgctgaaccccgcccacttacctcacctctgcgccaggctgcggatgaggatgacaaggggatgaggagcgagactcctccagtacctcccccaccaccctatctggccagttatccaggctttcctgagaatggagcccctgggcccccaatctctcgctttcctctggaggaaccagggccccgtccactcccctggcccccaggcagtgatgaagtggccaagatacaaactccaccacccaagaaggagccccctaaggaggagactgcacagctgacggggccagaagcaggccgaaagcctgcccgcggagtcgggagtggaggccagggccccccaccaccacgcagagagagtcgcacagagacccgctggggccctcgtccagggagcagtcgtcgtggaatccctccagaggagccaggggccccaccccgccgggctgggcctataaagaaacctccaccacctacaaaagtagaagagctgcctcccaagcccctcgaacagggggatgaaacccccaaacccccaaagccagacccactcaagataaccaaggggaagctagggggccccaaggagaccccacccaatggaaatctttcccctgccccaaggcttcggagggactattcgtatgaaagagtgggtcctacctcttgccggggtcggggccgaggcgagtattttgccagagggaggggttttcgggggacctatgggggacgagggcggggagcccgaagccgggaattccgcagttaccgagagtttcgaggagatgatgggcgtggaggtgggacagggggaccaaaccaccctcctgctccccgaggccgcactgccagcgagacacggagcgagggttcagagtatgaggaaatccccaagcggcgccggcagcggggctcagaaacaggcagcgagacccatgagagtgatctggctccttcagacaaggaggctcccacacccaaggagggaacactcacccaggtccctctcgctcccccaccaccaggagccccaccttcaccagccccagcccgcttcactgcccggggtgggcgagtcttcactcccagaggggtgccatctcgccggggccgaggaggagggaggccccctcctcaagtttgcccaggctggagccctccagccaagtctctggctcccaagaaacctcccacaggccctttgccaccaagtaaggagcctttgaaagagaagttgatcccagggcctctgtcccctgtggcgcgcggaggcagcaatggaggtagcaatgtgggcatggaagatggggagcgaccccgaaggaggcgacatgggagggctcagcagcaggataaaccgcctcgtttccggaggctgaagcaggaacgggagaatgccgcaagggggtctgagggcaagccctccctaacccttccagcctccgctcctggacctgaggaggccctcacaacagtcacagtggccccagcacctcgccgggcagctgccaagtctcctgatctgtcaaaccagaactcagaccaagccaatgaggaatgggagactgcatcagagagcagtgacttcaccagtgagcgccgaggggacaaagaggcacccccaccagtactgctgacacccaaggctgtgggaactcctgggggaggtggaggtggagccgtaccaggtatttcagccatgtcccgcggagatctgagccagagagccaaggatttgagtaaacggagcttctcaagtcagcggccaggcatggaacggcagaatcggcgccctggcccagggggcaaggctggcagcagtggcagcagcagtggaggaggcggtgggggtcctggaggaaggaccgggccaggacgaggcgacaagaggagctggccctctcccaagaaccgaagtcgtcctccagaggagcgtcccccggggcttcccctgcctcccccacctcccagcagttctgctgtcttccgcctggaccaagttatccacagcaaccctgctggcatccaacaggctctggcccagcttagtagccgtcaagggagtgtaactgcaccagggggtcatccaaggcacaagcctgggcttccccaagcccctcagggcccctctcctaggcccccaacccgatacgagccccagagggtcaacagcggcctcagttctgacccccactttgaggagccggggccaatggtgagaggggtgggtgggactcctcgggactctgccggggttagtccctttccccctaaacgtcgggagcggcctcccagaaaaccagagctgctacaggaggaatctttgccacctcctcatagctctggattcttgggctctaagcctgagggcccaggccctcaggcagagtccagagatacaggcacagaggccctgacccctcacatctggaaccgtttacatactgccactagccgaaagagttaccggcccagctccatggagccttggatggagcccctgagtccttttgaggatgtggctggcacagaaatgagtcagtctgacagtggggtggacctgagtggggattctcaggtgtcatcaggtccctgcagccagcgaagttcccctgatggaggactcaagggggcagcagagggaccccccaagaggcctggaggctcctcacccctgaatgctgttccttgtgagggtccacctggctctgaacctcctaggagaccaccacctgccccccacgatggggacagaaaggagctgccccgggagcagcctctgccccctggccccattggcacagaacgatcacagcgtacagaccgaggcacagagcctggccccattcggccatcccatcgacctggtcccccagtccagtttggcactagtgacaaggactcagacttacgcctagtggtaggagacagcttgaaagcagagaaggagctaacagcatcagtcactgaggccattcctgtatcacgagactgggagctgcttcccagtgctgctgcctctgctgagccacaatccaagaacctggattctgggcactgtgtcccggagcccagctcctcaggccagcgcctgtatcctgaggttttctatggcagtgctgggccttccagttctcagatctctgggggagccatggactctcaattacatccaaacagtggaggcttccgccctgggacaccctcactgcacccttacagatcacagcccctatacctaccccccggcccagcccctccctcagcactgctctctgggttagctctcaagggccagtttctggatttctccacaatgcaagctacagagctggggaagttgccggctggaggagttctctaccctccaccttccttcctctactctccggctttctgccccagtcctttgcctgacacatcgttgcttcaggtacgccaggatctgccatccccttcggatttttattctactcctctgcagcctggtggccaaagtggctttctcccttcaggggctcctgcccagcagatgcttctacccatggtagactcacagctgcctgtggtgaactttggctccctgccgccagcaccacctcctgccccacctcccctttctctgttacctgtgggccctgctctgcagccccccagcctggctgtgcggcccccacctgctcctgctactcgggtgctgccttcacctgccaggcccttccccgctagcttggggcgagcagagctgcatccagtggaactaaagccgttccaggattatcaaaaactgagcagcaaccttgggggacctggatcatcacggactcccccaactggaaggtccttctctggcctcaattcccgtctcaaggccacgccttccacctacagtggagtcttccgcacccagcgcgtcgacctttaccagcaggcctccccaccagatgccctgcgctggatacctaagccttgggagcggacagggccgccacctcgagaagggccctcccgacgggcagaggagcctgggtcccgaggggacaaggagcctgggttgcccccaccccgctgagggagttcctcttgccccctacccccggggcttgtatatagattataaatatataagggggaaaggggtgggcggggaggggttctggggctggggcctcacttcccctcctcccccttcccctggtcccctgtccctggggctgtttgttaaaaaagagtaataaaaggatttaaaaaaaaaaacttctaaaaaaaa

SEQ ID NO: 1020 - skipped

SEQ ID NO: 1021 - DNA, 2897 bp, Homo sapiens
gcgagttgcggtagttgctgtgtaccatggtctcggaggtttctgtcccgcggcccgttaggtcctggtcgggttttcagcgaagcaggccgctcccctgcgtttcccagcgggcgtgctgtgccgcccaacaggctctgcctccaagtgccaaaaactcctagtaaagtttgcgcctcgcccgccgtccacaccccagcggccctgacgctgtcccctccgcgaccctcgcctctggaaaaagtgacaggcaaggccacgcccccgcgagggccggcctggagcccgcagcccccagggcctgggacggtgaggggcgtgaatgcggcggggggcggggccgttgccgggggagggggccggggcgcatgcgcgctgcgcagcggggctgaatgtttcccaagtgtttgaaactggtatttgggttttccacgttggacaagtgcggctcggcggccagcggagcgcgccccttcccgctgcccgctccgctcctctcttctacccagcccagtgggcgagtgggcagcggcggccgcggcgctgggccctctcccgccggtgtgtgcgcgctcgtacgcgcggcccccggcgccagccccgccgcctgagagggggcctgcgccgccggccggggcgtgcgcccgggagccaccgccaccgcggcccgcgccctcaggcgctggggtccccgcggacccggaggcggcggacgggctcggcagatgtagccgccgggccgaagcaggagccggcgggggggcgccgggagagcgagggctttgcattttgcagtgctattttttgaggggggcggggggtggaggaagcggaaagccgcgccgagtcgccggggacctccggggtgaaccatgttgagtcctgccaacggggagcagctccacctggtgaactatgtggaggactacctggactccatcgagtccctgcctttcgacttgcagagaaatgtctcgctgatgcgggagatcgacgcgaaataccaagagatcctgaaggagctagacgagtgctacgagcgcttcagtcgcgagacagacggggcgcagaagcggcggatgctgcactgtgtgcagcgcgcgctgatccgcagccaggagctgggcgacgagaagatccagatcgtgagccagatggtggagctggtggagaaccgcacgcggcaggtggacagccacgtggagctgttcgaggcgcagcaggagctgggcgacacagcgggcaacagcggcaaggctggcgcggacaggcccaaaggcgaggcggcagcgcaggctgacaagcccaacagcaagcgctcacggcggcagcgcaacaacgagaaccgtgagaacgcgtccagcaaccacgaccacgacgacggcgcctcgggcacacccaaggagaagaaggccaagacctccaagaagaagaagcgctccaaggccaaggcggagcgagaggcgtcccctgccgacctccccatcgaccccaacgaacccacgtactgtctgtgcaaccaggtctcctatggggagatgatcggctgcgacaacgacgagtgccccatcgagtggttccacttctcgtgcgtggggctcaatcataaacccaagggcaagtggtactgtcccaagtgccggggggagaacgagaagaccatggacaaagccctggagaaatccaaaaaagagagggcttacaacaggtagtttgtggacaggcgcctggtgtgaggaggacaaaataaaccgtgtatttattacattgctgcctttgttgaggtgcaaggagtgtaaaatgtatatttttaaagaatgttagaaaaggaaccattcctttcatagggatggcagtgattctgtttgccttttgttttcattggtacacgtgtaacaagaaagtggtctgtggatcagcattttagaaactacaaatataggtttgattcaacacttaagtctcagactgatttcttgcgggaggagggggactaaactcaacctaacacattaaatgtggaaggaaaatatttcatttagcttttttattttaatacaagtaatattattactttatgaacaattttttttaattggccatgtcgccaaaaatacagcctatagtaaatgtgtttcttgctgccatgatgtatatccatataacaattcagtaacaaaggtttaaagtttgaagattattttttaaaaaggtaaatggttaaattttacatgacagatattttatctattggcctgttccccaaatggccattttaaaatgcttgggtacacttctcttaagtggtctagtcaaggaacctcaagtcatgcttttgctatcaccaatcatagtgtacccatctttaatttatatcaggtgtataaatgtacatttccaaatgaacttgcacttgttatattataattggaagtgcagtcagcagatgctgttgtgaagctaatgtcacaattatgtgcaaaggtgtgcttcctgctgtatgtgagctgtaaaaatgttacgtgaagaaataaatgaaacttggccagtttgttcctctagtagtatatttaattttgacataagtaacttttaaaatttgtcttaaaaatttatacaccagcaatttagacaaagccttaagcaaattttgtattattgttctcacttattattaataatgaagtagaagttacttaattgccagcaaataaatacgtgtcaaaaaagaatctgtattcagaccctgggtcaggaaattactgcccacttgtcaagttcagcccaccatctgtttgaagattatatgaagtttaaattctagtgtccataaataaagtttcagcggaacacaaaaaaaaaaaaaaaaaaaaaaaaaaaaaaaaaaaaaaaaaaaa

SEQ ID NO: 1022 - DNA, 1794 bp, Homo sapiens
gggggtggggttacgtgtaggtgacgtggccgcttccagtctttggtcgggtttcggcggcttcagtgctcggggaggaggcagtgacggccggtgagattggaagtggcggcggcggcaggcggcagaggggagtccgaggttatgcgtctcaatgatcccgcggaaacgctacgggtctaagaacacggatcagggtgtctacctgggtctctcaaagacacaggtcctgtcccctgcaactgctggcagtagcagcagcgacatcgcccctctgccccccccagtgaccctcgtccctccccctcccgacaccatgtcctgccgggatcggacccaggagtttctgtctgcctgcaagtcgctgcagacccgtcagaatggaatccagacaaataagccagctttgcgtgctgtccgacaacgcagtgaattcaccctcatggccaagcgcattgggaaagaccttagcaacacatttgccaagctggagaagctgacaatcttggcaaagcgcaagtccctctttgatgataaagcagtggaaattgaagagctaacatatatcatcaaacaggacatcaatagcctcaacaaacaaattgctcagctccaggatttcgtgagagccaagggcagccagagtggccggcacctgcagacccactccaacaccattgtggtctccttgcagtcgaaactggcttctatgtccaatgacttcaaatcggttttagaagtgaggacagagaacctgaagcagcagaggagccggagagagcagttctcccgggcacctgtgtcagccctgccccttgcccctaaccacctgggcggtggtgctgtggttctgggggcagagtcccatgcctccaaggatgtcgccatcgacatgatggactctcggaccagccagcagctgcagctcattgacgagcaggattcctacatccagagtcgggcagacaccatgcagaacattgagtcgacaattgttgagttgggctccatctttcagcagttggcacacatggttaaggaacaggaggaaaccattcagaggatcgacgagaacgtgctaggagcccagctggacgttgaggccgcccattcagagatcctcaagtacttccagtctgtcacctccaaccggtggctcatggtcaaaatcttcctcatcctcattgtcttcttcatcatctttgtggtcttccttgcttgaaccctctctactctgaggcactctgttggggtttgggaccctcctgggaaggcaagtggccagtgctgccactgagcctgtgcagggtacttgggagaaaggccctgtttccctggaactgctaagaatgaccactgcccctgatcccccaccccttgcctctggccaccctgtcctccccccaccaccctcaggcctatgaaacacacagggttctagatttgaactctgctgtgaagtgactggaagggagcagaggccagctgggggccagtgggggaggttgtttccactaggagatttttataaaccctctccagcctctcccaaaggaagcgttggcagcaaagggagatgatgcccttacccaccttcctgtgagtgaagagaggaagcagccccagggaccaattttcccaattgacctctttcttcctctttcaccatgtgaggcagggagccctgagcccttcagctgcctgcacaacccctgacattggctgctggtgactcaatctgccaaatgtgctgcagctcgttttctcccaattacagcaagactgtcagcctca

SEQ ID NO: 1023 - DNA, 5021 bp, Homo sapiens
agcacgaaaggccacgcaggccgttctaaccctggcggccaagaggaggggtagcaggctctggaacctgcgggcggggacgaagacggcgcgcgacgatgtcgcaccgcggcgtgcgcggtgtcggcagtagctgcggcgcaggggcggagcgaaggctgcggcggcgtcgggtacgcgcacacgttgcatcttcttcctttcgcggggtcctccgtagttctggcacgagccaggcgtactgacaggtggaccagcggactggtggagatggcgacgctctctctgaccgtgaattcaggagaccctccgctaggagctttgctggcagtagaacacgtgaaagacgatgtcagcatttccgttgaagaagggaaagagaatattcttcatgtttctgaaaatgtgatattcacagatgtgaattctatacttcgctacttggctagagttgcaactacagctgggttatatggctctaatctgatggaacatactgagattgatcactggttggagttcagtgctacaaaattatcttcatgtgattcctttacttctacaattaatgaactcaatcattgcctgtctctgagaacatacttagttggaaactccttgagtttagcagatttatgtgtttgggccaccctaaaaggaaatgctgcctggcaagaacagttgaaacagaagaaagctccagttcatgtaaaacgttggtttggctttcttgaagcccagcaggccttccagtcagtaggtaccaagtgggatgtttcaacaaccaaagctcgagtggcacctgagaaaaagcaagatgttgggaaatttgttgagcttccaggtgcggagatgggaaaggttaccgtcagatttcctccagaggccagtggttacttacacattgggcatgcaaaagctgctcttctgaaccagcactaccaggttaactttaaagggaaactgatcatgagatttgatgacacaaatcctgaaaaagaaaaggaagattttgagaaggttatcttggaagatgttgcaatgttgcatatcaaaccagatcaatttacttatacttcggatcattttgaaactataatgaagtatgcagagaagctaattcaagaagggaaggcttatgtggatgatactcctgctgaacagatgaaagcagaacgtgagcagaggatagactctaaacatagaaaaaaccctattgagaagaatctacaaatgtgggaagaaatgaaaaaagggagccagtttggtcagtcctgttgtttgcgagcaaaaattgacatgagtagtaacaatggatgcatgagagatccaaccctttatcgctgcaaaattcaaccacatccaagaactggaaataaatacaatgtttatccaacatatgattttgcctgccccatagttgacagcatcgaaggtgttacacatgccctgagaacaacagaataccatgacagagatgagcagttttactggattattgaagctttaggcataagaaaaccatatatttgggaatatagtcggctaaatctcaacaacacagtgctatccaaaagaaaactcacatggtttgtcaatgaaggactagtagatggatgggatgacccaagatttcctacggttcgtggtgtactgagaagagggatgacagttgaaggactgaaacagtttattgctgctcagggctcctcacgttcagtcgtgaacatggagtgggacaaaatctgggcgtttaacaaaaaggttattgacccagtggctccacgatatgttgcattactgaagaaagaagtgatcccagtgaatgtacctgaagctcaggaggagatgaaagaagtagccaaacacccaaagaatcctgaggttggcttgaagcctgtgtggtatagtcccaaagttttcattgaaggtgctgatgcagagactttttcggagggtgagatggttacatttataaattggggcaacctcaacattacaaaaatacacaaaaatgcagatggaaaaatcatatctcttgatgcaaagttgaatttggaaaacaaagactacaagaaaaccactaaggtcacttggcttgcagagactacacatgctcttcctattccagtaatctgtgtcacttatgagcacttgatcacaaagccagtgctaggaaaagacgaggactttaagcagtatgtcaacaagaacagtaagcatgaagagctaatgctaggggatccctgccttaaggatttgaaaaaaggagatattatacaactccagagaagaggattcttcatatgtgatcaaccttatgaacctgttagcccatatagttgcaaggaagccccgtgtgttttgatatacattcctgatgggcacacaaaggaaatgccaacatcagggtcaaaggaaaagaccaaagtagaagccacaaaaaatgagacctctgctccttttaaggaaagaccaacaccttctctgaataataattgtactacatctgaggattccttggtcctttacaatagagtggctgttcaaggagatgtggttcgtgaattaaaagccaagaaagcaccaaaggaagatgtagatgcagctgtaaaacagcttttgtctttgaaagctgaatataaggagaaaactggccaggaatataaacctggaaaccctcctgctgaaataggacagaatatttcttctaattcctcagcaagtattctggaaagtaaatctctgtatgatgaagttgctgcacaaggggaggtggttcgtaagctaaaagctgaaaaatcccctaaggctaaaataaatgaagctgtagaatgcttactgtccctgaaggctcagtataaagaaaaaactgggaaggagtacatacctggtcagcccccattatctcaaagttcggattcaagcccaaccagaaattctgaacctgctggtttagaaacaccagaagcgaaagtactttttgacaaagtagcttctcaaggggaagtagttcggaaacttaaaactgaaaaagcccctaaggatcaagtagatatagctgttcaagaactccttcagctaaaggcacagtacaagtctttgataggagtagagtataagcctgtgtcggccactggagctgaggacaaagataagaagaagaaagaaaaagaaaataaatctgaaaagcagaataagcctcagaaacaaaatgatggccaaaggaaagacccttctaaaaaccaaggaggtgggctctcatcaagtggagcaggagaagggcaggggcctaagaaacagaccaggttgggtcttgaggcaaaaaaagaagaaaatcttgctgattggtattctcaggtcatcacaaagtcagaaatgattgaataccatgacataagtggctgttatattcttcgtccctgggcctatgccatttgggaagccatcaaggacttttttgatgctgagatcaagaaacttggtgttgaaaactgctacttccccatgtttgtgtctcaaagtgcattagagaaagagaagactcatgttgctgactttgccccagaggttgcttgggttacaagatctggcaaaaccgagctggcagaaccaattgccattcgtcctactagtgaaacagtaatgtatcctgcatatgcaaaatgggtacagtcacacagagacctgcccatcaagctcaatcagtggtgcaatgtggtgcgttgggaattcaagcatcctcagcctttcctacgtactcgtgaatttctttggcaggaagggcacagtgcttttgctaccatggaagaggcagcggaagaggtcttgcagatacttgacttatatgctcaggtatatgaagaactcctggcaattcctgttgttaaaggaagaaagacggaaaaggaaaaatttgcaggaggagactatacaactacaatagaagcatttatatctgctagtggaagagctatccagggaggaacatcacatcatttagggcagaatttttccaaaatgtttgaaatcgtttttgaagatccaaagataccaggagagaagcaatttgcctatcaaaactcctggggcctgacaactcgaactattggtgttatgaccatggttcatggggacaacatgggtttagtattaccaccccgtgtagcatgtgttcaggtggtgattattccttgtggcattaccaatgcactttctgaagaagacaaagaagcgctgattgcaaaatgcaatgattatcgaaggcgattactcagtgttaacatccgcgttagagctgatttacgagataattattctccaggttggaaattcaatcactgggagctcaagggagttcccattagacttgaagttgggccacgtgatatgaagagctgtcagtttgtagccgtcagacgagatactggagaaaagctgacagttgctgaaaatgaggcagagactaaacttcaagctattttggaagacatccaggtcacccttttcacaagggcttctgaagaccttaagactcatatggttgtggctaatacaatggaagactttcagaagatactagattctggaaagattgttcagattccattctgtggggaaattgactgtgaggactggatcaaaaagaccactgccagggatcaagatcttgaacctggtgctccatccatgggagctaaaagcctttgcatccccttcaaaccactctgtgaactgcagcctggagccaaatgtgtctgtggcaagaaccctgccaagtactacaccttatttggtcgcagctactgagggatgaacgaaagccccctcttcaactcctctcactttttaaagcattgatattagtatcttctcagatacagaccgttttatgattttttaaaaagtaaaagttctaaaatgaagtcacacaggacaattattcttatgcctaagttaacagtggataaaagacttttctgtaaacaactccagtaataaatatcatgaactaaaaaaaa

SEQ ID NO: 1024 - DNA, 2054 bp, Homo sapiens
gatgcaggctgggtgtggagggtgcgagtaggctggagtacaccagggagttcccagcaggccactaggagccacccaggatgcccggcaacctcatgagtcagacaagcagggctgtgtctatctggaagtttccagccaagctaggtaaaacacatggacacagggctctggaggccacgggcatgatgcttcgggtcctggtgggggctgtcctccctgccatgctactggctgccccaccacccatcaacaagctggcactgttcccagataagagtgcctggtgcgaagccaagaacatcacccagatcgtgggccacagcggctgtgaggccaagtccatccagaacagggcgtgcctaggacagtgcttcagctacagcgtccccaacaccttcccacagtccacagagtccctggttcactgtgactcctgcatgccagcccagtccatgtgggagattgtgacgctggagtgcccgggccacgaggaggtgcccagggtggacaagctggtggagaagatcctgcactgtagctgccaggcctgcggcaaggagcctagtcacgaggggctgagcgtctatgtgcagggcgaggacgggccgggatcccagcccggcacccaccctcacccccatccccacccccatcctggcgggcagacccctgagcccgaggacccccctggggccccccacacagaggaagagggggctgaggactgaggcccccccaactcttcctcccctctcatccccctgtggaatgttgggtctcactctctggggaagtcaggggagaagctgaagcccccctttggcactggatggacttggcttcagactcggacttgaatgctgcccggttgccatggagatctgaaggggcggggttagagccaagctgcacaatttaatatattcaagagtggggggaggaagcagaggtcttcagggctctttttttggggggggtggtctcttcctgtctggcttctagagatgtgcctgtgggagggggaggaagttggctgagccattgagtgctgggggaggccatccaagatggcatgaatcgggctaaggtccctgggggtgcagatggtactgctgaggtcccgggcttagtgtgagcatcttgccagcctcaggcttgagggagggctgggctagaaagaccactggcagaaacaggaggctccggcccacaggtttccccaaggcctctcaccccacttcccatctccagggaagcgtcgccccagtggcactgaagtggccctccctcagcggaggggtttgggagtcaggcctgggcaggaccctgctgactcgtggcgcgggagctgggagccaggctctccgggcctttctctggcttccttggcttgcctggtgggggaaggggaggaggggaagaaggaaagggaagagtcttccaaggccagaaggagggggacaaccccccaagaccatccctgaagacgagcatccccctcctctccctgttagaaatgttagtgccccgcactgtgccccaagttctaggccccccagaaagctgccagagccggccgccttctcccctctcccagggatgctctttgtaaatatcggatgggtgtgggagtgaggggttacctccctcgccccaaggttccagaggccctaggcgggatgggctcgctgaacctcgaggaactccaggacgaggaggacatgggacttgcgtggacagtcagggttcacttgggctctctctagctccccaattctgcctgcctcctccctcccagctgcactttaaccctagaaggtggggacctggggggagggacagggcaggcgggcccatgaagaaagcccctcgttgcccagcactgtctgcgtctgctcttctgtgcccagggtggctgccagcccactgcctcctgcctggggtggcctggccctcctggctgttgcgacgcgggcttctggagcttgtcaccattggacagtctccctgatggaccctcagtcttctcatgaataaattccttcaacgcc

SEQ ID NO: 1025 - DNA, 3680 bp, Homo sapiens
gtcattggaggagcttgaagttaaagactcctgctaaaaaccagtacgtttcattttgcagttactgggagggggcttgctgtggccctgtcaggaagagtagagctctggtccagctccgcgcagggagggaggctgtcaccatgccggcctgctgcagctgcagtgatgttttccagtatgagacgaacaaagtcactcggatccagagcatgaattatggcaccattaagtggttcttccacgtgatcatcttttcctacgtttgctttgctctggtgagtgacaagctgtaccagcggaaagagcctgtcatcagttctgtgcacaccaaggtgaaggggatagcagaggtgaaagaggagatcgtggagaatggagtgaagaagttggtgcacagtgtctttgacaccgcagactacaccttccctttgcaggggaactctttcttcgtgatgacaaactttctcaaaacagaaggccaagagcagcggttgtgtcccgagtatcccacccgcaggacgctctgttcctctgaccgaggttgtaaaaagggatggatggacccgcagagcaaaggaattcagaccggaaggtgtgtagtgtatgaagggaaccagaagacctgtgaagtctctgcctggtgccccatcgaggcagtggaagaggccccccggcctgctctcttgaacagtgccgaaaacttcactgtgctcatcaagaacaatatcgacttccccggccacaactacaccacgagaaacatcctgccaggtttaaacatcacttgtaccttccacaagactcagaatccacagtgtcccattttccgactaggagacatcttccgagaaacaggcgataatttttcagatgtggcaattcagggcggaataatgggcattgagatctactgggactgcaacctagaccgttggttccatcactgccgtcccaaatacagtttccgtcgccttgacgacaagaccaccaacgtgtccttgtaccctggctacaacttcagatacgccaagtactacaaggaaaacaatgttgagaaacggactctgataaaagtcttcgggatccgttttgacatcctggtttttggcaccggaggaaaatttgacattatccagctggttgtgtacatcggctcaaccctctcctacttcggtctggccgctgtgttcatcgacttcctcatcgacacttactccagtaactgctgtcgctcccatatttatccctggtgcaagtgctgtcagccctgtgtggtcaacgaatactactacaggaagaagtgcgagtccattgtggagccaaagccgacattaaagtatgtgtcctttgtggatgaatcccacattaggatggtgaaccagcagctactagggagaagtctgcaagatgtcaagggccaagaagtcccaagacctgcgatggacttcacagatttgtccaggctgcccctggccctccatgacacacccccgattcctggacaaccagaggagatacagctgcttagaaaggaggcgactcctagatccagggatagccccgtctggtgccagtgtggaagctgcctcccatctcaactccctgagagccacaggtgcctggaggagctgtgctgccggaaaaagccgggggcctgcatcaccacctcagagctgttcaggaagctggtcctgtccagacacgtcctgcagttcctcctgctctaccaggagcccttgctggcgctggatgtggattccaccaacagccggctgcggcactgtgcctacaggtgctacgccacctggcgcttcggctcccaggacatggctgactttgccatcctgcccagctgctgccgctggaggatccggaaagagtttccgaagagtgaagggcagtacagtggcttcaagagtccttactgaagccaggcaccgtggctcacgtctgtaatcccagcgctttgggaggccgaggcaggcagatcacctgaggtcgggagttggagacccgcctggctaacaaggcgaaatcctgtctgtactaaaaatacaaaaatcagccagacatggtggcatgcacctgcaatcccagctactcgggaggctgaggcacaagaatcacttgaacccgggaggcagaggttgtagtgagcccagattgtgccactgctctccagcctgggaggcacagcaaactgtcccccaaaaaaaaaaaagagtccttaccaatagcaggggctgcagtagccatgttaacatgacatttaccagcaacttgaacttcacctgcaaagctctgtggccacattttcagccaaagggaaatatgctttcatcttctgttgctctctgtgtctgagagcaaagtgacctggttaaacaaaccagaatccctctacatggactcagagaaaagagattgagatgtaagtctcaactctgtccccaggaagttgtgtgaccctaggcctctcacctctgtgcctctgtctccttgttgcccaactactatctcagagatattgtgaggacaaattgagacagtgcacatgaactgtcttttaatgtgtaaagatctacatgaatgcaaaacatttcattatgaggtcagactaggataatgtccaactaaaaacaaacccttttcatcctggctggagaatgtggagaactaaaggtggccacaaattctttgacactcaagtcccccaagacctaagggttttatctcctccccttgaatatgggtggctctgattgctttatccaaaagtggaagtgacattgtgtcagtttcagatcctgatcttaagaggctgacagcttctacttgctgtcccttggaactcttgctatcggggaagccagacgccatttaaaagtctgcctatcctggccaggtgtggtggctcacacctgtaatcccagcactttgggagaccaaggcgggcggatcacttaaagtcaggagtccaagaccagactcgccaacatggtgaaaccgtatctctaataaaaatacaaaaattagctgggcatggtgcgggcacctgtagtcctagctatcaagaggctgagacaggagaaacacttgaacctgggaggtggaggttgcattgagctgagatcgtgccactgcactccaggctgggtgacagagcgagactccatctcaaaaaaaaaaaaaagaaaaaaaaaatgtctgcctatcctgagactgccctgctgtgaggaagcccaagcagtcacgtggacagtgcctgaccagccccagctttcaagccatccaagcccagtcaccaaacatgagagagaagaagccttcaggtgattctggactccactaacatatgactgataccgcatgatacatcccaagtgagaactgccccataaatccagaaaaccacattgctatcttaagtccctaagtttggggcttatttgttccacagcaacaggtaactggaacagagggcaagcctgatgaatgggcacacagactcagcccataccttccctggttctaatgttctcagggagcccggaccaaccctgggagcctcaggaacttaggtttccactggacagttctagaagggctatagaccaaatcaggtaactcaccagaccagccttggaatctatcaaatctaactgctgagctaccca

SEQ ID NO: 1026 - DNA, 2783 bp, Homo sapiens
gattgcgagccaggaggaggaagccggcggtggccccgtcagcagccggctgctgagaggccggtaggcggcggcggtcccgaggggcggcggccgcgctgctccctgagaacgggtcccgcagctgggcaggcgggcggcctgagggcgcggagccatgaagctgtacagcctcagcgtcctctacaaaggcgaggccaaggtggtgctgctcaaagccgcatacgatgtgtcttccttcagctttttccagagatccagcgttcaggaattcatgaccttcacgagtcaactgattgtggagcgctcatcgaaaggcactagagcttctgtcaaagaacaagactatctgtgccacgtctacgtccggaatgatagtcttgcaggtgtggtcattgctgacaatgaatacccatcccgggtggcctttaccttgctggagaaggtactagatgaattctccaagcaagtcgacaggatagactggccagtaggatcccctgctacaatccattacccagccctggatggtcacctcagtagataccagaacccacgagaagctgatcccatgactaaagtgcaggccgaactagatgagaccaaaatcattctgcacaacaccatggagtctctgttagagcgaggtgagaagctagatgacttggtgtccaaatccgaggtgctgggaacacagtctaaagccttctataaaactgcccggaaacaaaactcatgctgtgccatcatgtgatgcagcctgccagaggcccaatgctggaatggcaccatcattcacatcagaactgcagcccctggaaaagaagagacagccatagacgaggagccagagtgggggcagactggccatttttattttgaagttcctgcgagaaatggatggtggaagggtggcgaatgttcaaattcatatgtgtggtagtgattcttggaaagaatttgaggtccccaaaggtgtatttttgggcaaatgaaaccataaactccgactggcttctgtagatgccaaagggctctttttcagctaaccctgggaaggctctgtgggagggaggtcggagccagctgtttctcgatctttggtatatctttggatcttatttgtacattaatgatattaacactccagtggggggtggggagtccctgatgctagggctggggtgggtggagtttgaagactcttgggaaagcctctcctggggccactgttgggggtgggagtgagcccaccacagaggccacaggcaggcccccacttcaggcccaaggcctggggcggggggaacagtcactgggtctcagattctgagactgttgtttagcttacctttctgctaggattggcttcccgcagagggcagggcccatcctaagcagcttccaagtcccacaaaggtggcttgtgggaggatttggaaggagctgcattgtgggcggggagtgtgtgggttgggttcgtaccagcaagtagactaggaactgagcccaggaaagggggatgttttcctggtgtttggatggtcagctgggagtgtccatcatcaggggaagatcaaacacaggtgcactcagctgcccagggcctctgggacacttgccttgacttgcaacttgccttgaacatcacgatcaaagcagcaggtgctgtggtctctcaaaattgatttttatttgactctgtggctctaagactgccttgaaccgcctgaggcctatgcatctgaacaagtgggtctctcccttgagcaccaggagtgggtgccagccggccccgaggattcccagcaccccacctatggtcttgccagcataggcttgctagttccttcttggtcagaggtagctgcagaggggggaggccaagggtttggtctaagctgtgccctgccacctggcaggaggcccactcactgcccaagtcatggcaacaggctggagcagcccaggagatgggcctaaaatgttctggatcccttgggtcctagtgttatgttccagtctgcccacctgtgctcaggatgcagccctgggatccagcacccatggaagcttctgctgggatggtgtcacctatgggttttgaaccagtgtggtatggtccttgggagctctgctctgagcttgccacactgctgagagcacccactgtcctgaccagagtctcagtggtcctgacccccaatgtgggcaggggctgggcaggagggtggggtctgctgtgggttcagaggactccacctcctggctggtttacctgctgctgcccattttctctgggtactgctggccagaggactttagcctacccctgaagagcctgtccatgtcattttcctactgccatagataccctaagcccagggccccttgaggcccagactcagcctgcccactggtgccggagacggagtggagtgggcctggatccgagggatgctacctctccctttcccacttgaggaccctggggagagatgggggcggggaaaatggaggtatgaatttggggtaagaggaagtgagatctccgcttgcaggtcagcccctgccttgcagggcgggctggcttgactcaggccctgtgagatagagggcccagcccagccccacccacagatcccctgctcctgttgtgttctgttgtaaatcatttggcgagactgtattttagtaactgctgcctaacttccctgtgttctatttgagaggcgcctgtctggataaagttgtcttgaaatttcaaaaaaaaaaaaaaaaaa

SEQ ID NO: 1027 - DNA, 2986 bp, Homo sapiens
gaaagtcttggtttggccttgggttccgctgtaggggaggtcccgtgcgaaagaatgaggagatcctggggccttacctactagcggaatcgactgaagagacgcctgccagtgcgggaggtaggaagctcgatccccaaagaaaagagcgagtgggcaggcagctgcgagacagaaccggagtgtgcagggtccctagaggccggttcctggtctgtgctgctctcctggaagccatggtacaggcagagctcagggcgatccccaggtgagggcagcggctctgcctgggattccaccgcagtacaaccgggtagatgcggggtggagaagaaaggatgttgcctgcactgctcgccaatagcaccctgagaggctacatttgcagaagcagcagcagcagaagacacagcgccggtccaggaggcggctcgagctgttcgtaaagtcgcccgacagctttttctccgtagtatgcgagttgacaaaacagccagagaacagggctccccattacaatcttttcgagatcttttcccttgctaaccggatctgatttgtgcgaaaacatgccttgcacttgtacctggaggaactggagacagtggattcgacctttagtagcggtcatctacctggtgtcaatagtggttgcggttcccctatgcgtgtgggaattacagaaactggaggttggaatacacaccaaggcttggtttattgctggaatctttttgctgttgactattcctatatcactgtgggtgatattgcaacacttagtgcattatacacaacctgaactacaaaaaccaataataaggattctttggatggtacctatttacagtttagatagttggatagctttgaaatatcccggaattgcaatatatgtggatacctgcagagaatgctatgaagcttatgtaatttacaactttatgggattccttaccaattatctaactaaccggtatccaaatctggtattaatccttgaagccaaagatcaacagaaacatttccctcctttatgttgctgtccaccatgggctatgggagaagtattgctgtttaggtgcaaactaggtgtattacagtacacagttgtcagacctttcaccaccatcgttgctttaatctgtgagctgcttggtatatatgacgaagggaactttagcttttcaaatgcttggacttatttggttataataaacaacatgtcacagttgtttgccatgtattgtctcctgctcttttataaagtactaaaagaagaactgagcccaatccaacctgttggcaaatttctttgtgtaaagctggtggtttttgtttctttttggcaagcagtagttattgctttgttggtaaaagttggcgttatttctgaaaagcatacgtgggaatggcaaactgtagaagctgtggccaccggactccaggattttattatctgtattgagatgttcctcgctgccattgctcatcattacacattctcatataaaccatatgtccaagaagcagaagagggctcatgctttgattcctttcttgccatgtgggatgtctcagatattagagatgatatttctgaacaagtaaggcatgttggacggacagtcaggggacatcccaggaaaaaattgtttcccgaggatcaagatcaaaatgaacatacaagtttattatcatcatcatcacaagatgcaatttccattgcttcttctatgccaccttcacccatgggtcactaccaagggtttggacacactgtgactccccagactacacctaccacagctaagatatctgatgaaatccttagtgatactataggagagaaaaaagaaccttcagataaatccgtggattcctgaacagtatggaaaagcaaactgtgcaactactacattatatcattacctggtatcccatggattttgtgcttgggacagaccataaatgatggaaaatgtcaacacaaaaatagctgaaagccaggtacaactactgcatttatatatgtaagttttgtatatcaaaaataattggtctaaatttcctagacttagacttgatttcttaacattagggtatcgcatactcaaatggtagacaatgaccccaactaaatcttcctgatgttacactgctttatcaagaggatggacttttttttttttgagacagacagagtcttgctctgtcacccaggctggagtgcagtggcgcaatctcgggtcactgcaagctctgcctcccaagttcatgccattctcctgcctcagcctcccaagtagctgggactacaggcacctgccaccatgcccagctaattttttttttttcagtagagacagggtctcaccatgttagccaggatggtcttgatctgacctcgtgatccgccgacctcggcctcccaaagtgctggaattacaggcgtgagccactgcgcctggccaagaatggacattttttaaaaaaacatcagtacttcctaccactgctgcatgagtataatgctccggaattatcagaaagcataatgcagaaatacgaattagtggaacttaatcatgtgccatataagcttacctaacaaacagttatatccctattcctcaactgaatgtctttcaataaataagaatttatcatttattttctgcaacttttttatgtctcattctttaaacattaaaaacccttaatattttaacaaaaatttcttgattagaggcacagtgaaaaagaagtcaaaaaaaaaagttctacttttcatcagtgctattaaaggtggcagcaaatgtaaatcttggctgaatggtcttaattactcattaaaccacagtcagaaagacatataggtgctatttgggaaaactttttattacctaggatggggtttctctaattgctaatcacaaccccactgggtcatgtttgacattttataatgaaaaaaaaaaaaaaa

SEQ ID NO: 1028 - DNA, 6067 bp, Homo sapiens
aaagggggggaacctagagtcggtgggggggaagcgatgtttgcccgtcagtcgagtccggagtgaggagctcggtcgccgaagcggagggagactcttgagcttcatcttgccgccgccacggccaccgcctggacctttgcccggagggagctgcagagggtccatcgccgccgtcctctggagggcagcgcgattgggggcccggacctccagtccgggggggatttttcgtcgtccccctccccccaaccagggagcccgagcggccgccaaacaaaggtaccagtcgccgccgcgggaggaggaggagccggagcctctgcctcagcagccgctggacccgccgcccttcttccccatctctcccccgggcctgctggttttgggggggagaaggagagaggggactctggacgtgccagggtcagatctcgcctccgaggaaggtgcagctgaacctggtgttttagaggataccttggtcccagagtcatcatgaaggcccttgatgagcctccctatttgacagtgggcactgatgtgagtgctaaatacagaggagccttttgtgaagccaagatcaagacagcaaaaagacttgtcaaagtcaaggtgacatttagacatgattcttcaacagtggaagttcaggatgaccacataaagggcccactaaaggtaggagctattgtggaagtgaagaatcttgatggtgcatatcaggaagctgttatcaataaactaacagatgcgagttggtacactgtagtttttgatgacggagatgagaagacactgagacgatcttcactgtgcctgaaaggagagaggcattttgctgaaagtgaaacattagaccagctcccactcaccaaccctgagcattttggcactccagtcataggaaagaaaacaaatagaggaagaagatctaatcatataccagaggaagagtcttcatcatcctccagtgatgaagatgaggatgataggaaacagattgatgagctactaggcaaagttgtatgtgtagattacattagtttggataaaaagaaagcactgtggtttcctgcattggtggtttgtcctgattgtagtgatgagattgctgtaaaaaaggacaatattcttgttcgatctttcaaagatggaaaatttacttcagttccaagaaaagatgtccatgaaattactagtgacactgcaccaaagcctgatgctgttttaaagcaagcctttgaacaggcacttgaatttcacaaaagtagaactattcctgctaactggaagactgaattgaaagaagatagctctagcagtgaagcagaggaagaagaggaggaggaagatgatgaaaaagaaaaggaggataatagcagtgaagaagaagaagaaatagaaccatttccagaagaaagggagaactttcttcagcaattgtacaaatttatggaagatagaggtacacctattaacaaacgacctgtacttggatatcgaaatttgaatctctttaagttattcagacttgtacacaaacttggaggatttgataatattgaaagtggagctgtttggaaacaagtctaccaagatcttggaatccctgtcttaaattcagctgcaggatacaatgttaaatgtgcttataaaaaatacttatatggttttgaggagtactgtagatcagccaacattgaatttcagatggcattgccagagaaagttgttaacaagcaatgtaaggagtgtgaaaatgtaaaagaaataaaagttaaggaggaaaatgaaacagagatcaaagaaataaagatggaggaggagaggaatataataccaagagaagaaaagcctattgaggatgaaattgaaagaaaagaaaatattaagccctctctgggaagtaaaaagaatttattagaatctatacctacacattctgatcaggaaaaagaagttaacattaaaaaaccagaagacaatgaaaatctggatgacaaagatgatgacacaactagggtagatgaatccctcaacataaaggtagaagctgaggaagaaaaagcaaaatctggagatgaaacgaataaagaagaagatgaagatgatgaagaagcagaagaggaggaggaggaggaagaagaagaagaggatgaagatgatgatgacaacaatgaggaagaggagtttgagtgctatccaccaggcatgaaagtccaagtgcggtatggacgagggaaaaatcaaaaaatgtatgaagctagtattaaagattctgatgtcgaaggtggagaggtcctttacttggtgcattactgcggatggaatgtgagatacgatgaatggattaaagcagataaaatagtaagacctgctgataaaaatgtgccaaagataaaacatcggaagaaaataaagaataaattagacaaagaaaaagacaaagatgaaaaatactctccaaaaaactgtaaacttcggcgcttgtccaaaccaccatttcagacaaatccatctcctgaaatggtatccaaactggatctcactgatgccaaaaactctgatactgctcatattaagtccatagaaattacttcgatccttaatggacttcaagcttctgaaagttctgctgaagacagtgagcaggaagatgagagaggtgctcaagacatggataataatggcaaagaggaatctaagattgatcatttgaccaacaacagaaatgatcttatttcaaaggaggaacagaacagttcatctttgctagaagaaaacaaagttcatgcagatttggtaatatccaaaccagtgtcaaaatctccagaaagattaaggaaagatatagaagtattatccgaagatactgattatgaagaagatgaagtcacaaaaaagagaaaggatgtcaagaaggacacaacagataaatcttcaaaaccacaaataaaacgtggtaaaagaaggtattgcaatacagaagagtgtctaaaaactggatcacctggcaaaaaggaagagaaggccaagaacaaagaatcactttgcatggaaaacagtagcaacagctcttcagatgaagatgaagaagaaacaaaagcaaagatgacaccaactaagaaatacaatggtttggaggaaaaaagaaaatctctacggacaactggtttctattcaggattttcagaagtggcagaaaaaaggattaaacttttaaataactctgatgaaagacttcaaaacagcagggccaaagatcgaaaagatgtctggtcaagtattcagggacagtggcctaaaaaaacgctgaaagagcttttttcagactctgatactgaggctgcagcttccccaccgcatcctgccccagaggagggggtggcagaggagtcactgcagactgtggctgaagaggagagttgttcacccagtgtagaactagaaaaaccacctccagtcaatgtcgatagtaaacccattgaagaaaaaacagtagaggtcaatgacagaaaagcagaatttccaagtagtggcagtaattcagtgctaaatacccctcctactacacctgaatcgccttcatcagtcactgtaacagaaggcagccggcagcagtcttctgtaacagtatcagaaccactggctccaaaccaagaagaggttcgaagtatcaagagtgaaactgatagcacaattgaggtggatagtgttgctggggagctccaagacctccagtctgaagggaatagctcgccagcaggttttgatgccagtgtgagctcaagcagtagtaatcagccagaaccagaacatcctgaaaaagcctgtacaggtcagaaaagagtgaaagatgctcagggaggaggaagttcatcaaaaaagcagaaaagaagccataaagcaacagtggtaaacaacaaaaagaagggaaaaggcacaaatagtagtgatagtgaagaactttcagctggtgaaagtataactaagagtcagccagtcaaatcagtttccactggaatgaagtctcatagtaccaaatctcccgcaaggacgcagtctccaggaaaatgtggaaagaatggtgataaggatcctgatctcaaggaacccagtaatcgattacccaaagtttacaaatggagttttcagatgtcggacctggaaaatatgacaagtgccgaacgcatcacaattcttcaagaaaaacttcaagaaatcagaaaacattatctgtcattaaaatctgaagtagcttccattgatcggaggagaaagcgtttaaagaagaaagagagagaaagtgctgctacatcctcatcctcctcttcaccttcatccagttccataacagctgctgttatgttaactttagctgaaccgtcaatgtccagcgcatcacaaaatggaatgtcagttgagtgcaggtgacagcaggacttgctaaagcactttgcacttaatggctgttgagggccactttttttttatactgcacagtggcacaaaaaaatatcagacaagcactattttatatttaaaaattgtttcttgacaagctgacttggcacttaagtgcacttttttatgaagaaaaagtacaatgaactgcttttcctcaagcaataattgtttccaacttgtctgggaattgtgtgtctggtaactggaaggccttccactgtggcaaatggaggcttttcactgcctgtagagacaatacagtaagcatagttaaggggtgggtcagaacatgttaagataacttactgtatatgtattcccttgtattttgttaaagctggaacatttgatatttttccatttatttatgaaaaaatatgaacctattttcatttgtacaaggtaattgttttttaaagcaagtcaccttagggtggctttaattgtataagtcaagcacatgtaataaattcaaaacctgcagttaacaggatattagacatcaatcctggtaaccaaatattaaagattctctttaaaaaagactgaacatgtttacaggtttgaattaggctaaaaggtcttgcagtggcttttcatggcccttcaaattggaatggaactactgtactttgccatttttctataaatcagtatttttttttaattttgatatacattgtgtgaaaaaagaaaatggctaataaactgtattaaatcttaaacaatgtataaagattgtacttagccagttcaaagtgtatatttattcataatgaattataacagttatatttttgtgttttcttgtaaatgtttcttttcccttaaatacagataattcatttgtattgcttattttattatgagctacaacaaaaggacttcaggaacaagtaatgtattagtatggttcaagattgttgataggaactgtctcaaaaggatggtggttattttaaatataaatagctaatgggggtggtaggcctataaaattaaatgccttgtataaaatccaaaatgaatgcaaaattgttttcacttgtattgactttatgttgtatgattccaatctctgttctgtttggcacttgtatttaattcttcacctttgtaagacatttgtatattgtggatgtgttcattcaagctatttaatatctggcactgttaatacacagtactttattgtacagactgttttactgttttaattgtagttctgtgtactttttttggatggggctggcatgttttctttgtttcctggcaatacgacgtgggaatttcaatgcgttttgttgtagatgctaacgtgtcagaatcctttacattcaacttttctaagaaaagcattttcagtcttgtagtgtgtgcttacagtaactaattttgttgaaaatggtttcaagttattcaaatttgtacaggactgtaaagatttgttgacagcaaaatgttgaagaaaaaagcttatagaataaaagctataaagtatatattaggatctgcaaacaatgaagaattatgtaatatattgtacaaatgtaagcaaaggctctgaaataaaatgccatagtttgtgaatccttga

SEQ ID NO: 1029 - DNA, 2210 bp, Homo sapiens
agcaatcctttctttcagctggagtgctcctcaggagccagccccacccttagaaaagatgttttccatgaggatcgtctgcctggtcctaagtgtggtgggcacagcatggactgcagatagtggtgaaggtgactttctagctgaaggaggaggcgtgcgtggcccaagggttgtggaaagacatcaatctgcctgcaaagattcagactggcccttctgctctgatgaagactggaactacaaatgcccttctggctgcaggatgaaagggttgattgatgaagtcaatcaagattttacaaacagaataaataagctcaaaaattcactatttgaatatcagaagaacaataaggattctcattcgttgaccactaatataatggaaattttgagaggcgatttttcctcagccaataaccgtgataatacctacaaccgagtgtcagaggatctgagaagcagaattgaagtcctgaagcgcaaagtcatagaaaaagtacagcatatccagcttctgcagaaaaatgttagagctcagttggttgatatgaaacgactggaggtggacattgatattaagatccgatcttgtcgagggtcatgcagtagggctttagctcgtgaagtagatctgaaggactatgaagatcagcagaagcaacttgaacaggtcattgccaaagacttacttccctctagagataggcaacacttaccactgataaaaatgaaaccagttccagacttggttcccggaaattttaagagccagcttcagaaggtacccccagagtggaaggcattaacagacatgccgcagatgagaatggagttagagagacctggtggaaatgagattactcgaggaggctccacctcttatggaaccggatcagagacggaaagccccaggaaccctagcagtgctggaagctggaactctgggagctctggacctggaagtactggaaaccgaaaccctgggagctctgggactggagggactgcaacctggaaacctgggagctctggacctggaagtactggaagctggaactctgggagctctggaactggaagtactggaaaccaaaaccctgggagccctagacctggtagtaccggaacctggaatcctggcagctctgaacgcggaagtgctgggcactggacctctgagagctctgtatctggtagtactggacaatggcactctgaatctggaagttttaggccagatagcccaggctctgggaacgcgaggcctaacaacccagactggggcacatttgaagaggtgtcaggaaatgtaagtccagggacaaggagagagtaccacacagaaaaactggtcacttctaaaggagataaagagctcaggactggtaaagagaaggtcacctctggtagcacaaccaccacgcgtcgttcatgctctaaaaccgttactaagactgttattggtcctgatggtcacaaagaagttaccaaagaagtggtgacctccgaagatggttctgactgtcccgaggcaatggatttaggcacattgtctggcataggtactctggatgggttccgccataggcaccctgatgaagctgccttcttcgacactgcctcaactggaaaaacattcccaggtttcttctcacctatgttaggagagtttgtcagtgagactgagtctaggggctcagaatctggcatcttcacaaatacaaaggaatccagttctcatcaccctgggatagctgaattcccttcccgtggtaaatcttcaagttacagcaaacaatttactagtagcacgagttacaacagaggagactccacatttgaaagcaagagctataaaatggcagatgaggccggaagtgaagccgatcatgaaggaacacatagcaccaagagaggccatgctaaatctcgccctgtcagaggtatccacacttctcctttggggaagccttccctgtccccctagactaagttaaatatttctgcacagtgttcccatggccccttgcatttccttcttaactctctgttacacgtcattgaaactacacttttttggtctgtttttgtgctagactgtaagttccttgggggcagggcctttgtctgtctcatctctgtattcccaaatgcctaacagtacagagccatgactcaataaatacatgttaaatggatgaatg

SEQ ID NO: 1030 - DNA, 1919 bp, Homo sapiens
cgagaagcagcggcccggggcgactgagcggacaaacggaagtgtaggttacggtctgagacatcaccgccaagctgggcatcggggagatggccgagactgaccccaagaccgtgcaggacctcacctcggtggtgcagacactcctgcagcagatgcaagataaatttcagaccatgtctgaccagatcattgggagaattgatgatatgagtagtcgcattgatgatctggaaaagaatatcgcggacctcatgacacaggctggggtggaagaactggaaagtgaaaacaagatacctgccacgcaaaagagttgaaggttgctaataatttatactggaatctggcatttttccaagccaagagaagatcgaatggctttttgcagctaactactatgtgtagacaggttttatattataaagtatgcattcttatcacctagtatatagttagtttgtagagtgatttccccccagtttcttgaacatggtatcttcacatcttggaccttggtcagttgtgctattcattattaaacactaaaactttggcggttcttgcataacattgtcagattttttagtgtatttctgtgaagtcattttttttcttgtcattccttttgtagtagttgctgtttggataaaagttgatgtgtgattttttattaaacaaatagtaaacccttcaattatagttagtcttggtgaagtaagatgtttgtagactttagagttctttaattcttggcacaacgtgactgttgagctaacaccaaatagtgtgttggcaatacttttcaaatggctgaaaacacctaaaaattgttcattcagaaatatctgtcactgctctgttgccaaaactcagaatagaacttagacgtatgtctgagtccctgagatcacatgctaaagtcgatgaaaagtaaccactgccactgtcttgtgtcagaacttttacagtacagaaaataacagaatagccttctgtaatgaggcgtttgttagagttttgcatgagattctaatacttcagtaggaccctacctacgtggttcatctacaatggttaccataaaaaatctggcaggattttaaaactcaatcagtctttcctttgagctagtgacttgaaaagaaagagagaaggaaaagagaccatattaagtccatgccagttgcttggctagaatatgatcaacgacttgtagtagactcaagtttttaaaaaacactattttacttaaactgtttcttatctaaattcttgcagagtgtcaatgttatcattgattatagaagacagggataatacctttatctctggccactcaaaaatgcagtgccaggagtgctaaacctagaggccaatactgatgacctggaaggtgatccatatgattgtcaccacaaagtgcttttacacaaaaacttgaaaatttgaaaaacatgatttttttaagtttctcatctcaccagtcttggtgtttatattgcaaatctatcaaagtaagaaataatttgtgctgtatacaaattacatggggaacataaaggagtgagatccttctgtgataaaatgaattcaccactctggttacccaactacagaacctcctttgatcaggccagtaggttgtgatgcaggctggagcccccgaatgccccacacacactgcagcattgaccagaccatccgaaacctgcgtccctggtgatgttctcaagcctcggaagtggcaaatggaaatgatatggccggttgcggttgtaggagagttgtgacttaggcaggagtcgacctcctcaagtaatggaacgatttcaaaggcaggctgccctgaccaaaaatatctgccatgaataaaggtgcctgaaatcctaaaaaaaaaaaagaaaaaaaaaaaaaaa

SEQ ID NO: 1031 - DNA, 2333 bp, Homo sapiens
cgcgcccctccctcctcgcggacctggcggtgccggcgcccggagtggccctttaaaaggcagcttattgtccggagggggcgggcggggggcgccgaccgcggcctgaggcccggcccctcccctctccctccctctgtccccgcgtcgctcgctggctagctcgctggctcgctcgcccgtccggcgcacgctccgcctccgtcagttggctccgctgtcgggtgcgcggcgtggagcggcagccggtctggacgcgcggccggggctgggggctgggagcgcggcgcgcaagatctccccgcgcgagagcggcccctgccaccgggcgaggcctgcgccgcgatggcagagatgggcagtaaaggggtgacggcgggaaagatcgccagcaacgtgcagaagaagctcacccgcgcgcaggagaaggttctccagaagctggggaaggcagatgagaccaaggatgagcagtttgagcagtgcgtccagaatttcaacaagcagctgacggagggcacccggctgcagaaggatctccggacctacctggcctccgtcaaagccatgcacgaggcttccaagaagctgaatgagtgtctgcaggaggtgtatgagcccgattggcccggcagggatgaggcaaacaagatcgcagagaacaacgacctgctgtggatggattaccaccagaagctggtggaccaggcgctgctgaccatggacacgtacctgggccagttccccgacatcaagtcacgcattgccaagcgggggcgcaagctggtggactacgacagtgcccggcaccactacgagtcccttcaaactgccaaaaagaaggatgaagccaaaattgccaaggccgaggaggagctcatcaaagcccagaaggtgtttgaggagatgaatgtggatctgcaggaggagctgccgtccctgtggaacagccgcgtaggtttctacgtcaacacgttccagagcatcgcgggcctggaggaaaacttccacaaggagatgagcaagctcaaccagaacctcaatgatgtgctggtcggcctggagaagcaacacgggagcaacaccttcacggtcaaggcccagcccagaaagaaaagtaaactgttttcgcggctgcgcagaaagaagaacagtgacaacgcgcctgcaaaagggaacaagagcccttcgcctccagatggctcccctgccgccacccccgagatcagagtcaaccacgagccagagccggccggcggggccacgcccggggccaccctccccaagtccccatctcagctccggaaaggcccaccagtccctccgcctcccaaacacaccccgtccaaggaagtcaagcaggagcagatcctcagcctgtttgaggacacgtttgtccctgagatcagcgtgaccaccccctcccagccagcagaggcctcggaggtggcgggtgggacccaacctgcggctggagcccaggagccaggggagacggcggcaagtgaagcagcctccagctctcttcctgctgtcgtggtggagaccttcccagcaactgtgaatggcaccgtggagggcggcagtggggccgggcgcttggacctgcccccaggtttcatgttcaaggtacaggcccagcacgactacacggccactgacacagacgagctgcagctcaaggctggtgatgtggtgctggtgatccccttccagaaccctgaagagcaggatgaaggctggctcatgggcgtgaaggagagcgactggaaccagcacaaggagctggagaagtgccgtggcgtcttccccgagaacttcactgagagggtcccatgacggcggggcccaggcagcctccgggcgtgtgaagaacacctcctcccgaaaaatgtgtggttcttttttttgttttgttttcgtttttcatcttttgaagagcaaagggaaatcaagaggagacccccaggcagaggggcgttctcccaaagattaggtcgttttccaaagagccgcgtcccggcaagtccggcggaattcaccagtgttcctgaagctgctgtgtcctctagttgagtttctggcgcccctgcctgtgcccgcatgtgtgcctggccgcagggcggggctgggggctgccgagccaccatgcttgcctgaagcttcggccgcgccacccgggcaagggtcctcttttcctggcagctgctgtgggtggggcccagacaccagcctagcctggctctgccccgcagacggtctgtgtgctgtttgaaaataaatcttagtgttcaaaacaaaatgaaacaaaaaaaaaatgataaaaactctca

SEQ ID NO: 1032 - DNA, 2928 bp, Homo sapiens
gtagacgtcctaccccgtgatattaaagcaagatggccgcgccctgcagattgtctcttgttgcgtaagtttttttgaccgtcactcgtgtcagcttcaaagtcagatagatttttctcccagcatgttctacttccgaggctgtggccgttgggtcgcggtttccttcaccaagcagcaatttccgttggcacggttgagcagtgacagcgcggcgccccggactccgcacttcgacgtgatagtcattggtggaggacatgccgggactgaggcagccaccgccgccgctcggtgcggctctcggactctgctcctcactcaccgcgtggacacgatcggtcagatgtcatgtaatccttcctttggtggcatcggaaagggacatttaatgagggaagtagatgccttggatggcctgtgttctcgcatctgtgaccagtctggtgtacattataaagtattaaaccggcgtaagggaccagctgtgtggggtctgagagctcagattgataggaaactctataaacagaacatgcagaaagaaatcttgaatacaccactgcttactgttcaggagggagctgtagaagatcttattcttacagaaccagagcctgaacacactgggaaatgccgtgtcagtggggttgttttggtggatggaagcacagtatatgcagagagtgtgattctgactactgggacatttctgagaggcatgattgtaattggattggagacgcatccagcaggacgtttaggggatcagccttctataggattggctcagacactggagaagttagggtttgtggtgggaaggttgaagactgggactccaccccgaattgccaaagagtccattaatttcagtattctaaacaagcatataccggacaatccatccataccattcagctttaccaatgagacagtatggattaagccagaagatcagctgccatgttacttgactcacaccaaccctagagtggatgagattgtccttaagaaccttcaccttaatagtcatgttaaagaaacgacaagaggacctcgatactgtccctccattgaatcaaaagttttgcgttttccaaaccgtctacatcaggtttggttggaacctgaaggaatggattctgaccttatctacccacaggggttatctatgacgctaccagctgagttacaagagaaaatgatcacatgcatcagaggcttggagaaagctaaagtgattcagccaggctacggtgttcagtatgattacttagatccccgtcagatcaccccttccttggagactcatttggttcaacgactcttctttgctggacagatcaatggcaccactggttatgaggaagctgcagctcaaggtgtgatagccggaatcaacgccagtcttcgggtcagtcgcaagcctccctttgtggttagccgaacagaaggttacataggagtcttgattgatgacctcactactctgggcaccagtgaaccataccgcatgtttaccagccgagtagagttccgtttgtcactgcgccctgataatgctgacagccggctcacactgcgagggtataaagacgctggctgtgtgtcccaacaacgatatgaaagagcttgttggatgaagtcttctttagaagaaggcatttctgtgttgaaatctattgagtttttgagctctaaatggaaaaaattaatcccagaggcttctataagtactagtagaagtctgcctgtcagagctctcgatgttctgaagtatgaggaagttgacatggattcattagccaaggctgttccagagcccttgaagaagtatactaaatgtagagagctggctgaaagactgaaaatagaagccacttatgaatcagtgttgttccatcaactacaagaaataaagggagttcagcaagatgaagctctccaactgccaaaagacctagattatttgactatcagggatgtgtctttgtcccatgaagttcgagagaaactacattttagtcgtccacagacgatcggggctgctagtcgcatacccggagtaacacctgccgccatcatcaatctgctgagatttgtgaagaccactcaacgaagacagtcggctatgaatgaatcatccaagactgatcaatacttatgtgatgcagacagacttcaagagagagagttatagctttcaattcataaaagatttttaaagagcatataaataatttgatcaatacaacagtatagataaaagaattatttagcacatgttaaaatagctttattaggttactatgggtttgccattaatttctgagtgggacagaaattataattgtgctttttcgtgtatatgaaaaaactagtcgtaaacaatttgtactctttctttaaggagctgtaatacaaataactttgtgcagtgttcatcaaagagagagacagtgaacctaaaactgaacctggaataaaactcaacatgcagatttgcctactcatagggactttgcctattaagtctaccaaattaaaagtcttatcattcagcgtgttttgagagttaataatcttttgcttggttatactaggctaggaagcaatatcaaagcccttaaattctcaagactaaagacttgagattatataaaattatccagaatcattcagctaatactattggaatatagtatgtagggtgaaagttgacagaaatctgtacttcttcaggaaatcctcactggtaattgttttgaacattaatgaaagccctataaaatagaaagattggaaatcaccattgtttcctattatccacagtgtggatggatacttatttggtgacctagttatgggagaattgagtaacgttagttattttatatcataccataaaaatattttcttaaaaaa

SEQ ID NO: 1033 - DNA, 549 bp, Homo sapiens
cctttcctgttaggcgagagctgcgaaaggcgagagctgcgaagggccaggtgtcgggcgctgtttctcgttttcatcatatagacaaaacagccctgctgcaaagatggtcaacgtacctaaaacccgaagaaccttctgtaagaagtgtggcaagcatcagcctcacaaagtgacacagtataagaagggcaaggattctttgtatgcccagggaaggaggcgctatgatcggaagcagagtggctatggtgggcagacaaagccaattttccggaagaaggctaagaccacaaagaagattgtgctaaggctggaatgtgttgagcctaactgcagatccaagaggatgctggccattaagagatgcaagcattttgaactgggaggagataagaagagaaagggccaagtgatccagttctaaactttgggatatttttcttcaattttgaagagaaaatggtgaagccatagaaaagttacccgagggaaaataaatacagtgatattcttacgcaaaaaaaaaaaaaaaaaaaaaaaaaaaaa

SEQ ID NO: 1034 - DNA, 1727 bp, Homo sapiens
cgcccccggacaccgctgtccggctcccgggctgtcctcagcaagggcgcggtctggtactcgtgcgtcttttatcgcctcagtttccctccgccgactagcgcgcggggcccggttctccatcgcgcgcacggcagcctagcgcaatgaggcgggcagcactgcggctttgtgccttgggcaaagggcagcttactcctggaagaggactgactcaaggaccccagaaccccaagaaacagggaatcttccacattcatgaagcatgttcatctatacatgtgaatcatgttcgagataagttgcgggagatagtaggagcatccacaaactggagagaccatgtgaaggcaatggaagaaaggaaattacttcatagtttcttggctaaatcacaggatggactgcctcctaggagaatgaaggacagttatattgaagttctcttgcctttgggcagtgagcctgaattacgagagaaatatttgactgttcaaaacaccgtaagatttggcaggattcttgaggatcttgacagcttgggagttcttatttgttacatgcacaacaaaatccactccgccaagatgtctcctttatcgatagttacagccctggtggataagattgatatgtgtaagaagagcttgagcccagaacaggacattaagttcagtggccatgttagctgggtcgggaagacatccatggaagtgaagatgcaaatgttccagttacatggtgatgaattttgtcctgttttggatgcaacatttgtaatggtggctcgtgattctgaaaataaagggccggcatttgtaaatccactcatccctgaaagcccagaggaagaggagctctttagacaaggggaattgaacaaggggagaagaattgccttcagctccacgtcgttactgaaaatggcccccagcgctgaggagaggaccaccatacatgagatgtttctcagcacactggatccaaagactataagttttcggagtcgagttttaccctctaatgcagtgtggatggagaattcaaaactgaagagtttggaaatttgccaccctcaggagcggaacattttcaatcggatctttggtggtttccttatgaggaaggcatatgaacttgcgtgggctactgcttgtagctttggtggttctcgaccgtttgtggtagcagtagatgacatcatgtttcagaaacctgttgaggttggctcattgctctttctttcttcacaggtatgctttactcagaataattatattcaagtcagagtacacagtgaagtggcctccctgcaggagaagcagcatacaaccaccaatgtctttcatttcacgttcatgtcggaaaaagaagtgccattggttttcccaaaaacatatggagagtccatgttgtacttagatgggcagcggcatttcaactccatgagtggcccagcgaccttgagaaaggactaccttgtggagccctaagaacaccacatttgttgaaaactagcactctacccacagtgacgtggtatctgatgaagacctgatcgagtgtattgattttagtattgcttcgtgtcctccacacaggaggaggatgtattcagcctttaggatgatcagaaaagcagaaagagagagtggccggatggggctgaggggagaaagaattattaaacaataaatactttcaagacaattttaattgtgaaccta

SEQ ID NO: 1035 - DNA, 1575 bp, Homo sapiens
gctacttaaggtcctgctgcgtgagccattgacgtgtttggagctggagacggcctgggtgctggcgaagcggaggccggagtaagaagactgttagaatgccctcggtaacacagaggctgagagatcctgacataaatccttgtttgtcggaatctgatgcttccaccagatgtctggatgaaaataactatgacagggaaaggtgttccacttacttcttgaggtacaaaaactgccggagattctggaattctatcgtgatgcagagaagaaagaacggagtgaagccatttatgcctacggcagcagaaagagatgaaatcttgagagcagtgggaaatatgccctattgaatgtttgcattaaaagtgtttatataacttagaagcagatgaatatttctaataaatgattgctgtaatatttaagactgtacacccctcacccagacagaccttaagttcttcaagtggagacagtgaagtcaccccgtgtcctttttgcttgctctcagtgccatgccgatggtatgttgctgttggctgtgttgtggcatgagtttgcatgactttctggaggcatggagttaggtaaggctacatgagaaattgagcttttccactgggttttgaaagaagagtatgatgtgaacaagtaaagactgaatggggctgagatgaaggcaatgtttccaaggaaaggaaatgttatgagcaagagtgtgaggcaagagaagctggaaccacattcagagagtatcctgtagattgctccacctagaatctcaggtgggtggagcagtggtgggagaagactggaaaggtaagttgaaggtaaggaatgtgtggtgggcctcagatcccaggctcattcctcaaatcacttcttacttccctcacttatctttgtttaaataaggttagtacattcactaggggcaaatgggtttttctaaataaatgacataaaaaagaactggttgtctttctttaaagaaagtcttagttacaggattctgtgattaaaatccttaaatattgggttgccttctgcagctgtagtatcagtttttgaaccacagtaatgggaagaaagacaaatggattcccttagaagtaagatttctatttgcaggatgagttgggcagggaaaagggtcagggttcatcaggtgaactcaacactgggatgagactagaacttcactttatgatataaacacaatacgattattcaatgtggtgactggggtagactgtgaagcagccctccttatgcccactgccttttagaatcgtttgttttattcatggtagttttatgaagacatactattattgaatgaaatttaatgtgtacttgaaaacattgcttttgtcccttctcttcatctggtcttgggtcaagaacattgttttaatggctgccgacaatgaactgtctgtctgagtctaaaaccaagctcaggtttctaagccacatgaccttgattgttaaatgtagttatatttgaataaaaaatgaatcatttccaaaaaaaaaaaaaaaaaaaaaaaaaaaaaaaaaaaaaaa

SEQ ID NO: 1036 - DNA, 1575 bp, Homo sapiens; identical to SEQ ID NO: 1035

SEQ ID NO: 1037 - DNA, 5515 bp, Homo sapiens
cagcccgggaatcaaccaccggaagtgccggccctgagaggtggagtcggggtggcagcggcggcggttgccaggagcccgcgttgcagcctgagatccgtaatatggcggggaggaggaggagaaggcggcggcggaccgagctgcgctctgtcagtaccatttgagccattcgcttcctgacaaggcccgtggcgaggggagaggagctgaaggggccgtgggggatcagtgcctgctgtgtgctgatactgttctgtgtaatggggattcagtgaacaagactgaaaaggtacctgtacttatggcgcttacattttggtggaggaagacagacaaaaatcaaggaaataaacacgataatttcagatagtgtgtgactgtgggaagatggaggagtatgagaagttctgtgaaaaaagtcttgccagaatacaagaagcatcactatccacagagagctttctccctgctcagtctgaaagtatctcacttattcgctttcatggagtggctatcctttctccactgcttaacattgagaaaagaaaggaaatgcaacaagaaaagcagaaagcacttgatgtagaagcaagaaagcaggttaacaggaagaaagctttactgactcgtgtccaggagattcttgacaatgttcaggttagaaaagcacctaatgccagtgattttgatcagtgggagatggaaacagtttactctaattcagaagtcagaaacttgaatgttcctgctacatttccaaatagctttccaagccatacggaacactctactgcagcaaagcttgataagatagctgggattttgccattggataatgaggaccaatgtaaaactgatggaatagacttagctagagattcagaaggatttaattctccgaagcaatgtgatagttccaatattagtcatgtagaaaatgaagcttttccaaagacctcttcagcaaccccacaagaaactcttatttctgatggtcccttctcagtaaatgaacaacaggatctaccacttttggcagaagtcatcccagatccctatgtaatgagtcttcagaatctgatgaaaaagtcaaaggaatatatagaaagagaacaatctagacgcagtctgagaggtagtatgaacagaattgttaatgagagtcatttagacaaagaacatgatgctgttgaagtggctgactgtgtaaaagagaaaggccagttgacaggcaaacactgtgtctcagttattcctgacaaaccaagccttaataaatcaaatgttcttctccaaggtgcttccactcaagcaagcagcatgagtatgccagttttagctagcttttcgaaagtggacatacctatacgaactggccatcccactgttctagagtctaattctgattttaaagttattcccacttttgttaccgaaaataatgttatcaaaagtcttacaggttcatatgccaaattacctagtccagagccaagtatgagtcctaaaatgcaccgaagacgttccaggacatcatcagcgtgtcatatacttataaataacccaataaatgcctgtgaattaagccctaaaggaaaagaacaggcaatggacttaattattcaagatactgatgaaaacacaaatgtgcccgaaattatgccaaagttaccaactgatttagcgggagtttgttcaagcaaggtttatgtgggcaaaaatacatctgaagtcaaagaagatgtggttttaggtaaatcaaatcaggtatgtcaatcttcaggaaatcatttagaaaataaagttactcatggacttgttactgtggaaggtcagttaacatccgatgagagaggcgcacacataatgaacagtacctgtgctgcgatgccaaagctgcatgaaccatatgccagcagtcagtgtatagcaagtccaaactttggaactgtgagtggactcaagccagccagtatgttagagaaaaactgcagtttgcaaacagaactgaataagtcttatgatgtaaaaaacccttctcctttattgatgcaaaaccagaatacgagacagcagatggacacacctatggtgtcctgtggaaatgaacaatttttggataacagttttgagaaagttaaacggagacttgatttagatattgatggtttgcaaaaagaaaactgcccttatgtcataacaagtggaataactgaacaagaaaggcaacatttgccagaaaaaagataccctaagggatctggcttcgttaacaagaataaaatgttaggaactagttccaaagaaagcgaggagttactaaaaagcaagatgttagcttttgaagaaatgcggaagagactagaagaacagcacgcccagcaattatcactactcatagctgagcaggaaagggaacaagaaagactgcaaaaggaaatagaagagcaggagaaaatgttaaaagagaagaaggcaatgacagcggaagcctctgagttggacattaacaatgcagtggaattagaatggagaaaaataagtgactctagtttgctggaaacaatgctgtctcaagcggactcactccatacttcaaattcaaatagttctggtttcacaaattctgccatgcaatatagctttgtttctgcaaacgaagcaccattctacctctggggatcatcaactagtggcttgaccaaactctcagtaacaaggccttttggaagagccaaaactagatggtctcaagtttttagtctggaaatacaagcaaaatttaacaaaataactgcagtggcaaaaggatttcttactcgtagacttatgcagacagataagctgaagcaacttcgacaaactgtaaaagatactatggaattcataagaagttttcagtcagaagcaccattaaagagaggcattgtttcagctcaagatgcttcacttcaggaaagagtgttagctcagttgcgagctgccttgtacggtattcatgacatattctttgtaatggatgcagctgaaagaatgtctattctacatcatgatcgagaagttcgcaaagagaaaatgctcaggcaaatggataaaatgaaaagtccacgagtggctctttcagctgcaacacagaagtctcttgataggaagaaatacatgaaagctgctgaaatgggaatgccaaataagaaatttctggttaaacaaaatccttctgaaacaagagtccttcagccaaaccaaggacagaatgcacctgttcataggctacttagtagacaagggagtatatgcaggaaaaatccaaagaaagcggccaaatgttgcgacaatttaagaagacaacattcattaggataaaatggggggaaggattattattcatgttattttccctgcccaagactttatttaaccctggactccgtttacacagacaaagtgacatcagaaggctgagcacttatctggatcatttggtcagtttggtaattcctgctccacacccctattttcctcttaataatacgtttgggtgaagacaaattagtgtttagtaattgcatcatctctgtgcttacctatacaaacataagtttattttatatgcccagatgtctacagagaccctttttgtaaatgtcaaggacatttggatttacttttacagaatattgaaaagataagacaaattataaataagttctaaaacataaatttaattcatctctgcatagtgatttttgaatttgattcaaagggaaattattgcagaagaatgcctttccctcattttataactttaaaaacttggattaaccactcaatgtccactttctttgacttacagtataaccatgtagccaattgtggcccactaaaatctacagaagttaatgtgggtcaccattttggtcagaagcatacattcctgtcagacaactagttgtctgacagaaatgttaggcttcatgtatgttaccccagtactgttagaaacatttgtactaggttataagatctttctgtgacaggtaacaaatttggggaagacagcacaatcttcttgaatgtagctcttgggaatgcattattacatccatttctgtaacataataatatgttgcatgcagttatattttctatttagtctgtatattttgttcttcatagtctgttttttctagcatgcttgatttaggagagaataaagggctatataataataaatccagatttccggataagaatattgcctggttaaaattctgcattgcttaaagacacccatgtttaagatttttcatcactaacatatccattaaaagtatcaactggccaggcagggtggctcacgcctgtactcccagcattttgtgaggccaaggtgggtggatcacctgaggtcaggagtttgagaccagcctgaccaaacatggcgaaaccccatctgtactgaaaatacaaaaattaggcatggtggtgcatgcctgtagttccagctacttgggaggctgagacaggcgaattgcttgaacctgggaggcagaggttgcagtgagctgagactgtgccattgcactccagtcgggttaacagagcaagacactgtctcaaaaaaaaaaaaaaaaaaaagtatcaaccaacaaatgttaccaagataacgtgacttcatgagggagaatgtcactattaatttatcataccatttccaaaaagggctttgtgcttttcacataaaattgagacagtgtatatttaatctaatttaaattttaaagagatactggtattttgaaaatgcaacctatatatattcttaatatccttttaagaatatggagatgaagattgttttctccaattttctgtgccattttaaatttaactttgacatccagctatagacagaaataataagccaccctgggtgtaaacttgattttctttattgagatgtatcatgtattgaatgagtgaaccagaaaattagaagatggtcaaaaaaagtccaagttaccaattttttaaaatttataggcaaagtatcaaattgtcttcttaatatgataaactgtgctttatcattctgaaaactcaggatacagcttattcatagcattgtgggtctctccagtaagaaagatgctaaaagttttgtgcactttttgtgtgtgtaatgcaaattagttaaaacaaatagttttggagaaagttaaaactagctttagagtaaggatgagaaacttgagtgtttttaatttaaagataaaagcctgtgttttacacattcttttttggtgttcatagcttcttctcatacaggtgccagacactgtttgtgcttttgatggatttttatttatatactttttttgcttatttttactttgagtggaatgttcattaatgtaaattgtatttatttttatacttttattttcactagttttgcttctaggcaaaaagcaaaataaacttttcatcttaaagaaaaaaaaaaaaaaaa

SEQ ID NO: 1038 - DNA, 4576 bp, Homo sapiens
cggcagaggaggaggaggaggcggtgctcgcgccgggcggtagagcggcgctgggacccatgcggccgtgacccccggctccctagaggcccagcgcagccgcagcggacaaaggagcatgtccgcgccggggaaggcccgtcctccggccgccataaggctccggtcgccgctgggcccgcgccgcgctcctgcccgcccgggctccggggcggcccgctaggccagtgcgccgccgctcgccccgcaggccccggcccgcagcatggagccacccggacgccggcggggccgcgcgcagccgccgctgttgctgccgctctcgctgttagcgctgctcgcgctgctgggaggcggcggcggcggcggcgccgcggcgctgcccgccggctgcaagcacgatgggcggccccgaggggctggcagggcggcgggcgccgccgagggcaaggtggtgtgcagcagcctggaactcgcgcaggtcctgcccccagatactctgcccaaccgcacggtcaccctgattctgagtaacaataagatatccgagctgaagaatggctcattttctgggttaagtctccttgaaagattggacctccgaaacaatcttattagtagtatagatccaggtgccttctggggactgtcatctctaaaaagattggatctgacaaacaatcgaataggatgtctgaatgcagacatatttcgaggactcaccaatctggttcggctaaacctttcggggaatttgttttcttcattatctcaaggaacttttgattatcttgcgtcattacggtctttggaattccagactgagtatcttttgtgtgactgtaacatactgtggatgcatcgctgggtaaaggagaagaacatcacggtacgggataccaggtgtgtttatcctaagtcactgcaggcccaaccagtcacaggcgtgaagcaggagctgttgacatgcgaccctccgcttgaattgccgtctttctacatgactccatctcatcgccaagttgtgtttgaaggagacagccttcctttccagtgcatggcttcatatattgatcaggacatgcaagtgttgtggtatcaggatgggagaatagttgaaaccgatgaatcgcaaggtatttttgttgaaaagaacatgattcacaactgctccttgattgcaagtgccctaaccatttctaatattcaggctggatctactggaaattggggctgtcatgtccagaccaaacgtgggaataatacgaggactgtggatattgtggtattagagagttctgcacagtactgtcctccagagagggtggtaaacaacaaaggtgacttcagatggcccagaacattggcaggcattactgcatatctgcagtgtacgcggaacacccatggcagtgggatatatcccggaaacccacaggatgagagaaaagcttggcgcagatgtgatagaggtggcttttgggcagatgatgattattctcgctgtcagtatgcaaatgatgtcactagagttctttatatgtttaatcagatgcccctcaatcttaccaatgccgtggcaacagctcgacagttactggcttacactgtggaagcagccaacttttctgacaaaatggatgttatatttgtggcagaaatgattgaaaaatttggaagatttaccaaggaggaaaaatcaaaagagctaggtgacgtgatggttgacattgcaagtaacatcatgttggctgatgaacgtgtcctgtggctggcgcagagggaagctaaagcctgcagtaggattgtgcagtgtcttcagcgcattgctacctaccggctagccggtggagctcacgtttattcaacatattcacccaatattgctctggaagcttatgtcatcaagtctactggcttcacggggatgacctgtaccgtgttccagaaagtggcagcctctgatcgtacaggactttcggattatgggaggcgggatccagagggaaacctggataagcagctgagctttaagtgcaatgtttcaaatacattttcgagtctggcactaaagaatactattgtggaggcttctattcagcttcctccttcccttttctcaccaaagcaaaaaagagaactcagaccaactgatgactctctttacaagcttcaactcattgcattccgcaatggaaagctttttccagccactggaaattcaacaaatttggctgatgatggaaaacgacgtactgtggttacccctgtgattctcaccaaaatagatggtgtgaatgtagatacccaccacatccctgttaatgtgacactgcgtcgaattgcacatggagcagatgctgttgcagcccggtgggatttcgatttgctgaacggacaaggaggctggaagtcagatgggtgccatatactctattcagatgaaaatatcactacgattcagtgctactcccttagtaactatgcagttttaatggatttgacgggatctgaactatacacccaggcggccagcctcctgcatcctgtggtttatactaccgctatcattctcctcttatgtctcttagccgtcattgtcagttacatataccatcacagtttgattagaatcagcctcaagagctggcacatgcttgtgaacttgtgctttcatattttcctaacctgtgtggtctttgtgggaggaataacccagactaggaatgccagcatctgccaagcagttgggataattcttcactattccacccttgccacagtactatgggtaggagtgacagctcgaaatatctacaaacaagtcactaaaaaagctaaaagatgccaggatcctgatgaaccaccacctccaccaagaccaatgctcagattttacctgattggtggtggtatccccatcattgtttgcggcataactgcagcagcgaacattaagaattacggcagtcggccaaacgcaccctattgctggatggcatgggaaccctccttgggagccttctatgggccagccagcttcatcacttttgtaaactgcatgtactttctgagcatatttattcagttgaaaagacaccctgagcgcaaatatgagcttaaggagcccacggaggagcaacagagattggcagccaatgaaaatggcgaaataaatcatcaggattcaatgtctttgtctctgatttctacatcagccttggaaaatgagcacacttttcattctcagctcttgggggccagccttactttgctcttatatgttgcactgtggatgtttggggctttggctgtttctttgtattaccctttggacttggtttttagcttcgtttttggagccacaagtttaagcttcagtgcgttcttcgtggtccaccattgtgttaatagggaggatgttagacttgcgtggatcatgacttgctgcccaggacggagctcgtattcagtgcaagtcaacgtccagccccccaactctaatgggacgaatggagaggcacccaaatgccccaatagcagtgcggagtcttcatgcacaaacaaaagtgcttcaagcttcaaaaattcctcccagggctgcaaattaacaaacttgcaggcggctgcagctcagtgccatgccaattctttacctttgaactccacccctcagcttgataatagtctgacagaacattcaatggacaatgatattaaaatgcacgtggcgcctttagaagttcagtttcgaacaaatgtgcactcaagccgccaccataaaaacagaagtaaaggacaccgggcaagccgactcacagtcctgagagaatatgcctacgatgtcccaacgagcgtggaaggaagcgtgcagaacggcttacctaaaagccggctgggcaataacgaaggacactcgaggagccgaagagcttatttagcctacagagagagacagtacaacccaccccagcaagacagcagcgatgcttgtagcacacttcccaaaagtagcagaaattttgaaaagccagtttcaaccactagtaaaaaagatgcgttaaggaagccagctgtggttgaacttgaaaatcagcaaaaatcttatggcctcaacttggccattcagaatggaccaattaaaagcaatgggcaggagggacccttgctcggtaccgatagcactggcaatgttaggactggattatggaaacacgaaactactgtgtaacattgctgggcttcctaggcagaaattcatataaactgtgatactcacattccttgaagctatgagcatttaaaaactgtttacagccaccatagggattcaaaagaatttggaataaactttgaagttttggattttacttatttttatccccaaattgttgctattttttaggatctgaaacaaaatctttctaaaacattgttttagttgtcaaagcaccaacaggacattttgggatgtgaaatgtaatttcttggaatctgtaatttgtacttaatatttcaggcttgtatttaatataataaataggtgtttgttattgtgtcaaaaaaaaaaaaaaaa

SEQ ID NO: 1039 - DNA, 3061 bp, Homo sapiens
gtctcgcgggagcgctgctggcggtcgggcgctcgggcggccctggccggggagacgagttgcatgtgttggttcagctggcgatagcggcgggagcggagccggcggggcctgtgcgaccgcctgggtttgtgaaatggctgctgacatttctgaatccagcggggctgactgcaaaggagacccaaggaacagtgccaagttagatgccgattacccacttcgagtcctttattgtggagtctgttcattaccaacagagtactgtgaatatatgcctgatgttgctaaatgtagacaatggttagagaagaattttccaaatgaatttgcaaaacttactgtagaaaattcacccaaacaagaagctggaattagtgagggtcaaggaacagcaggggaagaagaggagaagaaaaaacagaagagaggtggaaggggtcaaataaaacaaaaaaagaagaccgtaccacaaaaggttactatagccaaaattcccagagcaaagaagaaatatgtgacaagagtatgtggccttgcaacttttgaaattgatcttaaagaagcacaaagattttttgctcaaaaattctcctgtggtgcctcagtaacaggggaggatgaaattatcattcagggagattttacagatgacataattgatgtcattcaggaaaaatggccagaggtagatgatgacagcatcgaagatcttggagaagtaaagaagtgaatttgaaaatttgtctgtatttaatggcctgaactgagagttgatatggccaaagggagagaggccttttaaaatatatatatatatacacatatatatgtatatatacacatatatgtatgtatacacatatacacatgtatatatacatgtgtgtatgtatacatgtatatatatatacatacacatatatgtatacatatatacacatatatgtatacatatatacacatatgtatacatatatatatattctacagtaaaactgtagactgtcctcgtccttggcattttcactgttctgtacaaggctgcttgtttttttattgccaaagtcaaataaacgggagactgtcatgctcatgcatgaatagaatttagtcaaataaaaaattttggtcatttggtactgactttctctctctctctctctctcttttttttttttgacagagtctcgcactgttgcctgggctggaatgcagtggtgcgatctcggctcactgcaacctccgcctcccgggttcaagtgattctcctgcctcagcctcccaagtaggtgggattacaggcgcccgccaccacgcccagctaatttttgtatttttagtagagatggggtttcactatgttggccaggctggtctcgaactcctgacctcgtgattggcccacctcagcctcccaaagtgctggtattacagatgtgagccaccgcacccagcctgagtttctctttctctctttttaactttattttttgaaaaacccggtagactttttgtggggagcatttttgttgataattttactgatctaaagctgagtgattttttaaaagaatttgaatttggcttcctcaccagtaatatgtctccttgcttctttgatgtgatagttttgagatgggtgagaatctaatagatctgtggttgaatttgctgtgttgttatgaagtccaccctgtgggcacaataacataactgttggtaggagttgtttgagctattctggagattatttggtaaagtatactaaaagccttaaaaccatgtatgtgcgctgtttgaaccagtaagccacttctttgacattagaagacattagaagaaataatcagccttgcataaaacttatggatgaaagtattcatcacaatattatttataataaaaaattgcaaatgttataaatgaacaattgggaaatggttaaagaagtgatggtgcattgtgtggtagaatattatgcatatgtttaaagaatcatattttctaagattatttggaagcatgtttggtaatgtcaagtggagtaccccagatacattttagacatttatcgtcatcatctgctctgagtggaaggccgttcagagaggctagaggttcttattctggctataaattatgtgagtaaaattgtgctaaccagttaaaagtactgtacacccatgctcaatatatagtcctggaaatagcaattgaaacatgtcttctcacaagagaaaatgacagttttaatgatgtatttgatgaatttaaactttaagtcaggtgctgcaaattggaaagaagacttgtggtgttttaagttgctgtggacacttttaagaaacttagaacccatggaacccttgtttatcgccatgcaaattacaatcttgaatgagtgttttttaaaaataaagtattagaaaaatgtgtagtaaagatgtaaaattaaaaaatggaattctccattaactgtggattttactaaatagaattactggtgaagcagatttatccatcgagactatctggtatgcgttatgtatgtagtctgttgctgctgaaagatgtctgtgtgcctgtatcaacatgtgacttcatgtaaagtttctttgtgttcacagttcttagcaaatgcagttacaatccatagatagccagcagtggatgttactccaggaaaatgcaggattaaaattgtccttgtgtataacgtgtgaatcatttttttaaactgaaatttaaaatgcaacatagtttaatctctgattaaaatgtactaatagggccaagctgctttgatgcatggctataatcccagccgaggtgggaggatcacttgagtccaggttcaagactagcctgggcaacatggcaagaccctgtccctataaaaaatacaaaaattagccaggcatggtggcgtgcgcctgcagtcccagctacttgggaggctgagttgggaggatcacttgagcctgggaggttgaggctgcagtgaactgagatcacgacactgcactccagcctgggcaacagtaaaacctggtctcca

SEQ ID NO: 1040 - DNA, 5635 bp, Homo sapiens
ccctgaggcgacagcagctgcgggaggcgacgggctgcggcctgcggaacctgaggcagctggggagggccgggcgcgccggccggatagcgagccgcgctggcggcggcggtggccgcgatgatggagatccagatggacgagggcggcggcgtggtggtgtaccaggacgactactgctccggctcggtgatgtcggagcgggtgtcgggcctggcgggctccatctaccgcgagttcgagcgcctcatccactgctacgacgaggaggtggtcaaggagctcatgccgctggtggtgaacgtgctggagaacctagactcggtgctcagcgagaaccaggagcacgaggtggagctggagctgctgcgcgaggacaacgagcagctgctcacccagtacgagcgtgagaaggcgctgcgcaggcaggcggaggagaaattcattgagtttgaagatgctctggaacaagagaagaaagagctgcaaatccaggtggagcactacgagttccagacgcgccagctggagctgaaggccaagaactatgccgatcagatttcccggttggaggagcgggagtcggagatgaagaaggagtacaatgccctgcaccagcggcacacagagatgatacagacctacgtggagcacattgagaggtccaagatgcagcaggtcggaggaaacagccagaccgagagcagcctgccggggcggaggaaggagcgccccacctccctgaacgtgttccccctggctgacggcacggtacgtgcacagatcgggggcaagctcgtgcctgcgggggaccactggcacctgagtgacctcggccagctgcagtccagctccagctaccagtgtccacaggatgaaatgtccgagtcaggccagtcctcggcggccgccacacccagcaccacaggcaccaagtccaacacgcccacatcctccgtgccctcggccgccgtcacacccctcaacgagagcctgcagcccctgggggactatggcgtgggctccaagaacagcaagcgtgcccgggagaagcgcgacagccgcaacatggaagtacaggtcacccaggagatgcgcaacgtcagtataggcatgggcagcagtgacgagtggtctgatgttcaagacattattgactccacgccagagctggacatgtgtccagagacccgcctggaccgcacaggaagcagcccaacccagggcatcgtgaacaaagctttcggcatcaacaccgactccctgtaccatgagctgtcgacggcagggtctgaggtcatcggggatgtggacgaaggggccgacctcctaggggagttctcaggaatgggcaaagaagtggggaatctgctactggaaaactcacagcttctggaaaccaaaaacgccttgaatgtggtgaagaatgacctgattgccaaggtcgaccagctgtccggggagcaggaggtgctgaggggcgagttggaggctgctaagcaggccaaagtcaagctggaaaaccgtatcaaggagctggaagaggaactgaaaagagtgaagtccgaggccatcatcgcccgccgtgaacccaaagaagaggcggaggatgtaagcagctatctctgtacagaatcggacaaaatccccatggcccagcgccgccgcttcacgcgggtggagatggcccgtgtgctcatggagcggaaccagtacaaggagcggctgatggagctgcaggaggctgtgcggtggactgagatgatcagagcgtcccgagagcacccatccgtccaggagaagaagaagtcgaccatctggcagttcttcagccgcctcttcagctcttcctccagcccccctccggccaagcgcccctatccctcggtgaacatccactacaagtcacccaccactgccggcttcagccagcgccgcaaccatgccatgtgcccgatctcggcaggcagccggcccctggaattcttccctgacgacgactgcacgtcctccgcccgtcgagagcagaagcgcgagcagtaccgccaggtgcgtgagcacgtgcgtaacgacgacggccgtctgcaggcctgcggctggagcctgcccgccaagtacaagcagctgagtcccaacgggggccaggaggacacgcggatgaagaacgtgccggtgccggtgtactgccgccctctggtggagaaggaccccaccatgaagctgtggtgtgccgcgggcgtcaacctgagcgggtggaggcccaatgaggacgacgctgggaatggagtcaagccagcgccaggccgcgatcccctgacctgcgaccgcgaaggagacggcgagcccaagagcgcccacacgtctcccgagaagaagaaggccaaggagctccctgaaatggacgccacctccagccgggtgtggatcctgaccagcaccctgaccaccagcaaggtggtgatcatcgacgccaaccagccgggcacggtggtggaccagttcaccgtctgcaacgcgcacgtgctgtgcatctccagcatccccgcggccagcgacagcgactaccctcccggggagatgttcctggacagcgacgtgaacccagaggacccgggcgcagatggcgtgctggccggtatcaccctggtgggctgtgccacccgctgcaacgtgccgcggagcaactgctcctcccgaggggacaccccagtgctagacaaggggcagggggaggtggccaccatcgccaacgggaaggtcaacccgtcccagtccacagaggaggccacagaggccacggaggtgccagaccctgggcccagcgagccagagacagccacattgcggcccgggcctctcacagagcacgtcttcactgacccagccccgaccccgtcctctggcccccagcctggcagcgagaacgggccagagcctgacagcagcagcacacggccagagccagagcccagcggggaccccacgggagcaggcagcagtgctgcacccaccatgtggctgggagcccagaacggctggctctatgtgcactcggctgtggccaactggaagaagtgcctgcactccatcaagctgaaggattctgtgctgagcctggtgcatgtcaaaggccgtgtgctggtggctctggcggacgggaccctggccatcttccaccgtggtgaagatggccagtgggatctgagcaactatcacctaatggacctgggccacccgcaccactccatccgctgcatggctgttgtgtacgaccgcgtgtggtgtggctacaagaacaaggtgcacgtcatccagcccaagaccatgcagatagagaagtcatttgacgcccacccgcggcgggagagccaggtgcggcagctggcgtggatcggcgatggcgtatgggtgtccatccgcctggactccaccctgaggctctaccatgcacacacgcaccagcatctacaggacgtggacattgagccctacgtcagcaagatgctaggcactggcaagctgggtttctccttcgtacgcatcacggccctgcttgtcgcgggcagccggctctgggtgggcaccggcaacggagtggtcatctccatccccctgacagagactgtggtcctgcaccgaggccagctcctggggctccgagccaataagacatcccccacctctggggagggcgcccgtcccgggggcatcatccacgtgtatggcgatgacagcagtgacagggcggccagcagcttcatcccctactgctccatggcccaggcccagctatgcttccatgggcaccgcgatgccgtgaagttctttgtctcggtgccagggaacgtgctggccaccctgaatgggagtgtgctggacagcccagccgagggccctgggccagctgcccctgcctcggaggtcgagggccagaagctgcggaacgtgctggtgctgagcggcggggagggctacatcgacttccgcattggagacggagaggacgacgagacggaggagggcgcaggggacatgagccaggtgaagcccgtgctgtccaaggcagagcgcagtcacatcatcgtgtggcaggtgtcctacacccccgagtgaagctgctgccctgcctggcccgacctgtacataggacccccgaccacctgacccccgcccggcccgcggggtagccagccaggcgccgccgcccctcttctaacctctcaacctgcagctttcacctgagtctggcccctccagcgggcagggagtgcggggatgcggatcagctgggaggaggaggggaggggaacttccacccgaggggaagatgctctcgggacagtttcccgggcagctcctggccagcttccagcccagagtcctcaagtccagggcaccttgggcccagcgcaggcagaatccgaggtggtcctggctctaccctgggcctcctactccccagcacccctggaggaggcaggggctccccgccgccgaggctgcctgccctgggcccacctctgcatgctgctcatggggccaccctgcctcctgggccctcactctgcctaggggagctgggccaggcactagcctttgcccagggaggtgggcctcaggctgcccaggtgcctgcaccccagccggccttctctggggcctccccgtcgtcaagcctctatcctgtctgtccccaccccagctgtcccctgcccagggagctggcataaaagcacgaggcccggctccctggggcagctgcttgagaacagagactgctaccccatcctgcccatgcaggcaggctcttgccagccccgttctgacccgtgtccccccaggctctgcctgggcagaagactcaccttggaggagtgggccctggagtcctgtccctcccagaagcccccagggtgggatttctcaggctgccagggcaggcccaggcctcaggaagaaggggaggcccctggcctctccgggatcagtcctaggacacaggctcagcctcaggttgatgggggatgatgtgctcccggggcctgcctcctgcacggggctccacggagcccagctcccagacacgctactaagtgcctagggttgcccgctgtggcctgcttccagggagcaacagagaggccaccaagcagaggcccgtggggctgaggatggagccgcccccagccgactccaagcccgcagagggcagacgccaccctggactgctctccctgcccagctgggcctctctggcctattcctaccttccaggcccactgcactcctgtctgggaggcccttatgagggcagcccagcccccgcacccacccccaaccagagaagcacagatcttggggagctgccccacaagccccgctggccaccgagggctgcagccgctgcgctgccggcttctccccaccaccctgccacctccactgtgatgtatgtccgctccctcgtctgttcccccaggatctcgaagtgactccgggctgagcagtggggcggctgggggaggggtgacgattctcctcaggctttggccctgcaagcaaacccacatatctgctctgtatgtaataaatgtcttaacgtcgtaaaaaaaaaaaaaaaaaaaaaaaaaaaaaa

SEQ ID NO: 1041 - DNA, 6873 bp, Homo sapiens
gccgggggcggggggcggcgggcgacggggcgggcgcaggatgagggcggccattgctggggctccgcttcggggaggaggacgctgaggaggcgccgagccgcgcagcgctgcgggggaggcgcccgcgccgacgcggggcccatggccaggaccaccagccagctgtatgacgccgtgcccatccagtccagcgtggtgttatgttcctgcccatccccatcaatggtgaggacccagactgagtccagcacgccccctggcattcctggtggcagcaggcagggccccgccatggacggcactgcagccgagcctcggcccggcgccggctccctgcagcatgcccagcctccgccgcagcctcggaagaagcggcctgaggacttcaagtttgggaaaatccttggggaaggctctttttccacggttgtcctggctcgagaactggcaacctccagagaatatgcgaccagggccaactcattcgtgggaacagcgcagtacgtttctccagagctgctcacggagaagtccgcctgtaagagttcagacctttgggctcttggatgcataatataccagcttgtggcaggactcccaccattccgagctggaaacgagtatcttatatttcagaagatcattaagttggaatatgactttccagaaaaattcttccctaaggcaagagacctcgtggagaaacttttggttttagatgccacaaagcggttaggctgtgaggaaatggaaggatacggacctcttaaagcacacccgttcttcgagtccgtcacgtgggagaacctgcaccagcagacgcctccgaagctcaccgcttacctgccggctatgtcggaagacgacgaggactgctatggcaattatgacaatctcctgagccagtttggctgcatgcaggtgtcttcgtcctcctcctcacactccctgtcagcctccgacacgggcctgccccagaggtcaggcagcaacatagagcagtacattcacgatctggactcgaactcctttgaactggacttacagttttccgaagatgagaagaggttgttgttggagaagcaggctggcggaaacccttggcaccagtttgtagaaaataatttaatactaaagatgggcccagtggataagcggaagggtttatttgcaagacgacgacagctgttgctcacagaaggaccacatttatattatgtggatcctgtcaacaaagttctgaaaggtgaaattccttggtcacaagaacttcgaccagaggccaagaattttaaaactttctttgtccacacgcctaacaggacgtattatctgatggaccccagcgggaacgcacacaagtggtgcaggaagatccaggaggtttggaggcagcgataccagagccacccggacgccgctgtgcagtgacgtggcctgcggccgggctgcccttcgctgccaggacacctgccccagcgcggcttggccgccatccgggacgcttccagaccacctgccagccatcacaaggggaacgcagaggcggaaaccttgcagcatttttatttaaaagaaaagaagaaaaaaaacacccaaccacacaaagaacaaaaccagtaacaaacacaaaggaattcagggtcgctttgcttgctctctgtgctccgtggaggcctccgtgtgccctcgttgccgtggggacccagctccatgcacgtcaacccagtcccgcccagactagtggacagacctggtgtcaccagtttttcctagcatcagtccgaaccatgcgcccgccctgccccaactgtgtgctggtcctgctgtggccgaggggaccgggtgtgtttggctctttatgcccctcccgctgtggtcctggaactcttcaccagggagggagccctgcgggggccgcagctttgtggagggagccgccgtgcttctgtcacctgctccctttcttgcgtctccctgtgatgggcccttaggcctggctgggcccattacatatccctgtggtggctctggtggcagctttctgtggcccctgctgtgttggcaggcaggtttgcgtggtgaggagcgggaggggttggagtggtgcgggagcaggctgccgagtggagggtgccatcgagggctccggatcccttatcctacttagcagtgttggtctctggggctggaagccgagcgcatgctgggagcggtactgtcagaagtgagcccagttagtaccccgctggctcactgcacgagagagtcctgccccgagccctaggtggggccaggaggtgccttggagaagccagccagagcagagagggctgctgacttccgtgtggagcagagaggcctgagggcctcctaaaaggtttaaatgtccacgcctctccagttgctgaagtagggtctgagagaaccctggcatcagcagacccagggtgcttctgtctcctgcagaccacgccagggagtgcagacaccaccgtcacacacgccccttttgtgttttggttcaagtttctcagagcccctcagagcttctacatctgtgcatcagaaatctcacagccttctcatgctgccggctcatctgggcccatagagtgggctttgccagttgctgttgcacaggaggcgagaacagcacacttcaaccccagcttgctggtcggctttcctctagagagagccggttttggggccatttccctttgatgctttggtggccttgccccgctctgcagcacagacaggccagatgcatttgtcctttgcctagctactccccaggtagagagtgctcctggtggcctggcaggtctgggcccttctctccctgcccaggttgtccctggagggcagccctcactccctttgggggagaggcagacattgctgcccacagacctgcctctgactcaactgtgtccaccctccctggtccctacccccaagtcacaggtgactcagcagtgaccctgtgtgccaggccagatccaaactgagagggaaggtgtcgtttttacactgctaatgacgagagtggctctttttagctaggcgagtacagacggggcctgggagggggcagagatgttccccaggccctgcctgtggttcctgcctgggccttggctgctgctgtgtgagagctgcatgtgagcctgtgaccgtgagctggggtgagctgggccgcacctaccctggggccccagggagcaggacgctccggggcccagcacgttgccctgggcctgtggccggagtcggagtcctctctcctcctcctggcttttggaaaggcttggctgtgttggggagtctctcttagccctttcaggaatttctgttcaggcttcctcctcctcatcagctattttacccatctcagaacgtcctgtgtctccatgtaggagagtggctctctcagatctctcagggcgtctggttatagggaaacaagtggagcagggacgtggctttaattggagcactcggctgggctgcttggggagactcttccgtgcgttcttcctctggatagaaccaccacctcctgggcgtcactgacaagctccatcttaacctccaaagccacagaactaggggctcagagccagagctggcagccgccagccaaaatgatgccattgcctgagctgacagccaagcccttctgtgggtcacctttctcctcacccagccccttgctcttcccttttgaaaggcccgtgtgttttctttccttaccctgtgcttgctcatgtctactccggttttctctaccacatccttagagccatcacctggcacgcaggcgccttacattctacggtagaacgtggggtactgtgtgtgcacatagacacacttacgtggaattacagttgtgggtttatccaagatgaggaagatttcacctgctgtttaatagacttggggccatgtgcctccccacacatgggcaaggacaggtggaatgtcgggaccacactgtgcggcttctcggcacaaagcggagggaggctgtggtcgctgccggcctaggtgtcccaggtgccccgcctttctctgggacacagttgggggctggcttctgagggattcctttctcccctctttgtgtggccccagccagggcggtgggcagtcctggtgtagagcacaagcctctccaccctagagaaatgcctctgtaccacggctaccatgtggaaccttaacttgcagaaggcttgttaacaattgttttgagagagatggctggtcatgccacagctgctggggactccgcctactccagccctcttgggacacactgtgggatttgtggcccttccccagaggaattgtggagactgtcccatggaacaaaccctcaggcaccagcacagggctctgggtgactcagtaaaactaacgtttgtctctgacaagatcagctgtaggctcaccggccagagaagaccactgtgagcattttgccgtatatcctgccctgccatttgttcactttttaaactaaaataggaacatccgacacacaccgtttgcatcgtcttctcccttgatattttaagcattttcccatgtcatgagtttctcagaaacatgtttttaacaattgtactatttagtcattgtccatttactataatttatctgaccatttccctactgtaaaatacttaagacggtttctgatttttccactatttaaataatgctgtgatgaatatctttaaaatcttctgatttcttacttttttcccccttagatgcctggaagtggtattttgaggtgaaagagtttgttcattttgaagatatttctgtctctctctcgacctgatgtgtagacgctcacttccagtagcagaaccaccttagttgtgtcttacagattctgaacaaatcggtttctgataagccatgtgttccaaagaatgtctgaataagaccgctctttatttaaatgctaagaggatgtcactactgcaatccatctgtggccgattttttccaagagccaatttccttgttttggttgcaagaacctggctctgcctgcatgtcagctctctgccctccctgctgccgtggctttcaagcgcttggcagaatcttgtacttcgtgtccacaatggtactgaatttgcatctgcacagtcagcagagataacaagtgttgaactgaccttgccacatgcttagtgagtgatttgtaattaagtttatagactcagaaggtatattaggacatttggaatcagtagcagagcaaagcctctttgaaaaaaaccacgtagctgattgggttttacaagagtgcatttgtctcccccttccacccgtggggccccaccttcaggtcttagtggttcacaagagcccagcagccaggctggctttttcattgtagggcgtggttgtcccagctggtgtagatttcaggccgccccccccaactccctgcccacagtgttgcagattgcctggctggcagcaagtccagaccacccaaatttggttggattcttcatttctccactgtagttggggtccattgattgtgcaggggaacgtgcaggaggtttttctaggcaccgtgttcagtgctgcttcactctaccagagattatggccaaattgcacggaatttggtttcttgccctctgaagcctgagggcccccccttgcctggctggttgacagacccggggtggtcactgctgagacttcagagatcgcagctgctgtgagaatacggtgaaggtactttgttctggaagatgttgtcatacacttttccccagttattttcaaacttgacatgagcctatgttgactcactgggtgggggtcccttcttacgcagcacacgtggcaagtgcctgaatcggggctggaggcacttcagagcctctgaggggccaccacttctggcccaaaattgcagggttgtagatgaggctgcctgtggagaactggtgtgaggaggaagctgtttccaacaaagagcactttcatctgttgagatggctgtggtgagcaactgaacgagcctacgtgtgtacctgaattttccccgtaactcatttcttccatatgaagaaacaccaaactatgtacagagaactttttacaaaaggcagaccttttttaagctgtgtaacccacatagcctaaccacctggcagaatgactacgaataggggtcattgtgctggtaaaagcctctattacgactgtaagtaagttggatgttggcaaaattaaattgttacagtatttagagctgctgtagctgttccttcacaacataaaataggataaatgactagtacgtctttcaggtgggtggcaagcagaacatgcgtaatattctctacctggtctgtagctgtaactgtgatgtacagacaaagcaaaaattaaaagaacttatgaaaacaaatgcaatgatactaggatatacacttttgtatttttattcttatataaggttatttgctggctattgttggcctctagttcagtctgtgttatttaaattctaatatatgaattatttgaattgaattcatgttcggggccacgttgttgtatgtattgatgtacagccttgaatgtgaataattattgtaaactatattttacaactttttttctggctttattatataaattttctattgggtcagtgatttaatcatataatttaatgaatctgtttatcctttttttttttccaaatacttgtgctttaggtgtagttaccagatgatgaattttcctcgtatggtcagtagtcttgtaataaaaagcatgtagagtgtaaaaaaaaaaaaaaaaaaa

SEQ ID NO: 1042 - DNA, 5756 bp, Homo sapiens
taggcaggcggctgagccggcggcgggtggcctgcccaacgtgtgctgggtgggagaaggcgaggcgtcagcgatgctgtctcttccgtgaggagcgcagaggaggtcgcggcgccggaggccccagaaggctcgaaggcgccgcgggctggggtcggtggcttagggagcccgtccggccatggtggccgcgggtggtggttggcgcggctgcgctgcggcccggggcagtgcggagccgggacagtcgcggcgctgacgcccgcgggccccagctgcagatatgaagcggagccgctgccgcgaccgaccgcagccgccgccgcccgaccgccgggaggatggagttcagcgggcagcggagctgtctcagtctttgccgccgcgccggcgagcgccgcccgggaggcagcggctggaggagcggacgggccccgcggggcccgagggcaaggagcaggatgtagtaactggagttagtcccctgctcttcaggaaactcagtaatcctgacatattttcatccactggaaaagttaaacttcagcgacaactgagtcaggatgattgtaagttatggagaggaaacctggccagctctctatcgggtaagcagctgctccctttgtccagcagtgtacatagcagtgtgggacaggtgacttggcagtcgtcaggagaagcatcaaacctggttcgaatgagaaaccagtcccttggacagtctgcaccttctcttactgctggcctgaaggagttgagccttccaagaagaggcagcttttgtcggacaagtaaccgcaagagcttgattgtgacctctagcacatcacctacactaccacggccacactcaccactccatggccacacaggtaacagtcctttggacagcccccggaatttctctccaaatgcacctgctcacttttcttttgttcctgcccgtaggactgatgggcggcgctggtctttggcctctttgccctcttcaggatatggaactaacactcctagctccactgtctcatcatcatgctcctcacaggaaaagctgcatcagttgcctttccagcctacagctgatgagctgcactttttgacgaagcatttcagcacagagagcgtaccagatgaggaaggacggcagtccccagccatgcggcctcgctcccggagcctcagtcccggacgatccccagtatcctttgacagtgaaataataatgatgaatcatgtttacaaagaaagattcccaaaggccaccgcacaaatggaagagcgactagcagagtttatttcctccaacactccagacagcgtgctgcccttggcagatggagccctgagctttattcatcatcaggtgattgagatggcccgagactgcctggataaatctcggagtggcctcattacatcacaatacttctacgaacttcaagataatttggagaaacttttacaagatgctcatgagcgctcagagagctcagaagtggcttttgtgatgcagctggtgaaaaagctgatgattatcattgcccgcccagcacgtctcctggaatgcctggagtttgaccctgaagagttctaccaccttttagaagcagctgagggccacgccaaagagggacaagggattaaatgtgacattccccgctacatcgttagccagctgggcctcacccgggatcccctagaagaaatggcccagttgagcagctgtgacagtcctgacactccagagacagatgattctattgagggccatggggcatctctgccatctaaaaagacaccctctgaagaggacttcgagaccattaagctcatcagcaatggcgcctatggggctgtatttctggtgcggcacaagtccacccggcagcgctttgccatgaagaagatcaacaagcagaacctgatcctacggaaccagatccagcaggccttcgtggagcgtgacatactgactttcgctgagaacccctttgtggtcagcatgttctgctcctttgataccaagcgccacttgtgcatggtgatggagtacgttgaagggggagactgtgccactctgctgaagaatattggggccctgcctgtggacatggtgcgtctatactttgcggaaactgtgctggccctggagtacttacacaactatggcatcgtgcaccgtgacctcaagcctgacaacctcctaattacatccatggggcacatcaagctcacggactttggactgtccaaaattggcctcatgagtctgacaacgaacttgtatgagggtcatattgaaaaggatgcccgggaattcctggacaagcaggtatgcgggaccccagaatacattgcgcctgaggtgatcctgcgccagggctatgggaagccagtggactggtgggccatgggcattatcctgtatgagttcctggtgggctgcgtccctttttttggagatactccggaggagctctttgggcaggtgatcagtgatgagattgtgtggcctgagggtgatgaggcactgcccccagacgcccaggacctcacctccaaactgctccaccagaaccctctggagagacttggcacaggcagtgcctatgaggtgaagcagcacccattctttactggtctggactggacaggacttctccgccagaaggctgaatttattcctcagttggagtcagaggatgatactagctattttgacacccgctcagagcgataccaccacatggactcggaggatgaggaagaagtgagtgaggatggctgccttgagatccgccagttctcttcctgctctccaaggttcaacaaggtgtacagcagcatggagcggctctcactgctcgaggagcgccggacaccacccccgaccaagcgcagcctgagtgaggagaaggaggaccattcagatggcctggcagggctcaaaggccgagaccggagctgggtgattggctcccctgagatattacggaagcggctgtcggtgtctgagtcatcccacacagagagtgactcaagccctccaatgacagtgcgacgccgctgctcaggcctcctggatgcgcctcggttcccggagggccctgaggaggccagcagcaccctcaggaggcaaccacaggagggtatatgggtcctgacacccccatctggagagggggtatctgggcctgtcactgaacactcaggggagcagcggccaaagctggatgaggaagctgttggccggagcagtggttccagtccagctatggagacccgaggccgtgggacctcacagctggctgagggagccacagccaaggccatcagtgacctggctgtgcgtagggcccgccaccggctgctctctggggactcaacagagaagcgcactgctcgccctgtcaacaaagtgatcaagtccgcctcagccacagccctctcactcctcattccttcggaacaccacacctgctccccgttggccagccccatgtccccacattctcagtcgtccaacccatcatcccgggactcttctccaagcagggacttcttgccagcccttggcagcatgaggcctcccatcatcatccaccgagctggcaagaagtatggcttcaccctgcgggccattcgcgtctacatgggtgactccgatgtctacaccgtgcaccatatggtgtggcacgtggaggatggaggtccggccagtgaggcagggcttcgtcaaggtgacctcatcacccatgtcaatggggaacctgtgcatggcctggtgcacacggaggtggtagagctgatcctgaagagtggaaacaaggtggccatttcaacaactcccctggagaacacatccattaaagtggggccagctcggaagggcagctacaaggccaagatggcccgaaggagcaagaggagccgcggcaaggatgggcaagaaagcagaaaaaggagctccctgttccgcaagatcaccaagcaagcatccctgctccacaccagccgcagcctttcttcccttaaccgctccttgtcatcaggggagagtgggccaggctctcccacacacagccacagcctttccccccgatctcccactcaaggctaccgggtgacccccgatgctgtgcattcagtgggagggaattcatcacagagcagctcccccagctccagcgtgcccagttccccagccggctctgggcacacacggcccagctccctccacggtctggcacccaagctccaacgccagtaccgctctccacggcgcaagtcagcaggcagcatcccactgtcaccactggcccacaccccttctcccccacccccaacagcttcacctcagcggtccccatcgcccctgtctggccatgtagcccaggcctttcccacaaagcttcacttgtcacctcccctgggcaggcaactctcacggcccaagagtgcggagccaccccgttcaccactactcaagagggtgcagtcggctgagaaactggcagcagcacttgccgcctctgagaagaagctagccacttctcgcaagcacagccttgacctgccccactctgaactaaagaaggaactgccgcccagggaagtgagccctctggaggtagttggagccaggagtgtgctgtctggcaagggggccctgccagggaagggggtgctgcagcctgctccctcacgggccctaggcaccctccggcaggaccgagccgaacgacgggagtcgctgcagaagcaagaagccattcgtgaggtggactcctcagaggacgacaccgaggaagggcctgagaacagccagggtgcacaggagctgagcttggcacctcacccagaagtgagccagagtgtggcccctaaaggagcaggagagagtggggaagaggatcctttcccgtccagagaccctaggagcctgggcccaatggtcccaagcctattgacagggatcacactggggcctcccagaatggaaagtcccagtggtccccacaggaggctcgggagcccacaagccattgaggaggctgccagctcctcctcagcaggccccaacctaggtcagtctggagccacagaccccatccctcctgaaggttgctggaaggcccagcacctccacacccaggcactaacagcactttctcccagcacttcgggactcacccccaccagcagttgctctcctcccagctccacctctgggaagctgagcatgtggtcctggaaatcccttattgagggcccagacagggcatccccaagcagaaaggcaaccatggcaggtgggctagccaacctccaggatttggaaaacacaactccagcccagcctaagaacctgtctcccagggagcaggggaagacacagccacctagtgcccccagactggcccatccatcttatgaggatcccagccagggctggctatgggagtctgagtgtgcacaagcagtgaaagaggatccagccctgagcatcacccaagtgcctgatgcctcaggtgacagaaggcaggacgttccatgccgaggctgccccctcacccagaagtctgagcccagcctcaggaggggccaagaaccagggggccatcaaaagcatcgggatttggcattggttccagatgagcttttaaagcaaacatagcagttgtttgccatttcttgcactcagacctgtgtaatatatgctcctggaaaccatcaaaaaaaaaaaaaaaaaa

SEQ ID NO: 1043 - DNA, 4352 bp, Homo sapiens
gagggccctctttgtggctgcagttggcaagatggcgccggtgggggtggagaagaagctgctgctaggtcccaacgggcccgcggtggcggccgccggcgacctgaccagtgaggaggaggaaggccagagcctatggtcctccattctgagcgaagtgtccacccgcgccaggtccaagctgccgtccggcaagaacatcctggtcttcggtgaagatggttctggtaaaacaaccctcatgactaaactacaaggagctgagcatggcaaaaaaggaagaggcctagaatatctctacctcagtgtccatgatgaggaccgagatgatcacacgcgctgcaacgtgtggattctggatggagacttgtaccacaaaggcctgctgaaatttgcagtttctgctgaatccttgccagagaccctcgtcatttttgttgcagacatgtctagaccttggactgtgatggaatctctgcagaaatgggctagtgttttacgtgagcacattgataaaatgaaaattccaccagaaaaaatgagggagctggaacggaagtttgtgaaagattttcaagactatatggaacctgaagaaggttgtcaaggttccccacagagaagaggccctctgacctcaggctccgatgaagaaaatgttgccctgcctctgggtgacaatgtgctgactcataacctggggatcccggtgttggtggtgtgcacaaagtgtgatgcggtgagtgtcctggagaaggagcacgattacagggatgagcatttggactttatccagtcacacctgcggaggttctgccttcagtatggagctgccttgatttacacatcagtgaaagaagagaaaaacctcgacttgttgtataagtatattgttcataaaacatacggtttccacttcaccacacctgccttagttgtggaaaaggatgccgtttttatacctgcaggctgggacaatgaaaagaaaatagctattttacatgaaaattttacaaccgtgaagccggaagatgcatatgaagactttattgtgaaacctcccgtgagaaagctggtccacgacaaagagttggcagcagaagatgagcaggtgttcctaatgaagcaacagtcactccttgccaagcaaccagccactcccacgagagcttctgaatctcctgcaagaggaccctctggctctccaaggacccagggtcggggagggccagccagtgtgcctagctcctccccaggcacgtcagtaaaaaagccggacccaaacatcaaaaataatgcagcaagtgaaggggtgttggccagcttcttcaacagtctgttgagtaaaaagacaggctctcctggaagtcctggtgctggtggggtgcagagcacagccaagaagtcaggacaaaagactgtgttgtcaaatgttcaggaagaactggatagaatgactcgaaagccagactctatggtaacaaactcttcaacagaaaatgaagcctgaacctccttaaaaagtgcatatgtcgaatgaccaaataactatgtatattgatctgctaagaccaggatttttctgatatggcacatgctatcagttttttggggcaggggagatgaactttaaaaaaaaaaaaaaaacttcattggcttgtccgagtgtgaaatgcacatttaggaaggttacatgtcagaccctttgttaaggataacccttggactctggggcatgtggctcttttgtgggaggcaagcacatctgggcttcttgtggaggggaaggtagagtgaaagaaagagggcccactttctaacagggtggagcaaatgagaccaagaaatcattggtaagatgatggttagtctgaccagtttcatgttagtaaattcacttgttcttgggaagcagattaagtagcagaaagtccaggaaagaaagaccagaaggagtaatgagacaagtgatggtggggaagctgaatgttgagggaggtggaggaaggaggagatgagcagtgtcagtaaatactgtgcattcagtagaagttgaagaatcattgttagaagcatttccaaacaaaacactaagcaaaatgggaattaggcttattttgaatgcatctttaacttacgaaagatgtactaattgtgggggtgcctgagtcaggcggagctgacccaggggtgggaacgatggcagctgcccaggacccatgtgcttggcccaggctatgtcctcgtgagaggtactggggtccacggatatgtgttgtggggcagacagtcactgtgggatgtcttcaaagtcagcagttacagaattagtttactttgaattttgttgtctaaatagctcctgctttattttttaaattaaattttttgtttttactatcacaggctggcctaactaatacaaaataggtgatgaacctctggttttaccataatgcaatgtgccacggaaagtttgggggaggtttttaatgtaattgcactctggttaattggctcgtaccaagccctgccttatgacttgtggaaagcttcaaggagttccactgatgcaaaagggtcttttcctagcttcctggtctgatcagtgctatgagatggacagataagtgtgaatgttttatacagaaaatggaaatgatacatttctcttgttaggtgttttcataaaatgtagcattttttttcttatggaaataagagtttcaggtgtctccccacctagggcaaattcatgcacattgtcatgttataccaccattctggaaatgatttctgtggatttgaaattgcacttttaattttatatatgacagcatttaaatgcaaacactaccatgaatttaatgtataaaatgttgtcaaaccaagggaaaaaaccacagttcaccatgtggagtttactttttttatatgaatgtttgttgtactgtgtctaagcataacttccctaatgtcattacttttacataccagatttgactgaccactaatgtagtactggggataacttaatatcctatgttgtgtcaagactctttgaagactttcttgaattgctttcgtaaaggtctgaacactgttaaggagaaagctgagtatcaacttgcctttctgatagaaatgtttcttgtgccagttttattgttgagatatactatttttttccttttttaattcagttttttaaaaaaacaaatgtattgtggcttccagttaccaggttgtctaggtaatgacagtaaactgactgtagaatgataattgtggtatagtgaccaatagatgccaaacagcttgtggcctcactaaaggtggggtcgcttagtccccgggagtaaaatgagtgacctcagaaacaagaattcctggaaaggcacatgccgaagaggaatatggtataattttaaattttaatgcaaaattttaatttgtctttattttttatcatttgaactgataagcactttttgtgtcaatataaaatatactaaaactgatgaaatgctaagacatgtcttgtgaaggaaggtttcttggagaccacttttatttactcatgagaagtggaagctcctagtatcagaagaagctgatacatagtgtcatgtgctcagtggttgccaaagtctaccaactttggggagctgcagggttctttttgggaggtgggaggaagggagatgagttttgttattttggggttttcaagcattggaaccaaaggccaaataataaacagcctttagtttttaaagtaaaattcattttatttgcagagtacacttgtatggtagactgttaaagacaattttatgactatttatgcacattataatggttacatctgctttttgtctttaaaataaaaaaaaaaatcagagaaaagcccacctttgaatacgtggctgaagataacagccaagaattggtctttcctaaaaatgcaacagataatgctgctagattgttattttgtttgcacttttttttgattggcattttaaaatcggtatttaaactgaagacattgtcatgttttattaatttaacaaagttgaaagtgactgctctgtacatcatgaccttaacaatgttaatgctgtaagtgaaagttcactgtcgtctgtatactaaatttattggtgtttctaacttaaaagtaagactgcagattatcccccaccagccttagtccaggggtgtggctctgtccgggtgcagtatgcagtcatgtggaaccttgctttctagtcctgggaaaaaaagatgtctctaattactggcttcaataaacacgaatccagactgcttaaaaaaaaaaaaaaaaa

SEQ ID NO: 1044 - DNA, 1840 bp, Homo sapiens
ctcttatataaattctaaaaattgatgttctaagaagagaggtagaatttgaatgactgggttacttcctagactcttcctccttctcttaagtacagtatagttctttctctgaaaatcttcagtctcttagttccagatgggttctctatggtaagaatacaggacatgtagaaggccctaggggaatgctttcttccccagatctttgccctgtagtaggtttcagctgagcaaggacgagtagtttttctggtgtttggcctcctctgttgggtggaaaaagactttcttctctattttcctagttatatatgctatcatatgtctgtttttctcctcttgaagtttccctgaaacctgggctcttgaagacgcatcactggagcagatggataatggagactggggctatatgatgactgacccagtcacattaaatgtaggtggacacttgtatacaacgtctctcaccacattgacgcgttacccggattccatgcttggagctatgtttgggggggacttccccacagctcgagaccctcaaggcaattactttattgatcgagatggacctcttttccgatatgtcctcaacttcttaagaacttcagaattgaccttaccgttggattttaaggaatttgatctgcttcggaaagaagcagatttttaccagattgagcccttgattcagtgtctcaatgatcctaagcctttgtatcccatggatacttttgaagaagttgtggagctgtctagtactcggaagctttctaagtactccaacccagtggctgtcatcataacgcaactaaccatcaccactaaggtccattccttactagaaggcatctcaaattattttaccaagtggaataagcacatgatggacaccagagactgccaggtttcctttacttttggaccctgtgattatcaccaggaagtttctcttagggtccacctgatggaatacattacaaaacaaggtttcacgatccgcaacacccgggtgcatcacatgagtgagcgggccaatgaaaacacagtggagcacaactggactttctgtaggctagcccggaagacagacgactgatctccgaccctgccacaggttcctggaaagactctccaggaaatggaagatactgatttttttttttaaatcacagtgtgagatattttttttcttttaaatagttgtatttatttgaaggcagtgaggaccagaaggaagttttgtgctttggcagactcctccatgttttgttcccttccccctgagtatgcatgtgcctgttcagagtctccagataccttttttataaaaagaagtctgaaaatcattatggtatataatctacccttaacagagcttttcttattacagtgctaaaatgatttctgataaaatggtccctaactcaactagaaggctaaaaatacaagaatgaaagaataagcagagtactcatgatgcctttgagaaaaatcaaaacatcatgtagggtgacctagtttccaaaccaataaataagtagtattgtaatattaaaggaaaactgttccaatcatttaaaagtacttattaagtactgctttttacagttatgacaactgtttctttctatgcatataaatcaaggaaccaaatatctgtagccatggaaatgtctgactagaaatatttatattgaattctgaatacaaaatgtccctgtggtagaaaacttactctttatgcctggtgcagtataattcccaagtgtactgtctaccagaaaaaaaaaacaaaactaataaaaaatgaaatatgaaaattaaaaaaaaa

SEQ ID NO: 1045 - DNA, 1860 bp, Homo sapiens
acgtcagaaaaaaaaaaaaaaagtttgcagaatgtcccacaccgaaaaaaaaaaaaaatccgaaaccgagcgaaaaaaacctgcgagtgggcctggcggatgggattattaaagcttcgccggagccgcggctcgccctcccactccgccagcctccgggagaggagccgcacccggccggcccggccccagccccatggacctccgagcaggggactcgtgggggatgttagcgtgcctgtgcacggtgctctggcacctccctgcagtgccagctctcaatcgcacaggggacccagggcctggcccctccatccagaaaacctatgacctcacccgctacctggagcaccaactccgcagcttggctgggacctatctgaactacctgggcccccctttcaacgagccagacttcaaccctccccgcctgggggcagagactctgcccagggccactgttgacttggaggtgtggcgaagcctcaatgacaaactgcggctgacccagaactacgaggcctacagccaccttctgtgttacttgcgtggcctcaaccgtcaggctgccactgctgagctgcgccgcagcctggcccacttctgcaccagcctccagggcctgctgggcagcattgcgggcgtcatggcagctctgggctacccactgccccagccgctgcctgggactgaacccacttggactcctggccctgcccacagtgacttcctccagaagatggacgacttctggctgctgaaggagctgcagacctggctgtggcgctcggccaaggacttcaaccggctcaagaagaagatgcagcctccagcagctgcagtcaccctgcacctgggggctcatggcttctgacttctgaccttctcctcttcgctcccccttcaaaccctgctcccactttgtgagagccagccctgtatgccaacacctgttgagccaggagacagaagctgtgagcctctggccctttcctggaccggctgggcgtgtgatgcgatcagccctgtctcctccccacctcccaaaggtctaccgagctggggaggaggtacagtaggccctgtcctgtcctgtttctacaggaagtcatgctcgagggagtgtgaagtggttcaggttggtgcagaggcgctcatggcctcctgcttcttgcctaccacttggccagtgcccacccagcccctcaggtggcacatctggagggcaggggttgaggggccaccaccacacatgcctttctggggtgaagccctttggctgccccactctccttggatgggtgttgctcccttatccccaaatcactctatacatccaattcaggaaacaaacatggtggcaattctacacaaaaagagatgagattaacagtgcagggttggggtctgcattggaggtgccctataaaccagaagagaaaatactgaaagcacaggggcagggacagaccagaccagacccaggagtctccaaagcacagagtggcaaacaaaacccgagctgagcatcaggaccttgcctcgaattgtcttccagtattacggtgcctcttctctgccccctttcccagggtatctgtgggttgccaggctggggagggcaaccatagccacaccacaggatttcctgaaagtttacaatgcagtagcattttggggtgtagggtggcagctccccaaggccctgccccccagccccacccactcatgactctaagtgtgttgtattaatatttatttatttggagatgttatttattagatgatatttattgcagaatttctattcttgtattaacaaataaaatgcttgccccagaaaaaaaaaaaaaaaaaaaa

SEQ ID NO: 1046 - DNA, 976 bp, Homo sapiens
gcgcagtctgcgcagggactggcgggactgcgcggaggcgtctacagacttgtcggggttccggggcttgtcgcggttgccaagcgctcggcgcttggcgctggcgctggccaaggcgtggccaacagtgttgcaaacaggaacccgaggtgttcacttcactgttgaaggaacgagagggcatctgctaaagtttcagattccatttctgctcagtatccagtagtggatcatgaatttgatgcagtggtggtaggcgctggaggggcaggctttgcgagctgcatttggcctttccgaggcagagtttgatacagcatgtgttaccaagctgtttcctaccaggtcacacactgttgcagcgcaggttggaatcaatgctgctctggggaacatggaggaggacaactggaggtggcatttctatgacaccgtgaagggctccgactggctgggggaccaggatgccatccactacgtgacggagcaggcccccactgccatggtcgaggtagaaaattatggcatgccgtttagcagaactgaagatgggaagatttatcagcgtgcatttggcggacacagcctcaagtttggaaagggcaggcaggcccatcggtgctgctgtgtggctgatcggaccggccactcaatattgcacaccttatatgggaggtctctgcgatatgataccagctgttttgtggagtattttgccttggatctcctgatggagaatggggagtgccgtggtgtcttcgcactgtgcatacaggacgggtccatccatcgcataagagcaaagaatactattgttgccacagggtacttgggaggctgaggcagaagaatcacttgaacttgggagccagaggttgccgtgagccgagattgtgccaccgtactccagcctgggcgacaagagttagaccctatctcaaaataaataaataaataaaataaaaaaaaaaaaaaa

SEQ ID NO: 1047 - DNA, 1186 bp, Homo sapiens
gatgtccggctggagctgtcgcctccgccgccgctgctgccggtgccggttgtgagcgggtctccagtcggctcctctgggcgtctcatggcctctagcagctccctggtgcccgaccggctgcgcctgccgctctgcttcctgggtgtctttgtctgctatttttactatgggatcctgcaggaaaagataacaagaggaaagtatggggaaggagccaagcaggagacgttcacctttgccttaactttggtcttcattcaatgtgtgatcaatgctgtgtttgccaagatcttgatccagttttttgacactgccagggtggatcgtacccggagctggctctatgctgcctgttctatctcctatctgggtgccatggtctccagcaattcagcactacagtttgtcaactacccaactcaggtccttggtaaatcctgcaagccaatcccagtcatgctccttggggtgaccctcttgaagaagaagtacccgttggccaagtacctgtgtgtgctgttaattgtggctggagtggcccttttcatgtacaaacccaagaaagttgttgggatagaagaacacacagtcggctatggagagctactcttgctattatcgctgaccctggatggactgactggtgtttcccaggaccacatgcgggctcattaccaaacaggctccaaccacatgatgctgaacatcaacctttggtcgacattgctgctgggaatgggaatcctgttcactggggagctctgggagttcttgagctttgctgaaaggtaccctgccatcatctataacatcctgctctttgggctgaccagtgccctgggtcagagcttcatctttatgacggttgtgtattttggtcccctgacctgctccatcatcactacaactcgaaagttcttcacaattttggcctctgtgatcctcttcgccaatcccatcagccccatgcagtgggtgggcactgtgcttgtgttcctgggtcttggtcttgatgccaagtttgggaaaggagctaagaagacatcccactaggaagagagagactacctccacatcaagaatatttaagttattatctcaaacagtgacatctcttgggaaaatggacttaataggaatatgggactgagttccagtcttttttaataaaataaaatcaagc

SEQ ID NO: 1048 - DNA, 1920 bp, Homo sapiens
attatgaggagcaagaacgcgaaggggcctcgggtccgctaggccgggatccggagccgcccgaagccggtgccgcagccccctgcgcccccggtgcccccgacatgtccttccgcaaagtggtccggcagagcaaattccggcatgtgttcgggcagccggtcaagaacgaccagtgctatgaggacattcgcgtgtcccgtgttacctgggacagcaccttctgcgccgtcaaccccaagttcctggcggtgattgtggaggccagtggagggggtgcctttctggtgctccccctaagcaagacgggccgcattgacaaggcctacccgacggtgtgtgggcacacgggacctgtcctggacatcgactggtgtcctcacaacgacgaagtcatagccagcggctcggaggactgcacggtcatggtgtggcagatcccagagaacgggctgacctccccgctgacagagccggtggtggtactggaggggcacaccaagcgagtgggcatcatcgcctggcaccccacggcccgaaacgtgctgctcagtgcaggctgcgacaacgtggtactcatctggaatgtgggcacagcggaggagctgtaccgcctggacagcctgcaccctgacctcatctacaatgtcagctggaaccacaatggcagcctgttttgctcagcatgcaaggacaagagcgtgcgcatcatcgacccccgtcggggcaccctggtggcagagcgggagaaggctcatgagggggcccggcccatgcgggccatcttcctggcagatggcaaggtgttcaccacaggcttcagccgaatgagcgagcggcagctggcgctctgggacccagaaaacctcgaggaacccatggccctgcaggaactggactcgagcaacggggccctgctgcccttctacgaccccgacaccagtgtggtctacgtctgcggcaagggtgactccagcatccggtactttgagatcacagaggagcctccctacatccacttcctgaacacgttcaccagcaaggagccgcagcggggtatgggcagcatgcccaagcggggcctggaggtcagcaagtgcgagatcgcccggttctacaaactgcatgagcgcaagtgtgagcccatcgtcatgactgtgccaagaaagtcggacctcttccaggatgatctgtaccccgacacagccgggcccgaggcagccctggaggctgaggagtgggtgagcgggcgggatgccgacccgatcctcatctcactgcgggaggcctacgtgcccagcaagcagcgggacctgaagatcagccggcgcaacgtgttgtctgacagccggcccgccatggccccgggctcctcccacctaggggcccccgcctccaccaccactgctgctgatgccacccccagcggcagcctggccagagccggggaggctgggaagctggaggaggtgatgcaggagctgcgggccctgagggcgctggtcaaggagcagggcgaccgcatctgccgcctggaggagcagctgggccgcatggagaacggggatgcgtagggccacagccacacgccaccttcatctcctccgccgcccccttcccactcagcttctgccagcgggtcgcaccgggctagctggctgcccagagcctctgaggcagcgcaggggtcagttcccacccccacccgtcccaggcccaggccgaagccagcgcccagctttcctcactgttcctgtggaggatgtctacgcccaggcgagctcctcgacctctgagggaccatctccccgaccactgcccagccctctgctccctccccagaggaggcgggagggtgggctctatattttcattccaaataaaattctctttctaaaagccaaaaaaaaaaaaaaaaaa

SEQ ID NO: 1049 - DNA, 2430 bp, Homo sapiens
gccagaggaacgccagcgaccccagcagcgctgcggacggtgctggccgtggccgctgcggcccccgtgtccaggtgggccaggacgcagcctctgggcgccgtcgcttttccagcatcgcagaggcaaaagcgtggcagtgggacccaaaaggtaggactgaggctctagaacttgcacctgtgcagggactgcaaaccagacctgggaggaccctttcagcagcccccactccaccctatcccaggacttcccagcgacccgccgttctgggagataccgggagcgtgatcagggggcggggccgtttccaaggcaaccgcttatttgcatagggtcccgtcctggccaacgagggcgccccaaatgttcaggacatagaagaaggggttaactggcccggatctcctcctcgccttccaagcccgctaagcactggggttatctacccattccccagaaggggagactgaggcagcccaccagccaaaggaggcgaccagactggggctgcgttttaccatttcagaagcggcttgagctggtctgagctataataataaacactggcggtggaggcgagggcgaccacagggctgaggtcagggctaggattccggtgtctctacgtaggttgcttgaatggggggcaccctggcatggacgctgctgttgccgctgctgctgcgggagtcagacagcctagaaccgtcgtgcaccgtgtcctccgcggatgtggactggaacgcggagttcagtgccacgtgcctgaatttcagtggcctcagcctgagcctgcctcacaaccagtctctgcgggccagcaacgtgattctccttgacctgtctgggaacggcctgcgagagcttccagtgaccttctttgcccacctgcagaagcttgaggtcctgaacgtgctacgcaaccccttgtctcgtgtggatggggcgctggccgcccgctgtgaccttgacctgcaggccgactgcaactgtgccctggagtcctggcacgacatccgccgagacaactgctctggccagaagcctctgctctgctgggacacaaccagctcccagcacaacctctctgccttcctggaggtcagctgcgcccctggcctggcctctgcaactatcggggcagtggtggtcagcgggtgcctgcttcttggacttgccatcgctggccctgtgctggcctggagactctggcgatgccgagtggccagaagccgggagctgaacaaaccctgggctgctcaggatgggcccaagcccggtttaggcttgcagccacggtacggcagccggagcgcccccaagccccaagtggccgtgccatcctgcccctccactcccgactatgagaacatgtttgtgggccagccagcagccgagcaccagtgggatgaacaaggggctcacccttcagaggacaatgacttttacatcaactacaaggacatcgacctggcttcccagcctgtctactgtaacctgcagtcactgggccaggccccaatggatgaagaggagtacgtgatccccgggcactgagcctaagatgtcctaacctccacccagaaccccttcagtccctgctgggtgactcagggcgtcctaacgcctccatggcctcagtttccccatctgaagaatgggtacaggaaaggattgtccttgaggccccaggaagctctgccgccccctccctgtccctcatgccgctcctcagctccctcagctcctagagggggaagaggagagacccccaacaaggggacaggacggtcactgtgccaatcctgtcatcaccctcctgtggatgtacaggcagtgctcaataaatgcttcgaggctgatgaggctgctggctcagggtgcgtgggttcctcaaggtggggatttctgagttctaagaccaagtctccatctgagactcccaaattgctccccacctcccatccctgtttttttttgttgttgttgtttgtttgtttgtttttgaaactgagtgtcactctgtcacccaggctggagtgcaatgctgcggtctcagctcactgcaacctccgcctcctgggttcaagtgattctcctgcctcagcctcctgagtagctgggattacagcacccgccaccatgccgagctaatttttgtatttataatagagatggggtttcgccatgttggccaggctggtctcgaactcctgacctcaagcgatctgcccgcctcggcctcctgaagtgctgggattacaggcgtggccactgcgcccaggcacattcctcccttctgcccctctcagggccccttcccaggtccctgatctccaggcttggcctccagagcagcccacaccaaccccaaaataaaaaaatgtatatattcctttaaaaaaaaaaaaaaaaaaaaaaaaaaaa

SEQ ID NO: 1050 - DNA, 995 bp, Homo sapiens
gtatctgtggtaaacccagtgacacgggggagatgacatacaaaaagggcaggacctgagaaagattaagctgcaggctccctgcccataaaacagggtgtgaaaggcatctcagcggctgccccaccatggctacctgggccctcctgctccttgcagccatgctcctgggcaacccagcccctgcctccgcatctgcgtggtgaaggccattggccctcatcggtggatctgcgtttcctcgggcctacactgtctaggattgtgcggggctggtgagagaacaagatctcttctgtgttcaaggcagacttcctgccccctgcaccctgctctctcccaggccttgaggtcagtgtgagccccaagggcaagaacacttctggaagggagagtggatttggctgggccatctggatggaaggtctggtcttctctcgtctgagccctgagtactacgacctggcaagagcccacctgcgtgatgaggagaaatcctgcccgtgcctggcccaggagggcccccagggtgacctgttgaccaaaacacaggagctgggccgtgactacaggacctgtctgacgatagtccaaaaactgaagaagatggtggataagcccacccagagaagtgtttccaatgctgcgacccgggtgtgtaggacggggaggtcacgatggcgcgacgtctgcagaaatttcatgaggaggtatcagtctagagttacccagggcctcgtggccggagaaactgcccagcagatctgtgaggacctcaggttgtgtataccttctacaggtcccctctgagccctctcaccttgtcctgtggaagaagcacaggctcctgtcctcagatcccgggaacctcagcaacctctgccggctcctcgcttcctcgatccagaatccactctccagtctccctcccctgactccctctgctgtcctcccctctcacgagaataaagtgtcaagcaagattttaaaaaaaa

SEQ ID NO: 1051 - DNA, 3168 bp, Homo sapiens
acttccggcgctcgcaccgccccgctctccagccaaggctccgggctgaggcatttgcttggctgcagcctccttccgacctgcccggcgggacccaggggaccaagccgagccgagccgcggggcccgctccagcccggccatgagcgcggccgcatgatgcgtccctgcctcggccgctgcagtcgccgccgccgccgccgcaggccgggaggagccgcagcgccgggcgaccccgcccgggcctcggatccgatcacataggacagtatgcaccttaagatcctgaagaaacggcacaaaatgttcaagtgatgtttagaaataacttgtgagggtgcgtcagggaaatcatgcagccatcaggacacaggctccgggacgtcgagcatcatcctctcctggctgaaaatgacaactatgactcttcatcgtcctcctcctccgaggctgacgtggctgaccgggtctggttcatccgtgacggctgcggcatgatctgtgctgtcatgacgtggcttctggtcgcctatgcagacttcgtggtgactttcgtcatgctgctgccttccaaagacttctggtactctgtggtcaacggggtcatctttaactgcttggccgtgcttgccctgtcatcccacctgagaaccatgctcaccgaccctggggcagtacccaaaggaaacgctacgaaagaatacatggagagcttgcagctgaagcccggggaagtcatctacaagtgccccaagtgctgctgtattaaacccgagcgcgcccaccactgcagtatttgcaaaagatgtattcggaaaatggatcatcactgcccgtgggtgaacaattgtgtaggagaaaagaatcaaagattttttgtgctcttcactatgtatatagctctgtcttcagtccatgctctgatcctttgtggatttcagttcatctcctgtgtccgagggcagtggactgaatgcagtgatttttcacctccgataactgtaatcctgttgatcttcctgtgccttgagggtcttctgtttttcactttcactgcagttatgtttggcacccaaatccactccatatgcaacgacgagacggagatcgagcgattgaaaagtgagaagcccacatgggagcggaggctgcgatgggaagggatgaagtccgtctttggggggcccccctcactcctctggatgaatccctttgtgggcttccgatttaggcgactgcccacgagacccagaaaaggtggcccggagttctcagtgtgaggcgtggctcatcagactgaaacttgctcacagacttccagttatttatttggggtctgaaggatatcaacagctcatctgtgaccaacagggcaactggaacctacacaaaccaattgcttgcagcaagcagagttttatatatttatagtcacagatggcagaggaagaggctctcagtccccacctgtacaacaacggaaaggtgtgtggccacacgaagaagccaaacgccgtggcctcctgcagagctggggcttctgtggagaatacttcgggttattacatgggttattcaaatcctgggtcctgagctgctgtttccaatcatgaagaaaaacagtgaatccagtgaacagggattctccaagcagtcatttcagggggctcctgctgaccccgccactcagcagtgcactccccggatcacagcagggcgtttacatagaaagacgttttggtctcgattagctccgatgctttgcactgaagttgcaaaagatctgtgcactgaacagtgaaggtggcttccggcacactccccgctgccccggaagagacatcctttgaccctctcagcaagtctgtgtgtgtgcgtgtctgtgcgtgtgcgcgcgtgtgtgcatgtgtgtcaaaattgccagtgttgtttaggcaatgtaacatttaccggctgtgtacagcaaacaagctattttttagaaaccgacgtttcagggaagaggggagagagccgcggggtcctgcccgtggttactatgaatgtattgctgttggaggacatctcgatccaaagaacagccgttcctgtgcggcccttcgttgccctcctgctttcattttttaaagaaatcttgagtgcttgagggccttggaactgattttttttttttgttccagccaaattagcagtgtataaatggcacctaggtaagagcagagctgcggctcggtgacttgatacttggggcagcccgatgctgtgtgtggggcaggggaggcatccttactggagaggcagggcccagccattgggcacctctgggaaggggaggggaccatgaggcagccagcccctggcaggggcgactgtgccaccgcaggcagcgctccagtcgggaatggccaggatggcgccctcttgttggagtttttggttagcttttacgttttcttctccacccacggcacaggtgataaaataggatccttggtgcggagcttaaaattatgccagaaagccaacagctcccctcgtggggccttgccttaaacttgcctggtttgtacattttttgccggacgcatcaagaagcaatctgtgacaaagtctgagggtcttcctttatgcttgccctccacactaagagaagttggcgtctccctcctgggaattgttttgcctttctgttcatctgtgaactgttttttgtttttaattactctgtaccccatccgaatcagggcttctaccactgctgatgcaaaaccacaaagggacctacctgagccaccgtcctagccaagcgagcaaacctgcagggggtttggaagtggacttggtcaccgcagaagcgtgtgcgccgttgggggaagagctgcgtcacagccagagggacaaagtgtgggtgatcctggagacgccagtttccgagattgttctgcatattcatttgcacattgttgtctgggttggacatgcgtgtgggcttcagtgtgaggcttttaatatgtatatcctgttatcaataaaacaattatccaagtggttgaatcctgtgagacttggcaagtgtgtgcaaatcaagtatacttgacttttcaacctcttctttcaatgtaacttttatatgaaataaagtaatcaattaacagttctcaaaaaaaa

SEQ ID NO: 1052 - DNA, 3110 bp, Homo sapiens
ctcatatctagaattttgggaggtactttgaatcattacgatctatctacttcttaggtgaggaaatagaggtttaaaatttagtccacagtctcgcaaggatggagcctggatcaaattttgggttatcagattccaatcacgtttcttagcttttcttttttttttccaactccagtttctgtcttgctccaaaaaaggggaaggagcggctgcggcgctcggtttcccgcctcctagggaagggaagggagacgagcagcgcggaggctggggcccccttccgggcggggcctactagtgggcggggcctgtcagtgagcggcccctgcccggaaggagccagtccggggcggagccgatggccttacaggggccggaagtggcctgcgggcggagaagtgcctcaggagtcctgacgcagtgtcttgggcgctaacggcggcggcggccttgtgtttagactccagaactccccacttgccgcgttctcgccgccgcaggctcccgggacgatggtgccccgcctgctgctgcgcgcctggccccggggccccgcggttggtccgggagcccccagtcggcccctcagcgccggctccgggcccggccagtacctgcagcgcagcatcgtgcccaccatgcactaccaggacagcctgcccaggctgcctattcccaaacttgaagacaccattaggagatacctcagtgcacagaagcctctcttgaatgatggccagttcaggaaaacagaacaattttgcaagagttttgaaaatgggattggaaaagaactgcatgagcagctggttgctctggacaaacagaataaacatacaagctacatttcgggaccctggtttgatatgtacctatctgctcgagactccgttgttctgaactttaatccatttatggctttcaatcctgacccaaaatctgagtataatgaccagctcacccgggcaaccaacatgactgtttctgccatccggtttctgaagacactccgggctggccttctggagccagaagtgttccacttgaaccctgcaaaaagtgacactatcaccttcaagagactcatacgctttgtgccttcctctctgtcctggtatggggcctacctggtcaatgcgtatcccctggatatgtcccagtattttcggcttttcaactcaactcgtttacccaaacccagtcgggatgaactcttcactgatgacaaggccagacacctcctggtcctaaggaaaggaaatttttatatctttgatgtcctggatcaagatgggaacattgtgagcccctcggaaatccaggcacatctgaagtacattctctcagacagcagccccgcccccgagtttcccctggcatacctgaccagtgagaaccgagacatctgggcagagctcaggcagaagctgatgagtagtggcaatgaggagagcctgaggaaagtggactcggcagtgttctgtctctgcctagatgacttccccattaaggaccttgtccacttgtcccacaatatgctgcatggggatggcacaaaccgctggtttgataaatcctttaacctcattatcgccaaggatggctctactgccgtccactttgagcactcttggggtgatggtgtggcagtgctcagattttttaatgaagtatttaaagacagcactcagacccctgccgtcactccacagagccagccagctaccactgactctactgtcacggtgcagaaactcaacttcgagctgactgatgccttaaagactggcatcacagctgctaaggaaaagtttgatgccaccatgaaaaccctcactattgactgcgtccagtttcagagaggaggcaaagaattcctgaagaagcaaaagctgagccctgacgcagttgcccagctggcattccagatggccttcctgcggcagtacgggcagacagtggccacctacgagtcctgtagcactgccgcattcaagcacggccgcactgagaccatccgcccggcctccgtctatacaaagaggtgctctgaggcctttgtcagggagccctccaggcacagtgctggtgagcttcagcagatgatggttgagtgctccaagtaccatggccagctgaccaaagaagcagcaatgggccagggctttgaccgacacttgtttgctctgcggcatctggcagcagccaaagggatcatcttgcctgagctctacctggaccctgcatacgggcagataaaccacaatgtcctgtccacgagcacactgagcagcccagcagtgaaccttgggggctttgcccctgtggtctctgatggctttggtgttgggtatgctgttcatgacaactggataggctgcaatgtctcttcctacccaggccgcaatgcccgggagtttctccaatgtgtggagaaggccttagaagacatgtttgatgccttagaaggcaaatccatcaaaagttaacttctgggcagatgaaaagctaccatcacttcctcatcatgaaaactgggaggccgggcatggtggctcatgcctgtaatcccagcattttgagaggctgaggcgggtggatcacttgaggtcaggagtttgagaccaacctggccaacatggtgaaaccttgtctctactaaaaatacaaaaattagctgggtgtggtggcatgtgcctataatcccagctacttgggaggttgaagcagaattgcttgaacccaggaggtggaggttgcagtgagctgagatcacaccactgcactccggcctgggcgacagagcgagactgtctcaaaaaaacaaaaaagaaaaaaaaactggggcctgtgtagccagtgggtgctattctgtgaaactaatcataagctgcctaggcagccagctacaggcttgagctttaaattcatggttttaaagctaaacgtaatttccacttgggactagatcacaactgaagataacaagagatttaagttttaagggcatttaatcaggaggaaaggtttggaaaactaactcaggtgtatttattgtttaagcagaaataaagtttaatttttgcttgaaaaaaaaaaaaaaaaaa

SEQ ID NO: 1053 - DNA, 3023 bp, Homo sapiens
ggcgggacaaccgcggcgcggctcggcgctcccggcctggcgttgtggcgccgcagcccttgccaccttccctgcacctgccctgcccggcctcatgtaccgcgcgctgtacgcgttccgctcggcggagcccaacgcgctggcgttcgccgcgggcgagaccttcctggtgctagagcgaagcagcgcgcactggtggctggccgcgcgggcgcgcagtggtgagacgggctacgtgccgccagcctacctgcgccgcctgcagggcctggagcaggatgtcctccaggccattgaccgggccatcgaggctgtacacaacacagccatgcgggatggtggcaagtacagcctggaacagcgtggagtcctccagaagctgatccaccaccggaaagagaccctgtcacgcagaggcccttcagcctccagtgttgcagttatgacctcatcaaccagtgaccaccacttggatgctgctgcagccaggcagcccaatggggtgtgtcgagctgggttcgagcggcagcacagcctacccagttctgagcatcttggggcagatggaggcctctaccagatcccacttccatcttcccagatcccaccacagcctcgccgagcagcacccaccacaccgcccccaccagtgaagcgccgagaccgcgaggccctgatggcctctgggagtggtggccacaacaccatgccctccgggggtaactctgtgtccagcggctcctcagtcagcagcacctccctggacacgctctataccagctccagcccatctgaaccaggctccagctgctcacccacacccccacctgtgccccgccgaggcacccacaccaccgtgtcccaagtccagccccctccctccaaggcatcagcacctgaaccccctgcagaagaagaagtggcaactggtacaacctcagcctctgatgacctggaagccctgggtacactgagcctggggaccacagaggagaaggcagcagctgaggcggctgtgcccaggaccattggggccgagctgatggagctggtgcggagaaacactggcctgagccacgaattatgccgggtggccatcggcatcatagtgggtcacatccaggcctcggtgccggccagctcaccagtcatggagcaggtcctcctctcactcgtagagggcaaggacctcagcatggccctgccctcagggcaggtctgccacgaccagcagaggctggaggtgatctttgcagacctggctcgccggaaggacgacgcccagcagcgcagttgggcactatatgaggatgagggtgtcatccgctgctacctagaggagctgctgcatattctgactgatgcagaccctgaagtttgcaagaaaatgtgcaagagaaacgagttcgagtctgtcctggccttggtggcctattaccaaatggaacaccgagcatcactgcggctgctgctcctcaagtgctttggcgccatgtgcagcctggatgcagccatcatctccacgcttgtgtcatccgtgctgcctgtagagctggcgagggacatgcagacagacacgcaggaccaccagaaactctgttactctgccctcatcctggccatggtcttctccatgggagaggcagtgccctatgcacactatgagcacctgggcacgcctttcgcccagttcctactgaacatcgtcgaggatgggctgcccttggacaccacagagcagctgccggacctctgcgtgaacctgcttctggctctcaacctgcacctgccagctgctgaccagaatgtcatcatggctgccctgagcaaacacgccaatgtcaagatcttctccgagaagctgttgttgctcctgaacagaggggatgaccctgtgcgcatcttcaaacatgagccacagccaccacactctgtcctcaagttcctgcaggacgtgtttggcagcccggccacagctgccatcttctaccacacagacatgatggctctcattgacatcactgtgcggcacatcgcagacctgtcaccaggagacaagctgcgcatggagtacctctccctgatgcatgctatagtccgcaccacaccctacctgcagcaccgccaccggctacccgacctgcaggccatactgcgacgcatcctgaatgaggaggagacctcaccccagtgccagatggaccgcatgattgtccgagagatgtgcaaggaattcctggtgctgggggaggctcccagctagcaccttgctgtcctcccttccctgcagctccagtcagtgtgcaggggactcaggggcttggccctaagaatgttttgcactgacagtgggaggggataaggtggcagaaggaacctgagcaggacccccacctgaagtagaacttaagagaggggccaagtgtaggattggggaccatggtctgggagctgttctggggcagggggaatatgcaagctaaagcccctctataccctggtaggcttcctcttcagcatgcccccctcttcaccccacacccatgtgtacactcagagtcctgctgccgctccaggctggaccagacccccatccccacccctcctggtctgtatcctgggcctcagcaagccatgcccctggggtgaggggaggcatctcccaccagctctattctttgccttagctttgcagtgagtgctgctcatgtcctcccctccacccgcacatgggggtcgctgcccttcactcctacccccagaggccttggccaagctgctgctttgaaagcgggatcttggagacaggccatccatcctggagcctcatggaacaggatgatggcactgagaaagccaatgaccgaatctcttttctctgtaaaaatgtagactgaaaagccatgtgtattttcctatgtgctgtagctctcctttggaaataaatcacaggcatctggaaaaaaaaaaaaaaaaaaaaaaaaaaaaaaaaaaaaaaaaaaaaaaaaaaaaaaaaaaaaaaa

SEQ ID NO: 1054 - DNA, 5990 bp, Homo sapiens
ctgccacagacccgcgccaggacgaccctgcctccgcggctgtccctagccagggcccaacctggttctattaataactaagcaaactagaacacctcagccggaggctggggtgcgcggctgctgcacctgcagcctgaacccgggggtcctgacacgccgcattttgggctgggaccagctggagccggaagcggaggtgcagtgtggctagccggagaccggaagcggaagcgcgcttgtgtcttgtgagaagagccgcgcttgcagcgtctgggagaatctttcggtctccgcgagagacgaaaaaagtataattcaagctcagatttgtgttgaaaccagcctcaagtttcacctatcctcactgatccgtggacttctgtatgatcagggtgctgtcctgagagcgctgcgggataaaggaggagcgtcctgcttcccggctgccctgttgctgtcggagtcacaggatggcggctgtcgtcctgcccccaactgccgctctgtcttccctgttcccagcctctcagcgagaaggacacacagagggcggagagctggttaatgagctcctgaaaagctggctaaagggcttggtgacctttgaggatgtggccgtggagttcacccaggaggagtgggcattgctggaccctgcccaaaggacactgtacagggacgtgatgctggagaactgcaggaacctggcctcactggggaaccaagttgataaacctaggctgatctcccagctggagcaagaagataaagtgatgacagaagagagaggaattctctcaggtacctgtccagatgtggagaatccatttaaagccaaagggttaactcctaagctgcatgtttttcgaaaagaacaatctagaaatatgaaaatggagaggaatcatcttggagcaacactcaacgaatgtaatcagtgttttaaagtcttcagcacaaaatcttcccttacacggcacaggaagattcatactggagaaagaccctatggctgcagtgaatgtgggaaatcctacagcagtagatcttaccttgctgttcataagagaatccacaatggggagaaaccctatgaatgcaatgactgtgggaaaaccttcagcagcagatcttaccttactgttcataagagaatccacaatggggagaaaccctacgaatgcagtgactgtgggaaaaccttcagcaattcctcatacctcagaccgcacttgagaattcacactggagaaaaaccgtacaaatgtaaccagtgttttcgtgagttccgcactcagtcaatcttcacaaggcacaagagagttcatacgggggagggtcattatgtatgtaatcagtgtggaaaggctttcggcacgaggtcatctctttcttcgcactatagcattcatacaggggagtacccttacgaatgccacgattgtgggagaaccttcaggaggaggtcgaatctgacacagcacataagaactcatactggagaaaaaccctacacatgtaatgagtgtgggaaatcctttaccaatagcttttctcttacaattcacaggagaatacataatggagagaaatcctatgagtgcagtgattgtggaaaatcctttaatgttctctcatccgttaagaaacacatgagaactcacactggaaaaaaaccctatgaatgtaattattgcgggaaatccttcacaagtaactcctacctttctgtgcatacgagaatgcataataggcaaatgtgaattcaataactgtgggaaaagcattcattgatctttcatgcctcagataacatgagcaaactctaacaagatgtatgaatcacctgctactgtgtaacaaattaccccccaaaattttgtggcttcaaacaaaaacacttgttatctcaaaatttttgtaggtcaggaattcagaaacaacatagctctatagttcttcaggatatctcaagaggttacagtccagatgtcagcagaactgtaatcatccagaattgttactggtgaagggaccacttccaaatggcttacaagcccgacaagtgcatgctagctgtttccaagggagctgcgcttccaaatcacgtaggcctctcaacagggctgagtttctttatggaagcaacttctccccaaagccagtgatctaaaggagccaacacagaaagcataatgtcttttatgacctagcttcagtgagatatgttttcatgtccctgttacattggtcatacacaccaatcctgatacaatgtggaagaacaccacaggaggtatgaacagtagacatttggaaccatctggaaaacttgccatgaaatcagtggaggaaagccttcagctgaccctcatttttttttttttaagacaatgtctcactctgtcacccagtctggagcgcagtggtgtgatcacagctcactgcagcctctacttcctgggatcaagtaattctcctgccccagcctccaatgtagctgggactacaggtgcatgacaccatgtctggctaatttgtttttttttaaactagagggagggttttgccatgttgcccagactagtctcaaactcctaggttcaagcagtcctttcatcttggcctccagaagtactgggattacaggcatgaaccaccatgcccagccaacttctaaactgatcaatatgggagtagcattcaatcacccacaggttaactcactctagagagaaatcttgtgagtgtaatctgtatggtaaaactttgagctcaaactttccccctaccaaaaaaaaagtatctactggggagctgcccaggtaatgcagtagctgtaggaaagccttcagtgatggcttcagggagtcacatgacaactcacaataaggggaaaccctgtgtgtggcatcaaaaatggaaaaccaggggacactcattccttaagtcacatttcggagatcatacaacagaggaatatgttgagtatacacagtgttgaaaagcctgtgacacaaacagtcatattaccaagcacaagacagtatagtttggtatgctataaaagccttgaatattctctccatttttaagaagtgagattcatactagaaaaaccattgaattccatcagtattagaatgtcatttttccacatttttaggaacctaactcagtgtaagataacaatttatacaatttattttttgagacagggtttcatctgtgcccaggctgtagtgcagtggtgcaatcttggcttattgtaacctctgcctcccaggcttaagggatcctcccacctcagcctcccaagtagctgggactgtaggcatgcaccaccatgcctgtctagtttttgtaaagatggggattcaccatgtttcccaggctgctctcaaactcctgggctcaagtgatccacctgcctcagcctcccaaaatgctgggaatacaggaacgagctaccactctcagccagaacttcttaagataaaggatgagggaatgttttcagtgatacctcttatattaggaaaaatatgtaaatgttccttggatgcaatactcacgagtgtattaatttcagaaaaattttcagtgattcctccctttatgcatgagagaattcatttagaggaagccctaggaacgtaatcaatgttaggatgcctcatctcttaactgagtggccacgcagtaacttagaacaaaaggtgtaagtgctatgaatgtggaattaccttcatcaatgtctcatttgtaggttgggccactagctcgttcattttcagtcttttaatataaacatttatggctatagtggtcctgaaaatcttactacctcgttttatatacagtgtatttattataattctaaaacatcaatacaccaaatattcagaaaggtatttccaaacagctcctgagtgatctagtttgttataatagaaattagacatttgccaggtgtggtggctcacacctataaacctagcattttgggaggctgaggcgggcagatcaccggaggtaaggagcttgagaccagcctggccaacatggtgaaaccccgcttctactaaaaaatacaaaaattagccgggtgtggtggcaggcatctataatcccagctactcaagaggctgaggaaggagaatcacttgaacccgggaaatggaggttgcagtgagccaagatcatgccacttcactccagcctgggcaaaagagtgcaactctgtctcaaaaaaaaaaaaatcagacaatatttgatatatttttttctaatttaatagtattttgccagagtacatggactttgtgattttggttgttttctctttgtgtcctaatatagcaaatactgtttctttttttttttttttttttttttgagacggagtcttgctctgttgtccaggctagaatgcagtggcgcgattgtggctcactgcaagctctgcctcccagattcacgccatcctcctgcctcagcctcccgagtagctgggactacaggtgcccatcaccatgcccggctaatttttcatatttttagtagaaatggggtttcactgtgttagccagtatggtctcaatctcctgacctcgtgatccacctgcctcggcctcccaaagcactgggattacaggcgtgagccaccatgcccggcacaaatactgtttcttaatgttcattctccctacttaaagaaaaagataagttgtcaatgagcagtattgaaaatgtacagtggggccaggcgccatggctcatgcctgtaatcccagcactttgggaggccgaggcaggcggaccacctgaggtcaggagttcaagactagcttggccaacgtggtgaaacctcgtctctactaaaaaaaatacaaaaattagctgggcgtgatgacaggtgcctgtaatcccagctacttgggaggctgaggcaggagaatcgcttgagcctgggaagcggaggttgcagtgagccgagattgcacaaccacactccagcttgggcgacagagtgagactccatctcaaaaaaagatgtacagtgtactaggctttcctgaagcttagacaggctttatcccactctgctggctaaaagaagtaggaataacgcactgggtgagacaccgtctggcttattctcatctattttcttttcattcttttggaaagtggacacaaagcatagagttaaaagagcttttttttttttttttttttttttcttcactgtggtgataaaaaccacagtgcaggggctgggcgtggtggctcacgcctgtaatcccaccactttgggaggccaaggcaggcggatcacctgaggtggggagttcgagaccagcctgatcaacatggagaaaacctgtctctcctaaaaatacaaaattaaccgagcatgttggcgcatgcctgtaatctcagctacttggaaggctgaggcaggagaattgcttcaaactgggcagaggttgcagtgagccaaggttgacccactgcactccagcctgggcaacaagagcaaaactccatctcaaaaaaaaaaaaaaagaaagaaacagtgccgaaaaatcacaatgatttgagttcttcaaaaacctttgattggctgcattggctctgttctgcatattactagacttcttacatgatcacaagtaaccactaattggttaaaaccaaagagagagagagagagagtgtgtgtgtgtgtgtgtgtgtttggttggggggtgttgtgttagcttccaggtgaatgcattatctgttaatcctgtttattgatctgtttttataagtgctccatgattctctgaaaacagtatactatgtatctaatttttggatacaggatggacatacgtactcaaactgtgtttttcaatttgtactgtatttgtttctctcgacctgacttagtgatagaggtatattaaagtcttccactagcatggtagattaacaaa

SEQ ID NO: 1055 - DNA, 6255 bp, Homo sapiens
ccgaaagccccgagagagactaagaagcaatcctcccacgcgctttctcccaccctcgggccactgagacggagggacagagggccgccctcgcgcggccgaggccccgcctcccgctcgcccgcccgcgcctccagcggaagccggaagcaaaagcgggttctgctagccccgcggctccgaactcggtggtcctggaagctccgcaggatgggggagaagatggcggaagaggagaggttccccaatacaactcatgagggtttcaatgtcaccctccacaccaccctggttgtcacgacgaaactggtgctcccgacccctggcaagcccatcctccccgtgcagacaggggagcaggcccagcaagaggagcagtccagcggcatgaccattttcttcagcctccttgtcctagctatctgcatcatattggtgcatttactgatccgatacagattacatttcttgccagagagtgttgctgttgtttctttaggtattctcatgggagcagttataaaaattatagagtttaaaaaactggcgaattggaaggaagaagaaatgtttcgtccaaacatgtttttcctcctcctgcttccccctattatctttgagtctggatattcattacacaagggtaacttctttcaaaatattggttccatcaccctgtttgctgtttttgggacggcaatctccgcttttgtagtaggtggaggaatttattttctgggtcaggctgatgtaatctctaaactcaacatgacagacagttttgcgtttggctccctaatatctgctgtcgatccagtggccactattgccattttcaatgcacttcatgtggaccccgtgctcaacatgctggtctttggagaaagtattctcaacgatgcagtctccattgttctgaccaacacagctgaaggtttaacaagaaaaaatatgtcagatgtcagtgggtggcaaacatttttacaagcccttgactacttcctcaaaatgttctttggctctgcagcgctcggcactctcactggcttaatttctgcattagtgctgaagcatattgacttgaggaaaacgccttccttggagtttggcatgatgatcatttttgcttatctgccttatgggcttgcagaaggaatctcactctcaggcatcatggccatccttttctcaggcatcgtgatgtcccactacacgcaccataacctctccccagtcacccagatcctcatgcagcagaccctccgcaccgtggccttcttatgtgaaacatgtgtgtttgcatttcttggcctgtccatttttagttttcctcacaagtttgaaatttcctttgtcatctggtgcatagtgcttgtactatttggcagagcggtaaacattttccctctttcctacctcctgaatttcttccgggatcataaaatcacaccgaagatgatgttcatcatgtggtttagtggcctgcggggagccatcccctatgccctgagcctacacctggacctggagcccatggagaagcggcagctcatcggcaccaccaccatcgtcatcgtgctcttcaccatcctgctgctgggcggcagcaccatgcccctcattcgcctcatggacatcgaggacgccaaggcacaccgcaggaacaagaaggacgtcaacctcagcaagactgagaagatgggcaacactgtggagtcggagcacctgtcggagctcacggaggaggagtacgaggcccactacatcaggcggcaggaccttaagggcttcgtgtggctggacgccaagtacctgaaccccttcttcactcggaggctgacgcaggaggacctgcaccacgggcgcatccagatgaaaactctcaccaacaagtggtacgaggaggtacgccagggcccctccggctccgaggacgacgagcaggagctgctctgacgccaggtgccaaggcttcaggcaggcaggcccaggatgggcgtttgctgcgcacagacactcagcaggggcctcgcagagatgcgtgcatccagcagccccttcaagacataagagggcggggcgaggtactggctgcagagtcgccttagtccagaacctgacaggcctctggagccaggcgacttcttgggaaactgtcatctcccgactcctccctgagccagcctccgctcagtgtggctcctcagcccacagaggggagggagcatggggccaggtgccagtcatctgtgaagctagggcgcctacccccccacccggaggacccctgcggccccctgcctagaggagcaccatctacagttgtgccattccccagccactgccttcatgctgcccccgccggactggcagagccaggggtcagccacctgcctttgagtcatcaagatgcctctgcagccacaattctgacctaagtggcagggcccagaaatcctgaaaacctcccgctgccttttgtgatacttcctgtgctccctcagagagaaacggagtgaccttttgtcctttacctgattggcacttcgcagtctatctccctgggtagcagacggctgctgcccttctctgggcatgttctgaatgtttacactggtaccttctggtatcttctttagagccccctgcaagctgcaactctaggcttttatcttgcggggtcagagcgccctctagagggaaaagctagaggcacagggtttctgccggcccacaactgctgtcttgatttgcattttacagcaaagtgctgagagcctctagtcgcctcctgccatctgatctccctccccaccattcccgtactcagttgttcttttgtctaatcggaggccactgtgctgaggccctgcagtgtctgctcactgctgccatcttcgctgctagtcagggttccatcctctttcccctctcccagttccctaccacgttggatcccattcgtcacccatgctagggtccccaaagcactggggcaggggccagagcagcagcacccagtgctccctcctctactctgacctggggccccagcatcctggagcacacgctccacgcacacacaccccagccctgtcccaggggcctggccccctcagccatctcagggtgaggagctgccagtcatgtccagatggaatgactcccatcctctcctcatctcccctttgacgagcctcaaactgctcagctcatcaaagagccattgccaacttccgtatgtggttctgggtcccagggagccttggaacctggcaccctggggtggtttaattcatcattaagaagcattcctgcttctcaagggacacagtggcctgcatgggccagcatggaccctgggctgatcatgtgcattcctgcttctctggggacacagtgggcccacatgggccagcatggaccctgggctagagcaagcacatctccatctcttccacctcaggcagtgtggctccagatgtcaggagggactgacctcaggaccttccaggttcctctgtgccaggaatgagaggccaggcccgatcctaccacctcgccttgaccctgaagtcagagcaggccagccaagcaggaagcacactgtttactttttgcatgaaaagtaaatgtgtacttgatagagctaaaatatgatcttttttaatttctcaaccccataatttgagccattgccttgcttaattttggtttccaccatttccttttagtggagaagagaggaagtcagagggtagggacctttgcctgcccctgggcgagtgcgggcagggatctgagaccagattgttctcgcacccctgccagaactcactctcccctgaagtttagggtcccatctcccagatgtaagttgttttgcaaactcagtttgccaggatttctttctttcctaatcttaaattcacagataaagcaatgaaaagagtcagatcccatttccgtctgccccctcgtcaccaggtgtgatagccccagccaggtcacacctggcctcacactttgagctgagacttgaaaacgatgctgtggcggaagagcatgtggggcttggtggaggggccccaggatttgttgggggcaaagggggtggcgggaccgttcccaggaggtaccagcacctgcctcgatctcctctgagcctcttctgccccctgtcggccaggtgaggtcagcagcctgggagagtgcccccaagagatgagggcaccccgtgttccttggcaatcttggctcaccttggtaacaaaaggccatagaagtctgtttttctgggtcagttttttttgcctgagaataacaaattgctgctgtctacctttagcacacccaataattctatttggggcagtgaatgcatagaagatataaaaatacgcagcttaactatatcttcctgcgtgtgtatttattttcttctgggtctaggccatggtacaggagaactgtggcgtgtaggaggaatacttcaggatgagtgaaggctggagccagggagcgctggaggaaaccagccctttagccagcagcccctccaccacaggcactgctgtgtggaacgagttcttggaatgaatcccatgctttctgcagcctgtagttgttatgacccctcggaacaaccaccccgtggcttgtgtggggtctcgcagggaaaagggctggcttctaggtccccgagataagtgtgcagggggatgggccagggccaggctaagggtggctcagttccatcatctggaggtcagacacactgtccagaggcagaactgaagccctctcggcccctaccctaagccagccacccctcttcacagtgggtgagctgggctgggctggctggcatgaggccaaggggtaggcctgagcgccagagtcgcccaggttagcccacaggattcctttgtgtgccatggaatgctgaaagatgggtgactggggacccttcttaaaacctttggcaaaggtgccatcggcagggcttggcctcatgaagtctcaggtccgtgttcccgcagggcgcacatgcttggagagtcctcagcagggtagccgaggccaggccacttctgctgaggatggggcaggctggggtgtgggtgtggcctggggtggctcagggctggaactgctgcctgattcctgtgtggggagaagctcagtggccgtttgctgccactgacaaggatttcacatgcagaagagaaaaggcccccctccaccccccgcattccctgccgagtgagagccagtgtttgctgcccttgctgggggcgggtaggaaaccctgagcttcctgatgcggagtcatgaagcagagtcctcgggaaggcatctccacagccccgggtcctctgtctaacgccctccatttcacgccctccatctcacagtcaagataaaggcctcgagaataaagagccagcccccttccatttagtctcctgccgtttcccaaacagttgtccaacagttagacattgaggggcttcactgttaccaggcatgtaacagaaggaggaagactaacacacaccccctgccccatcccatccccctctcccgagctattttcttgctgtggcctctggtgcccttgagttggtctccccggctgctctgcgggggcttcactggcttcggagtgagcgcgaagtgctggtgagcagtgggcctgtgattggatgggaagatgtgcatccgtggtcaaaagtcagctgccagccctgcggaaccagagcctcaggctgggatggggaggcctccctgcttccacctgcatggtgggcatggcctggcttacaccaaaggctttgacggtttctccaagtaaggatctgcaaatcttgaatcgtcctcaaaatgacgaagcttgaattgtcctcaagatggatgtgaatcttacattccttttcatcatttcctttgtaaaaatgacgagtgctgggtttttgttttaagaagcattatgaaggccagacttactcatttttctcccccaagtgagctgcaagaggcccctgttaggcccctgtttcctgagcagtgatgtgctgctcttcttggtggggctttgggctgggaggggaaggcgggtcagagatgggggacctgtggctgccatgcaggagcccctgcgtcatctcgttggactctttaagggagtcaggaatagatgtatgaacagtcgtgtcactggatgcctatttagaaataaagtgtatgctgctg

SEQ ID NO: 1056 - DNA, 6339 bp, Homo sapiens
gcagagcagcgagcggcgcccgcgtctgcagcggcgccgggtccgagcgcgcggcgcggcggtgggggtcggggcccgggcggggagcggggaccgggcatggcgctgcggagaggcggctgcggagcgctcgggctgctgctgctgctgctgggcgccgcgtgcctgataccgcggagcgcgcaggtgaggcggctggcgcgctgccccgccacttgcagctgtaccaaggagtctatcatctgcgtgggctcttcctgggtgcccaggatcgtgccgggcgacatcagctccctgagcctggtaaatgggacgttttcagaaatcaaggaccgaatgttttcccatctgccttctctgcagctgctattgctgaattctaactcattcacgatcatccgggatgatgcttttgctggactttttcatcttgaatacctgttcattgaagggaacaaaatagaaaccatttcaagaaatgcctttcgtggcctccgtgacctgactcacctttctttggccaataaccacataaaagcactaccaagggatgtcttcagtgatttagactctctgattgaactagatttgaggggtaataaatttgaatgtgactgcaaagccaagtggctatacctgtggttgaagatgacaaattccaccgtttctgatgtgctgtgtattggtccaccagagtatcaggaaaagaagctaaatgacgtgaccagctttgactatgaatgcacaactacagattttgttgttcatcagactttaccctaccagtcggtttcagtggatacgttcaactccaagaacgatgtgtacgtggccatcgcgcagcccagcatggagaactgcatggtgctggagtgggaccacattgaaatgaatttccggagctatgacaacattacaggtcagtccatcgtgggctgtaaggccattctcatcgatgatcaggtctttgtggtggtagcccagctcttcggtggctctcacatttacaaatacgacgagagttggaccaaatttgtcaaattccaagacatagaggtctctcgcatttccaagcccaatgacatcgagctgtttcagatcgacgacgagacgttctttgtcatcgcagacagctcaaaggctggtctgtccacagtttataaatggaacagcaaaggattctattcttaccagtcactgcacgagtggttcagggacacggatgcggagtttgttgatatcgatggaaaatcgcatctcatcctgtccagccgctcccaggtccccatcatcctccagtggaataaaagctctaagaagtttgtcccccatggtgacatccccaacatggaggacgtactggctgtgaagagcttccgaatgcaaaataccctctacctttcccttacccgcttcatcggggactcccgggtcatgaggtggaacagtaagcagtttgtggagatccaagctcttccatcccggggggccatgaccctgcagcccttttcttttaaagataatcactacctggccctggggagtgactatacattctctcagatataccagtgggataaagagaagcagctattcaaaaagtttaaggagatttacgtgcaggcgcctcgttcattcacagctgtctccaccgacaggagagatttcttttttgcatccagtttcaaagggaaaacaaagatttttgaacatataattgttgacttaagtttgtgaaggtgtggtgggtgaaactaagagaaatgtagcattagctctcacaaaagaggaccaagaaaaatcaacaaacaaatcaaagccaggctcagagctctgaaattaaaaagcactgaaatagttagatgttttcaaacttttagaactcacattttaatcagggattgcatttattggctaactgcatgacatgcccattctaccatttaaaaaaaaatcttaaagcctgtaatttctgagaaaagagtacagcatttactcttatcatctagaaatgtaatatgcttcccccccgctttttgatgaggaagaagacaattggataagatgggacagcacttataatgaaataaaaaaaaactttgagcccctctcattccactttagcaatctttttggtaagaactcttaaagccaaaagtctgctgaaaagatttgctgattattagtttaaaaatcttgtaacactcagcagtgctattttgagtcatcccagtttcctgaaagtaatgcccagtcttcctgaatcctccttaatagcagaaccttggtgattttgttggctcatatgaatgcttgtcatggatatgttaacaatttagtgtttgacattgcttcctctgccacaaagacaatactctggtgacacatgtctagacccagcacaggctgtaggcccaggagtgactcaaaggagtttttccctctttcttacggttcaaaggtgaccctggtggtggccagagcagtaatgcttgtttgatgctcttcatggctcatctgcttctcagaacccacccgttgagtttgtgggtaaccagcaggcaggccaaagactggtgcttttcatttcatcctttagagggatgaaacagttatttccgtctgatgagcattcggtagaatttttgaagtgagattttatgaagtcaaaggggactttacacagatctcgacctgctttgaaacctagaggtggccctttgatttgtgcgtgtccttgccctctggacaacttaatatttcaagtaatcgaataccaacttccctgccagcccacctgccttccgccccgcttgtgtaacagtcctgttttgttgagttgctgctattgcactgccagtgcagcccacaccaaatcacaacccaagatactcagataggaagactccttcctctcccagtactttaccaaaggaacccccgccaggacccacatggggccacgtgttggcagtggaatcagcctgtgcaggctggggatctcaggctgatcagtaggggccagctttggagccagccaagctgaatcccacactccaggtctgtgctcaagagaccagatggtgtatttccaaatgggcctctctggtatgggcaataggcaagctcctggggtctggttatgtggaagattcttagtggatgttccgcctggttagctggttctcttcagagaatataaagtgaatgcctttaggggtagctctgaaagagaaacccaacaacttcattcctagccatgaaagtagcacgatcatattgtactgtattgttattgtaaaatgactatttgccatgtcatgagtaggtagatgttttgccacaaatatgaatgtgtttgttgtttcctgactttaagcaatgaagattgagacaataaatagcactcagagaatgaagcattgatgttacatcagcactcttgggtacattctgggactgtaggctgaggcttctagcctcagaaaccacggattttaatgaacgaactcacccacgcatagtagtgttgttacttgaaacttctgcaaaataccaagcaaacaggagaaaagtggtttgttttcatttttaagtgcaaattacttttcttctgcacttttttttccctcttggtttctttgaacaggctacaaatgcccaggtccccccattggaggctgaaagggaaagagctttgccattcctccagtcctaaagatggcaagctattctttctgttgcatggaaccactcagataaacctgggcagaaaaatgggtacttggcaaactgtaggagatatttagacagtcccagcaactatgccagatcaaagtgatgttcccaattccagccacctgtagagatggcaaggtggcatcttttcacagtgttgctactgcagagaggtatcacattcccagctgcccctctgagggtaaatgagcgactgaccccctgcactcactattctgctcacattgccagattctgggaaaccaggaaacacaggatgctgggcttaggatggggagagctgttgagtccagatggggaattaggaggtgaaagaacgatctaaacaggtgatgggtggggtgtgagaagggggtgacccactcaactgcaatcaggttttccttttttataatgttattttatacaagactaaagcctgtagtctacagagcgcctgtgctgtggaaggagatatttgttctggccaacttactaaaggagcatagatgttcttggcacggggtggtgatatctttgcttcattaatcttactgctccatcccaagaatccctgaagttttaaacaacttctgcaagaagcattcttccagtaataatgtaaaacaaaaaaccaaccaagcaacagcaaaaatgcaaagcagagaaatatgtggaccgtccccagtggagatcagcttgaaggagggggtggatctttcttctactttccctcccatcacccactgggtggtcgtctgctcagcttatttcttctttatgaactttgtggcgaggctcctggactgatccctctgtgcggccatgtggctttaaggcctttccttaaagggggcttgtccccatactccatggggtcgggaatgggtctattatcaagactctaaaaataactcttagacatgaagagcactgtgttattggacagtggatgataaggccaccttacatttagcaaagctttatatttttccaatgcacattagtactcacctcatttgttcataaatagctctgaagtttattgcagggcaggtattattctaatttcagagagaaggaaatagacatgaaaactatatgaattgcctgccatggttatccaatagggactggcaaagcaataactttccctctgatcagcagacattgtattttctttctaagacaccctgctatactctcccagagaaagactttcatttctagcatgattttgaatttggcagcaccttgagataaagtaaaaagtgcaataaaatatgcatagccagaagaaaaatcatactgaatagacaccattcaatcaactggtccatttaacaattaacaaacatgcaattgcatgccccactctttttacattcaaggccccactcttgaaagtggtccagaaattttggatagttttctgttgtactaaggaggatatctagctggtctggttgtttctccccctgcatagctatggggaggatgttgaggttgagacacatctggttcttgtcacattgtccaccagataaacaagaagagatctgtgaaggaaaaattcaaaacctgaatgcacgagtggtgatgaattgctctcggccgtcatcagccttcaggaagcacactggaaatggcagagttgcattttttcttccccatggagtgagagtctgtgtatttttaggaaagaaatcagcatgggatgccagaggtttggcggtcaggagtgctcatgatggaaatttctctggcctggggtataatgaaggtgagatgaagatctgcaggaggggagtctatttgcatgccacctaaagaaaacctcttaagctggcttcctgattcttctgcagaggtatcagcctctccttcgcagctgcggaaggaagttctttaattaggcagcggccaaagattctgttcaacagcttcctggagtggaatacaataatctagttgtatgcaatgatgcaattagaaagtggtccggatttgggtggcaatggaaggggaatggcaaagtggggcagatggctctggaggaaacttgggaaagtaaaaacaaactgaaagaaaaggaaaaaaggatgatgatttcttttgcctcagccaggcaagcagagggtagaatgaccaggaagattaacaacatctcaattattaatgaagagagccaactgtaatgctcattcaaataagaagcatattgtaaagctactgagatcgaaaccaagttattattatccttactgtattccattgcttgtatcaaaatctactttttttctagtaggaaactatgcattccctatcagtccctttgattatcaggaatgtataagaattgtgataaaataggccaatatgctatttggtaccatttgtatgtattttaagtgcataacctaggtaaaataagaatagtttctatgtgtaaagaagcaagttttacagtatgcagactacagtggatgtattttaggctgtatacatatttagctctttttggtaaatagggtatacaaactatatgcctcttaattcaatatattcggtaagcctatgaataaaaagtggttcatgcct

SEQ ID NO: 1057 - DNA, 2545 bp, Homo sapiens
actcattcacataaaacgctgcgcggccggcggaatccccggcttctagggcggcgagcggccgggctggctatcgagcgagcggggcgggaacgcggagttgcgccgccgctcgggcgccgggctccgtcgcggccgcagccccgcgggtcgccctcccgtgcctcgcccgcggacaccctggccgtggacaccctggccgtgggcacccgcggggcgcgcggcgcggggccgctggccggcggcggcggcggcatgaaggtcacgtcgctcgacgggcgccagctgcgcaagatgctccgcaaggaggcggcggcgcgctgcgtggtgctcgactgccggccctatctggccttcgctgcctcgaacgtgcgcggctcgctcaacgtcaacctcaactcggtggtgctgcggcgggcccggggcggcgcggtgtcggcgcgctacgtgctgcccgacgaggcggcgcgcgcgcggctcctgcaggagggcggcggcggcgtcgcggccgtggtggtgctggaccagggcagccgccactggcagaagctgcgagaggagagcgccgcgcgtgtcgtcctcacctcgctactcgcttgcctacccgccggcccgcgggtctacttcctcaaagggggatatgagactttctactcggaatatcctgagtgttgcgtggatgtaaaacccatttcacaagagaagattgagagtgagagagccctcatcagccagtgtggaaaaccagtggtaaatgtcagctacaggccagcttatgaccagggtggcccagttgaaatccttcccttcctctaccttggaagtgcctaccatgcatccaagtgcgagttcctcgccaacctgcacatcacagccctgctgaatgtctcccgacggacctccgaggcctgcgcgacccacctacactacaaatggatccctgtggaagacagccacacggctgacattagctcccactttcaagaagcaatagacttcattgactgtgtcagggaaaagggaggcaaggtcctggtccactgtgaggctgggatctcccgttcacccaccatctgcatggcttaccttatgaagaccaagcagttccgcctgaaggaggccttcgattacatcaagcagaggaggagcatggtctcgcccaactttggcttcatgggccagctcctgcagtacgaatctgagatcctgccctccacgcccaacccccagcctccctcctgccaaggggaggcagcaggctcttcactgataggccatttgcagacactgagccctgacatgcagggtgcctactgcacattccctgcctcggtgctggcaccggtgcctacccactcaacagtctcagagctcagcagaagccctgtggcaacggccacatcctgctaaaactgggatggaggaatcggcccagccccaagagcaactgtgatttttgtttttaagactcatggacatttcatacctgtgcaatactgaagacctcattctgtcatgctgccccagtgagatagtgagtggtcaccaggcttgcaaatgaacttcagacggacctcagggtaggttctcgggactgaaggaaggccaagccattacgggagcacagcatgtgctgactactgtacttccagacccctgccctcttgggactgcccagtccttgcacctcagagttcgccttttcatttcaagcataaggcaataaatacctgcagcaacgtgggagaaagaagttgctggaccaggagaaaaggcagttatgaagccaattcattttgaaggaagcacaatttccaccttattttttgaactttggcagtttcaatgtctgtctctgttgcttcggggcataagctgatcaccgtctagttgggaaagtaaccctacagggtttgtagggacatgatcagcatcctgatttgaaccctgaaatgttgtgtagacaccctcttgggtccaatgaggtagttggttgaagtagcaagatgttggcttttctggattttttttgccatgggttcttcactgaccttggactttggcatgattcttagtcatacttgaacttgtctcattccacctcttctcagagcaactcttcctttgggaaaagagttcttcagatcatagaccaaaaaagtcataccttcgaggtggtagcagtagattccaggaggagaagggtacttgctaggtatcctgggtcagtggcggtgcaaactggtttcctcagctgcctgtccttctgtgtgcttatgtctcttgtgacaattgttttcctccctgcccctggaggttgtcttcaagctgtggacttctgggatttgcagattttgcaacgtggtactactttttttttctttttgtctgttagttatttctccaggggaaaaggcaataattttctaagacccgtgtgaatgtgaagaaaagcagtatgttactggttgttgttgttgttcttgttttttatagtgtaaaataaaaatagtaaaaggagaaaagcaaaaaaaaaaaaaaaaaa

SEQ ID NO: 1058 - DNA, 4070 bp, Homo sapiens
atccctggttacgcctcctctggctcagtcgcacagctacctggtaggtgactggaggtgttgatcagtgcttggtgggattttgctgatgtggccccaagcccgcctccctccccaccctgcgatggcagaagaaactcgacaaagtaaattggcagcagccaagagaaagttaaaagaatattggcagagaaacagccctggtgttccagcaggagccaagaggaacaggaaaacaaatggcagcatccatgagacagccacttctggtggttgccactcacctggagattcagcaacaggtatccacggggagagccctacatcatctgctaccctgaaggatctggagagcccgtgccaagaactagcagtagtcccagactcgaggtccgtaaaagtcagtcaactgaagaacaccatcaaatctttgaaacaacagaataaacaagtggaacatcagctggaagaagtaacatgatttctttgtttgctcgcgacatgactgctcggtttgggggacactcagatgtagaggccccgagtctcgtctcacccactcccagcctggggaagaaggctcaccccccagagtccaccccatcccccacagggtccctgataacccggtcccatgggtgggcctgtcccggggcaggggcagtggtggcattctggggacatgtctcttgcagtaccatctctgcctctgcctggttagatctctgtcttcctcttcctacaggaaaagaaagcaaacaacgagaaacagaaagccgaaagggagctagaggttcaaatccagagattgaacatacagaaagggaaactaaatacggacctgtaccacacgaaacgttctctcagatactttgaagaagagtccaaggatctggccgtccgtctgcaacattcattgcagcgtaaaggagagttagagcgggctctctctgctgtcaccgccacacagaagaagaaggcggagaggcagttctccagccgcagtaaagcacgtatggagtggaagttagagcagtccatgcgggagcaggcactgctgaaagcgcagctgacacagttgaaggagtcacttaaagaagtccagctagagagggatgaatatgctgaacatctaaaaggagagagggcccggtggcagcagaggatgagaaaaatgtcgcaggaggtttgctcgttgaagaaggagaagaagcatgataaatatcgggtagagaagctggagaggagcttgtccaaactcaaacaccagatggctgaacctctgcccccggagcccccagcagtgccctctgaggtggagctgcagcacctgaggaaggaactagagagagtggcaggagagctccaggcccaggtggagaaagaagaacttggattcttccagtactacagagagagatgccatcagaaagtttatcaccctataacaaagccagggggcagtgccaaagatgcagcaccgggaggaggacaccatcaggctggccctggacagggaggagatgaaggtgaagctgctggagctgcaggagatggtgttgcagctggtggcgactacaagggacacagcaaattcttggtgactgcccagaaccctgctcatgagcccagtccaggagccccagccccccaggagcttggggctgcccacaagcatggtgatctttgtgaggtgagcctcactgacagcgtggagcctgtgcaaggagaggccagggagggttctccccacgacaaccctactgcacagccgatcgtgcaggaccaccaggagcacccaggcttgggcagcaactgctgtgtgccattcttttgctgggcttggctgccaagaagaaggagataaacatcaccatcgtcaaagagctgctgaagaaatttttaaaaaagaaacaaagttatggggttaatctcctacacaattcatttacttcatttgaatgttatagccacttatgattatttgtgtttctaatttatagtttaagttcatttgtaaatagttaaaagagagtgggtctctgtggctttcactgatgttcactctggcatactttcgcaattttctttttcaatttcataattgtaggtcattagcatgcatattgagtttgcccttacgtggtgggagttcaaacacacaaagacccactatttgcacaaaactattcttgctggtttggaataggctgccatgtgtttttaatgttattgcagcatgtatattcattacagaattcagataaaatgtgcctatgttctgctgttgtttgatctaatcttaatcacagtgagctcttcattagcacaatatgtggtttgccccaagtgtgcactatttaatactttgtaatatgccaccaagagtactgacatttagagttgtttaaaggccgagaactggaaacagcctttccctcattttctgtgtattggtgatgggagtaataacattttgggggagctttttaaatttcacagaagaggaaagttgcctgctctggcaggtatgtgcaagatagagtgtgtttcatttgttctgttgccaagaattagtgctgtactattgtagttcctttaggatttgtatgtgctctgggctcatgaagatattgcatcatgagcttcagcagttgtactcttttttgatgacctaaaaagggcttatttctgaggaatgaaaggttcccatcattgactacggatgtggaaaacctttcctagcttagagcatttgtatctatattttaaagtcagagttcatgttacctgttttaatcacatgactgcatgtcccagtacacaaaagggcactggttggcattcttcttaatgtatttagtaaagatcataagaaatcctttaagagttcaaatgtccctggaacaggcatacaagctctagtcaagaatgaattagagtgaaggaaagctgtgtgacacctggcattcctctgttcatggagcttctttgaggcttgaagattgattttaccatctagaccactctgcctattcttcaaccaccttggttactttgacataggaattgacttcttttccttgaatggaaaacactttgaaataataataaacattgttataaactaatatatgtgagagtgcttagttgaaacaaaaaggagttttagtagacagtattatactatctttgaaaatcaaggagaagtttatgcaacttaaaatgtgtacaaactgcagtgcaatctactgttggtgaatgtcagtgtattatcaggaaacatgtctatacaatcacagagttatatttcctcacaaacttctttgtgaagagtgaaatgtgtttctgtacctctgggtttcacttacgggcatattttgtgcagtatttatgtgattgtgcctatgcatgatgaatgaatgaatttcagttgtacattgcctaaatcataacttgatgatgcttgggaaagactcaacagttaaaacttcatgaagttctaatgtctgtgttccaaaacacatcacattattaggatgtagggagatatgtatgtgtgctccctggggtggggatttctagttactagaccatctccatttttagcatttggcatcctcatgatacttttataaatacgacattaacaggagagcagcagtacgattttgccgatggaataacagatttgccggcaatcactgaaagagtgcaaacatcgggtccttgtgacttcaacggactcttccaaattgtatgaatgtatcaatgtattagataaacccagtttcagaatgataaagaaaaaatgttagaccaaataatgcggctagttaacagtggtacgatttctcgcccgtggctttaaaatgcacttaaagtcctgtccttgccttttattttctgaacttgatgtttttgcattctttgagttcagtttaaagacaactacgagcatctgtaaccaatctgacaataatgtgttcatcaggtgcctgtggattaaatcacatactggcatatttaagctgaatgtcaatctggaaaataaattgactgtattaacg

SEQ ID NO: 1059 - DNA, 4041 bp, Homo sapiens
ggccacatgtcgcgcatgtcttcccgtcggacggcgtgccacctcgccgcgcagctttacgaacctagagcagcgccgccccgcctcctgtctccgtcctcacctccccgccccctcccagcttcgcgtctcctagctcgacgcgcccgctataatcacgtgattgcctcatccgggtcttttgcgttctctttccctctcccaacatggcggcctcagcaaaaaagaagaataagaaggggaagactatctccctaacagactttctggctgaggatgggggtactggtggaggaagcacctatgtttccaaaccagtcagctgggctgatgaaacggatgacctggaaggagatgtttcgaccacttggcacagtaacgatgacgatgtgtatagggcgcctccaattgaccgttccatccttcccactgctccacgggctgctcgggaacccaatatcgaccggagccgtcttcccaaatcgccaccctacactgcttttctaggaaacctaccctatgatgttacagaagagtcaattaaggaattctttcgaggattaaatatcagtgcagtgcgtttaccacgtgaacccagcaatccagagaggttgaaaggttttggttatgctgaatttgaggacctggattccctgctcagtgccctgagtctcaatgaagagtctctaggtaacaggagaattcgagtggacgttgctgatcaagcacaggataaagacagggatgatcgttcttttggccgtgatagaaatcgggattctgacaaaacagatacagactggagggctcgtcctgctacagacagctttgatgactacccacctagaagaggtgatgatagctttggagacaagtatcgagatcgttatgattcagaccggtatcgggatgggtatcgggatgggtatcgggatggcccacgccgggatatggatcgatatggtggccgggatcgctatgatgaccgaggcagcagagactatgatagaggctatgattcccggataggcagtggcagaagagcatttggcagtgggtatcgcagggatgatgactacagaggaggcggggaccgctatgaagaccgatatgacagacgggatgatcggtcgtggagctccagagatgattactctcgggatgattataggcgtgatgatagaggtcccccccaaagacccaaactgaatctaaagcctcggagtactcctaaggaagatgattcctctgctagtacctcccagtccactcgagctgcttctatctttggaggggcaaagcctgttgacacagctgctagagaaagagaagtagaagaacggctacagaaggaacaagagaagttgcagcgtcagctggatgagccaaaactagaacgacggcctcgggagagacacccaagctggcgaagtgaagaaactcaggaacgggaacggtcgaggacaggaagtgagtcatcacaaactgggacctccaccacatctagcagaaatgcacgaaggagagagagtgagaagtctctagaaaatgaaacactcaataaggaggaagattgccactctccaacttctaaacctcccaaacctgatcagcccctaaaggtaatgccagcccctccaccaaaggagaatgcttgggtgaagcgaagttctaaccctcctgctcgatctcagagctcagacacagagcagcagtcccctacaagtggtgggggaaaagtagctccagctcaaccatctgaggaaggaccaggaaggaaagatgaaaataaagtagatgggatgaatgccccaaaaggccaaactgggaactctagccgtggtccaggagacggagggaacagagaccactggaaggagtcagataggaaagatggcaaaaaggatcaagactccagatctgcacctgagccaaagaaacctgaggaaaatccagcttccaagttcagttctgcaagcaagtatgctgctctctctgttgatggtgaagatgaaaatgagggagaagattatgccgaatagacctctacatcctgtgcttttctcctagtttctctccaccctggaacattcgagagcaaatcaaaacctctatccagacaagacaaaataaaactcaccatctcctgaagacctttcttacctttttttaaaaacaaaaaatgaaattattttgcatgctgctgcagcctttaaagtattgaagtaactggagaattgccaatacagccagagagaaagggactacagctttttagaggaaaagttgtggtgcgttatgtcaccatgcagttgccagtgtgattagtgcctaggggtctccatttagcagaaatggtaatgacagtgatataatgcctggaacctggttgggcagtaggggagggaggtagaaggaaaagtgtgagatttctaccttttagtttttatcctattgtggcatatatgaattctcaaacattatctgaataaattttccactcttggaaaggtagatttagcctcaagttgttctagtctccaggaggctgccagcccctcctcttatttaattctgagttttgggggccagcctagagggaattccttttttttttttaaccccccaggggggtagttgggagtgagactataggccataaagaatgggactgcattggaccaaaataaatgggaaaatcgtggtttgaaaagaagcttttgggaagtgatgagtcattttgcaccaggtaataggggaaaattgtgtgacctccagcaaacacatgaatggttatttcctggagccggaagcacttgggggtcgtggtaattcccagtgttttctgtgtcctagttttaccctttctaaacactgtcctttttgaaagttttgaatatatccacattctattgaaaccttgaaactaaaaatttagactcttatcatcatcttaagttcttcatgctactcttaacctcccaaaaagcagtatctaagtcacatacatgatgtcttgggcattttctcagccatggagaactctgaaaggaagaatcgctgcttttctcaagcaaatcggtttcttgatgtcttttggttctccttgcctgctcctgatgcttggaccccttttattgatcagagtgctctagaataatggatggtcttggatgatggataaatagggacagggacagttaaattgggagcctttcttacaaccttgatgggatttttccccccaagtttccttctccactgaaatgccacactaatgcttgttggattcatgaggtggccagaccaatgtgttgttttgttgttgtttttttaagcttcccttgagagaataaatggtaatggagagaactatttaacaaggtcctggtttctcttgcaacacagtagctaaacttgcctgcttttatatgcatttttgtagggatcagcttggtagacagtattagcggagaaacaccttgatcttggtttgcaagcccttctcccatcagtcctagattaggccctgttcagccatgcaggggtgttggtttatgcgtgctgcagcagtgggcataatgaatataatttacccagtggacaaaggtgtgtaccaagtgaatttaaataattggtgtggattggccagtagctaagaagtgggcttttaaagagtattgaagattgaaagggtttttctttcttttttaaaaaagaaaaacaaactattgattgtagataatgaaaagctagggtttgccctcttcatgtctactctccttccaaatagttatatccaaaactgtttttccctctcccctaccttgtcccccctattaaaatagaaacagggattgattaatgtcccgctcctgaatacatgtaaaatttgtacaaaaatatcttctatgaaaatgatttgtaatctgtagacttattacctgggagatgtcttgatgtaaaatcccatcctttgggttgtgggttttttgttttctccaaataaatctgatctttaaagttcaaaaaaaaaaaaaa

SEQ ID NO: 1060 - DNA, 3508 bp, Homo sapiens
ggcgcccctcctgccgccccccgcccggcctcgcactccgcttccggccgctctcgctgcggccgcacccgcgcccgtgcccgccccgcgcctgccccgcgcctcatggagggcgcagggccccggggggccgggccggcgcggcgccggggagccggggggccgccgtcaccgctgctgccgtcgctgctgctgctgctgctgctctggatgctgccggacaccgtggcgcctcaggaactgaaccctcgcggccgcaacgtgtgccgtgctcccggctcccaggtgcccacgtgctgcgctggctggaggcagcaaggggacgagtgtgggattgcggtgtgcgaaggcaactccacgtgctcagagaacgaggtgtgcgtgaggcctggcgagtgccgctgccgccacggctacttcggtgccaactgcgacaccaagtgcccgcgccagttctggggccccgactgcaaggagctgtgtagctgccacccacacgggcagtgcgaggacgtgacaggccagtgtacttgtcacgcgcggcgctggggcgcgcgctgcgagcatgcgtgccagtgccagcacggcacgtgccacccgcggagcggcgcgtgccgctgtgagcccggctggtggggcgcgcagtgcgccagcgcgtgctactgcagcgccacgtcgcgctgcgacccacagaccggcgcctgcctgtgccacgcaggctggtggggccgcagctgcaacaaccagtgcgcctgcaactcgtctccctgcgagcagcagagcggccgctgtcagtgccgcgagcgtacgttcggcgcgcgctgcgatcgctactgccagtgcttccgcggccgctgccaccctgtggacggcacgtgtgcctgcgagccgggctaccgcggcaagtactgtcgcgagccgtgccccgccggcttctacggcttgggctgtcgccgccggtgtggccagtgcaagggccagcagccgtgcacggtggccgagggccgctgcttgacgtgcgagcccggctggaacggaaccaagtgcgaccagccttgcgccaccggtttctatggcgagggctgcagccaccgctgtccgccatgccgcgacgggcatgcctgtaaccatgtcaccggcaagtgtacgcgctgcaacgcgggctggatcggcgaccggtgcgagaccaagtgtagcaatggcacttacggcgaggactgcgccttcgtgtgcgccgactgcggcagcggacactgcgacttccagtcggggcgctgcctgtgcagccctggcgtccacgggccccactgtaacgtgacgtgcccgcccggactccacggcgcggactgtgctcaggcctgcagctgccacgaggacacgtgcgacccggtcactggtgcctgccacctagaaaccaaccagcgcaagggcgtgatgggcgcgggcgcgctgctcgtcctgctcgtctgcctgctgctctcgctgctcggctgctgctgcgcttgccgcggcaaggaccctacgcgccgaccccgcccccgcagggagctttcgcttgggaggaagaaggcgccgcaccgactatgcgggcgcttcagtcgcatcagcatgaagctgccccggatcccgctccggaggcagaaactacccaaagtcgtagtggcccaccacgacctggataacacactcaactgcagcttcctggagccaccctcagggctggagcagccctcaccatcctggtcctctcgggcctccttctcctcgtttgacaccactgatgaaggccctgtgtactgtgtaccccatgaggaggcaccagcggagagccgggaccccgaagtccccactgtccctgccgaggcgccggcgccgtcccctgtgcccttgaccacgccagcctccgccgaggaggcgatacccctccccgcgtcctccgacagcgagcggtcggcgtccagcgtggaggggcccggaggggctctgtacgcgcgcgtggcccgacgcgaggcccggccggcccgggcccggggcgagattgggggcctgtcgctgtcgccatcgcccgagcgcaggaaaccgccgccacctgaccccgccaccaagcctaaggtgtcctggatccacggcaagcacagcgccgctgcagctggccgtgcgccctcaccaccgccgccaggctccgaggccgcgcccagccccagcaagaggaaacggacgcccagcgacaaatcggcgcatacggtcgaacacggcagcccccggacccgcgacccaacgccgcgccccccggggctgcccgaggaggcgacagccctcgctgcgccctcgccgcccagggcccgagcgcgcgccgcgccccggcctcttggagcccacggacgccggcggtcccccgcgaagcgcgccgaggctgcctccatgttggccgctgacgtgcgcggcaagactcgcagcctgggccgcgccgaggtggccctgggcgcgcagggccccagggaaaagccggcgcccccacagaaagccaagcgctccgtgccgccagcctcgcccgcccgcgcgcccccagcgaccgaaaccccggggcctgagaaggcggcgaccgacttgcccgcgcctgagaccccccggaagaagacccccatccagaagccgccgcgcaagaagagccgggaggcggcgggcgagctgggcagggcgggcgcacccaccctgtagcaggctgtggctcgtccgcgcgcagctccctcagcttcgcagcgccgcccgccaccccacacctcccacgctaccgggcacgggcggcctcctattggccgggcaccgcgcggctagcggaggttgcgtctcattggctcaggtcctgcagccgctcctggattggagcagtgtgctctggcgggaagggcccatcccgttggtcgaggcctgacaggcgcttagcgggcgactccctccccattggccgagttatggagcgctccgaccagacagcgtctcattggccaaagatgggagggttccgcttaaagaccgcctcttactggccaggagtggacttggttagggctaccttctcattggttgcagccagaggcacttctgcccgggctgcctctcccccgctagggcctggtgcctctggctggaggctccctcccttggccgtcccaatagagcccggggctacttccactggccaggctcccgggcatctggttgaccccagcctggggaggagggctggtctccgctcctcaggggcttagtccgtcccaccccttcccttccctggcgccccgggcccaggcccctcagctgtcagctggttttgatggcctcccactgccccacacgccgcgggacctccaggggcgactctagtggcctgaggagatgtatttataggcccccagcagggctgctcccccctcggccggtgccccaggatgggctcctcccggcgggggcttggccaaagctttcttaataaaatgcctttcccctc

SEQ ID NO: 1061 - DNA, 981 bp, Homo sapiens
gtttggggccagagtgggcgaggcgcggaggtctggcctataaagtagtcgcggagacggggtgctggtttgcgtcgtagtctcctgcagcgtctggggtttccgttgcagtcctcggaaccaggacctcggcgtggcctagcgagttatggcgacgaaggccgtgtgcgtgctgaagggcgacggcccagtgcagggcatcatcaatttcgagcagaaggaaagtaatggaccagtgaaggtgtggggaagcattaaaggactgactgaaggcctgcatggattccatgttcatgagtttggagataatacagcaggctgtaccagtgcaggtcctcactttaatcctctatccagaaaacacggtgggccaaaggatgaagagaggcatgttggagacttgggcaatgtgactgctgacaaagatggtgtggccgatgtgtctattgaagattctgtgatctcactctcaggagaccattgcatcattggccgcacactggtggtccatgaaaaagcagatgacttgggcaaaggtggaaatgaagaaagtacaaagacaggaaacgctggaagtcgtttggcttgtggtgtaattgggatcgcccaataaacattcccttggatgtagtctgaggccccttaactcatctgttatcctgctagctgtagaaatgtatcctgataaacattaaacactgtaatcttaaaagtgtaattgtgtgactttttcagagttgctttaaagtacctgtagtgagaaactgatttatgatcacttggaagatttgtatagttttataaaactcagttaaaatgtctgtttcaatgacctgtattttgccagacttaaatcacagatgggtattaaacttgtcagaatttctttgtcattcaagcctgtgaataaaaaccctgtatggcacttattatgaggctattaaaagaatccaaattcaaactaaaaaaaaaaaaaaaaaa

SEQ ID NO: 1062 - DNA, 1017 bp, Homo sapiens
gagtatttgaggctcggagccaccgccccgccggcgcccgcagcacctcctcgccagcagccgtccggagccagccaacgagcggaaaatggcagacaatttttcgctccatgatgcgttatctgggtctggaaacccaaaccctcaaggatggcctggcgcatgggggaaccagcctgctggggcagggggctacccaggggcttcctatcctggggcctaccccgggcaggcacccccaggggcttatcctggacaggcacctccaggcgcctaccctggagcacctggagcttatcccggagcacctgcacctggagtctacccagggccacccagcggccctggggcctacccatcttctggacagccaagtgccaccggagcctaccctgccactggcccctatggcgcccctgctgggccactgattgtgccttataacctgcctttgcctgggggagtggtgcctcgcatgctgataacaattctgggcacggtgaagcccaatgcaaacagaattgctttagatttccaaagagggaatgatgttgccttccactttaacccacgcttcaatgagaacaacaggagagtcattgtttgcaatacaaagctggataataactggggaagggaagaaagacagtcggttttcccatttgaaagtgggaaaccattcaaaatacaagtactggttgaacctgaccacttcaaggttgcagtgaatgatgctcacttgttgcagtacaatcatcgggttaaaaaactcaatgaaatcagcaaactgggaatttctggtgacatagacctcaccagtgcttcatataccatgatataatctgaaaggggcagattaaaaaaaaaaaaagaatctaaaccttacatgtgtaaaggtttcatgttcactgtgagtgaaaatttttacattcatcaatatccctcttgtaagtcatctacttaataaatattacagtgaattacctgtctcaatatgtcaaaaaaaaaaaaaaaaaa

SEQ ID NO: 1063 - DNA, 2104 bp, Homo sapiens
acgtagcgcggcgctcggaactgacctactaacacacatctctccgcgcggccacggcgcccgcggacccggcgcgcccgcccgcctcccgcgccgcgccctcgccgccgcccgcctcccgccgcggccccggaggcccggcccggcccgagccccgagcgccggcggcccgactcccggccgcccctttctttctcctcgccggcccgagagcaggaacacgataacgaaggaggcccaacttcattcaataaggagcctgacggatttatcccagacggtagaacaaaaggaagaatattgatggattttaaaccagagtttttaaagagcttgagaatacggggaaattaatttgttctcctacacacatagatagggtaaggttgtttctgatgcagctgagaaaaatgcagaccgtcaaaaaggagcaggcgtctcttgatgccagtagcaatgtggacaagatgatggtccttaattctgctttaacggaagtgtcagaagactccacaacaggtgaggagctgcttctcagtgaaggaagtgtggggaagaacaaatcttctgcatgtcggaggaaacgggaattcattcctgatgaaaagaaagatgctatgtattgggaaaaaaggcggaaaaataatgaagctgccaaaagatctcgtgagaagcgtcgactgaatgacctggttttagagaacaaactaattgcactgggagaagaaaacgccactttaaaagctgagctgctttcactaaaattaaagtttggtttaattagctccacagcatatgctcaagagattcagaaactcagtaattctacagctgtgtactttcaagattaccagacttccaaatccaatgtgagttcatttgtggacgagcacgaaccctcgatggtgtcaagtagttgtatttctgtcattaaacactctccacaaagctcgctgtccgatgtttcagaagtgtcctcagtagaacacacgcaggagagctctgtgcagggaagctgcagaagtcctgaaaacaagttccagattatcaagcaagagccgatggaattagagagctacacaagggagccaagagatgaccgaggctcttacacagcgtccatctatcaaaactatatggggaattctttctctgggtactcacactctcccccactactgcaagtcaaccgatcctccagcaactccccgagaacgtcggaaactgatgatggtgtggtaggaaagtcatctgatggagaagacgagcaacaggtccccaagggccccatccattctccagttgaactcaagcatgtgcatgcaactgtggttaaagttccagaagtgaattcctctgccttgccacacaagctccggatcaaagccaaagccatgcagatcaaagtagaagcctttgataatgaatttgaggccacgcaaaaactttcctcacctattgacatgacatctaaaagacatttcgaactcgaaaagcatagtgccccaagtatggtacattcttctcttactcctttctcagtgcaagtgactaacattcaagattggtctctcaaatcggagcactggcatcaaaaagaactgagtggcaaaactcagaatagtttcaaaactggagttgttgaaatgaaagacagtggctacaaagtttctgacccagagaacttgtatttgaagcaggggatagcaaacttatctgcagaggttgtctcactcaagagacttatagccacacaaccaatctctgcttcagactctgggtaaattactactgagtaagagctgggcatttagaaagatgtcatttgcaatagagcagtccattttgtattatgctgaattttcactggacctgtgatgtcatttcactgtgatgtgcacatgttgtctgtttggtgtctttttgtgcacagattatgatgaagattagattgtgttatcactctgcctgtgtatagtcagatagtccatgcgaaggctgtatatattgaacattatttttgttgttctattataaagtgtgtaagttaccagtttcaataaaggattggtgacaaacacagaaaaaaaaaaaaaaaaaaaaa

SEQ ID NO: 1064 - DNA, 1787 bp, Homo sapiens
agcaacgagcgacggcctgacgtcggcggagggaagccggcccaggctcggtgaggaggcaagtcctgcagcctcagcatgcgctggccggatgtaccctgaggtgccctctcacttcctccttcaggttctgaggggacaggctgacctggaggaccagaggcccccggaggagcactgaaggagaagatctgccagtgggtctccattgcccagctcctgcccacactcccgcctgttgccctgaccagagtcatcatgcctcttgagcagaggagtcagcactgcaagcctgaagaaggccttgaggcccgaggagaggccctgggcctggtgggtgcgcaggctcctgctactgaggagcaggaggctgcctcctcctcttctactctagttgaagtcaccctgggggaggtgcctgctgccgagtcaccagatcctccccagagtcctcagggagcctccagcctccccactaccatgaactaccctctctggagccaatcctatgaggactccagcaaccaagaagaggaggggccaagcaccttccctgacctggagtctgagttccaagcagcactcagtaggaaggtggccaagttggttcattttctgctcctcaagtatcgagccagggagccggtcacaaaggcagaaatgctggggagtgtcgtcggaaattggcagtacttctttcctgtgatcttcagcaaagcttccgattccttgcagctggtctttggcatcgagctgatggaagtggaccccatcggccacgtgtacatctttgccacctgcctgggcctctcctacgatggcctgctgggtgacaatcagatcatgcccaagacaggcttcctgataatcatcctggccataatcgcaaaagagggcgactgtgcccctgaggagaaaatctgggaggagctgagtgtgttagaggtgtttgaggggagggaagacagtatcttcggggatcccaagaagctgctcacccaatatttcgtgcaggaaaactacctggagtaccggcaggtccccggcagtgatcctgcatgctatgagttcctgtggggtccaagggccctcattgaaaccagctatgtgaaagtcctgcaccatatggtaaagatcagtggaggacctcgcatttcctacccactcctgcatgagtgggctttgagagagggggaagagtgagtctgagcacgagttgcagccagggccagtgggagggggtttgggccagtgcaccttccggggccccatcccttagtttccactgcctcctgtgacgtgaggcccattcttcactctttgaagcgagcagtcagcattcttagtagtgggtttctgttctgttggatgactttgagattattctttgtttcctgttggagttgttcaaatgttccttttaacggatggttgaatgagcgtcagcatccaggtttatgaatgacagtagtcacacatagtgctgtttatatagtttaggagtaagagtcttgttttttattcagattgggaaatccattccattttgtgaattgtgacataataatagcagtggtaaaagtatttgcttaaaattgtgagcgaattagcaataacatacatgagataactcaagaaatcaaaagatagttgattcttgccttgtacctcaatctattctgtaaaattaaacaaatatgcaaaccaggatttccttgacttctttgagaatgcaagcgaaattaaatctgaataaataattaaaaaaaaaaaaaaaaaaaaaaaaa

SEQ ID NO: 1065 - DNA, 1433 bp, Homo sapiens
gtaaactgaactggggctgggcaacaggaaaaaagaagaaaccacagattagagaaatctcggcggtcaggaggcccggggtctaagatgtaaagaggtaaacagatttagggattgattgtctgctggggtgggttgagaggagaaaagggaagaaaagtcgggggactacgtcctcagacctgacctgagtggtgagaggtggacccaggaggagtggcaggtggtggcggggttttgcagagctcagttggaggccctctccgaggcagcttgatggaacgtgggagagccgggctggagtcacagtttttattttgctagggaggtagtcagtggcgcacaaagggtaacaagcagtgatagtggggatgctttccattttaggaaacttttcctaaaaggaagtggcaattttaactaatctcccctccgccgctcccagctgccgctccagatgctgctgctgccgccgcggccaccccaccctcggtcctcctctccggaggccatggacccaccgccccccaaggctccccctttccccaaggcggaaggcccctcctccactccttcctcggcggcggggccccgacccccgcggctgggccgccacctcctcatcgacgccaatggggtcccctacacatacacggtgcagctggaggaggagccccggggcccgccccagcgcgaggcgcccccaggagagcccggccctcgcaagggctacagctgcccggagtgcgcccgtgtctttgccagccctctgcggctgcagagccaccgcgtgtcgcactcggacctcaagcccttcacgtgcggcgcctgcggcaaggccttcaagcgctccagccacctgtcgcggcatcgcgccacgcaccgcgcccgcgccgggccgccgcacacctgcccgctctgcccacgccgcttccaggacgccgcggagctggcgcagcacgtgcgcctccactaagctcgagacccggcctgtgctgccctgcccgtctcagggccaccaagtctgacccacacagcgtcactcactcccacacacaccccctggctctgctgaggttactgccttaccctgggcctcagtttccccaccttccaaagggaggagcatcattccttccttaccccctttctagctgtgtgatgtagaccaaagtcgttgcccctccctgggcctgggaaccagtcggaactgggttccagtccagctgtgctgtgtgagcctgtgcaagtgacatgacctctctaaaccttggttttctgctctctggagcggtgaaccggtggttgtctgcggggaagagatgataaagagcacgggcacggtctggttcatttctgtatctaccccccttccgcccacgcccccgaccctttgctcaataaacattccgcactccaaaaaaaaaaaaaaa

SEQ ID NO: 1066 - DNA, 2005 bp, Homo sapiens
agtgggaggtgctgagccgcctgatttattccggtcccagaggagaaggcgccagaaccccgcggggtctgagcagcccagcgtgcccattccagcgcccgcgtccccgcagcatgccgcgcccccgcctgctggccgcgctgtgcggcgcgctgctctgcgcccccagcctcctcgtcgccctggatatctgttccaaaaacccctgccacaacggtggtttatgcgaggagatttcccaagaagtgcgaggagatgtcttcccctcgtacacctgcacgtgccttaagggctacgcgggcaaccactgtgagacgaaatgtgtcgagccactgggcctggagaatgggaacattgccaactcacagatcgccgcctcgtctgtgcgtgtgaccttcttgggtttgcagcattgggtcccggagctggcccgcctgaaccgcgcaggcatggtcaatgcctggacacccagcagcaatgacgataacccctggatccaggtgaacctgctgcggaggatgtgggtaacaggtgtggtgacgcagggtgccagccgcttggccagtcatgagtacctgaaggccttcaaggtggcctacagccttaatggacacgaattcgatttcatccatgatgttaataaaaaacacaaggagtttgtgggtaactggaacaaaaacgcggtgcatgtcaacctgtttgagacccctgtggaggctcagtacgtgagattgtaccccacgagctgccacacggcctgcactctgcgctttgagctactgggctgtgagctgaacggatgcgccaatcccctgggcctgaagaataacagcatccctgacaagcagatcacggcctccagcagctacaagacctggggcttgcatctcttcagctggaacccctcctatgcacggctggacaagcagggcaacttcaacgcctgggttgcggggagctacggtaacgatcagtggctgcaggtggacctgggctcctcgaaggaggtgacaggcatcatcacccagggggcccgtaactttggctctgtccagtttgtggcatcctacaaggttgcctacagtaatgacagtgcgaactggactgagtaccaggaccccaggactggcagcagtaagatcttccctggcaactgggacaaccactcccacaagaagaacttgtttgagacgcccatcctggctcgctatgtgcgcatcctgcctgtagcctggcacaaccgcatcgccctgcgcctggagctgctgggctgttagtggccacctgccacccccaggtcttcctgctttccatgggcccgctgcctcttggcttctcagcccctttaaatcaccatagggctggggactggggaaggggagggtgttcagaggcagcaccaccacacagtcacccctccctccctctttcccaccctccacctctcacgggccctgccccagcccctaagccccgtcccctaacccccagtcctcactgtcctgttttcttaggcactgagggatctgagtaggtctgggatggacaggaaagggcaaagtagggcgtgtggtttccctgcccctgtccggaccgccgatcccaggtgcgtgtgtctctgtctctcctagcccctctctcacacatcacattcccatggtggcctcaagaaaggcccggaagcgccaggctggagataacagcctcttgcccgtcggccctgcgtcggccctggggtaccatgtggccacaactgctgtggccccctgtccccaagacacttccccttgtctccctggttgcctctcttgccccttgtcctgaagcccagcgacacagaagggggtggggcgggtctatggggagaaagggagcgaggtcagaggagggcatgggttggcagggtgggcgtttggggccctctatgctggcttttcaccccagaggacacaggcagcttccaaaatatatttatcttcttcacgggaaaaaaaaaaaaaaaaaa

SEQ ID NO: 1067 - DNA, 4419 bp, Homo sapiens
caccaccctgcctggcttggcaggagtcgtctgagaaggggactcctccagggacttggtccctaggtccccagatggggagactgaggccgtggctgtgtgtccctctgagagttggagcggggctgggcccgaattcgaccgcagcaggattctctctcatttctgagccccggaggtggcagagcggcagacccgggcaagtgaaccctagggctgcaggagcccaggccccgacgccggcgcagaggggacggaagggcccgcccccagcccagcgtgcacagaggccatagccaaggccttaaggctcatccaaccggggactcatatcccccccaccggcagcccggcgccccagcctctacccgtgcccgccgagatgctgctgccgcggtcggtgtcatcggagcgggcccctggggtgccggagccggaggagctgtgggaggcagagatggagcggctgcgcggctctgggacgcccgtgcgcgggctgccctatgccatgatggacaagcgcctcatctggcagctgcgggagcccgcgggggtgcagaccttgcgctggcagcggtggcagcgccggcggcagacggtggaaaggcgcctgcgggaggcagcgcagcggctggcccggggccttgggctctgggagggggcgctctacgagatcgggggcctcttcggcacaggaattcggtcctacttcaccttcctccgcttcctgctgctactcaacctgctgagcctgctgctcaccgcaagcttcgtgctgctgcccctggtctggctccgcccccctgacccaggccccaccctgaacttgaccctccagtgccctggtagccgccagtccccgcctggcgttttgaggttccacaatcaactttggcatgttttgactggcagggccttcaccaacacctatctcttctacggtgcgtaccgagtggggccggagagcagctccgtgtacagcatccgcctggcctacctcctcagcccgctggcctgcctgctcctctgcttctgtgggactctgcggcggatggtgaaggggctgccgcagaagactctgctgggtcagggctatcaggcgcctctcagcgccaaggtcttctcctcatgggacttctgcatccgggtgcaggaagcagccaccatcaagaagcatgagatcagcaacgagttcaaggtggagctggaggagggccgtcgcttccagctgatgcagcagcagacccgggcccagacggcctgccgcctgctctcctacctgcgggtcaacgtactcaacgggctcctggtggttggggccatcagcgccatcttctgggctaccaagtactcacaggacaacaaggaggagtccctgtttctgctgctccagtacctgccccctggggtcatcgccctggtcaacttcctgggtcccctgctgttcacatttctggtccagctggagaactaccctcccaacacggaggtcaacctcactctgatctggtgcgtggtgctgaagctggccagcttggggatgttctccgtctccctgggtcagaccatactgtgcattggcagagacaagagcagctgtgagtcctacggctacaacgtttgtgactatcagtgctgggagaactccgtgggggaggagctgtacaagctgagtatcttcaacttcctcctcaccgtggccttcgccttcctggtcaccctgcctcggaggctgctggtggaccggttctcaggccggttctgggcctggctggaacgggaggagttcctggtccccaagaatgtgctggacatcgtggcggggcagacggtcacctggatgggcctcttctactgccccctgctgcccctgctgaatagcgtcttcctcttcctcaccttctacatcaagaagtacaccctcctgaagaactccagggcatcttcgcggcccttccgtgcctccagctccaccttcttcttccagctagtgctcctcctgggcctgcttctggctgcagtgcccctgggctatgtggtcagcagcatccactcctcctgggactgcggcctcttcaccaactactcagcaccctggcaagtggtcccggagctggtggcccttgggctcccgcccattggccagcgtgccctccactacctgggctcccacgccttcagcttccccctcctcatcatgctcagccttgtcctgacggtgtgcgtctcccagacccaggccaatgccagggccatccacaggctccggaagcagctggtgtggcaggttcaggagaagtggcacctggtggaggacctgtcgcgactgctgccggagccaggcccgagcgactctccgggccccaagtaccctgcctcccaagcttcgcgcccgcagtccttctgccccggatgcccatgccctggctccccgggccaccaggccccgcggccgggcccctccgtcgtggatgccgcgggactgcgttccccttgccctggacagcacggtgccccggcctccgcccgcagattccgcttccccagcggcgcggagctgtaacccctacccctgcctccccgaagcctccctggggccccttcaggcctccttactccatcttccagacccctggcgaccaccgcccctctcagtggctccagggcctccctcagaggtccccaaagatggacacacaaccccagcggcagcaggaaaaacatatgggaattttctttctatattttaatctcatccctttaaaatgtctattttttattgtgttttttataatatacataatctattagtatagtatctcttgaatgcgattttttctagaatgtgttctgctgatttgttttagagccatgagtgcaatttatacacatacatctattgggaatgctcagaagttgtttactgatggaagtgccttcagaagagtccgggaaccacttcctaaggaaggaaagagctggccacagttagagcaagcctgcctggggccctgctctgtgttccagctgcaaactgcctgcatcatcccttcctgttactcttccttcacctgagacagtcgaggccacagcgtcagccagggccagagctgggatttgaacccaggcactcgggctccagagccacactgccccagtgtggggcttagtggcggctcctggccctgactgaggggctgactgaagcctggtgagagcgtgctgggtcagcctctccctggcgggaatcctctccgtccagtcttctaacctagcagcctcacgtccacagagctgccttgtgaaactcagcagagccctggcttcctgcagagccgtgttctcccagcctgcttcatggctccctggttgagccaagcttgcggatccgtggggtgaaggtacccgcaccgcctgggccttagtggtatgtacgggcctgcatcgtgagcagcgggcgggggcccaggcaggtgaggcagctggccacaagggcagggcccggcccccctcccaaggctgtgtctgatattcttgagcctgttcgagtttccttttccaagcctcctgttctcccacccccacccctgccatgctgcagtgactaaatctgtggttctcatccttggagaacacctgagtagctgctacaagctggccacagcccagcgactctgatgtggttgggctgggtgtggccagcagccagggcatcgggacttttcgaagctcccaggtgactcaccggcagctggggatgagaactgtcaggagggaaggtcagaagtcccaggatgcacttgaaaagcctctagctccaccagtgaccagctcctggctggactcctggtctggactcagcatcagggaggctctggcctctcgccctcagggctgggggcttcttcacatggtcatcaaagacttggccagttccgcctctcccacggccgtccttgtctcacccagcatcacgacgcatcagttcaccaacaaacacgattcagtgctgctagtgctgggtcctgttctgggggctggtgatgaggccaagagggaaagagggagctctgtgttccatcgagggggcgacaagcctggaccagatgaaagtgactcatgttgttaattagcggcttagggccaaaggtggcccctggaccagtggcctcagcatcacctgggaaaaggttagaaatgaacattcccaggccccacctcagcctcctgaatcagagcatccctttggcaaaccatactgagaaacaaccacgtgcatcaccaagcgctgtgaagaaggcaagctttgagaccttgaaggaatcatcaaactctgggcctcggtgtgctcacccagggcgagacaaagacgccatgctcctccaagtggcctccaagattaaatgagcaatgactttt

SEQ ID NO: 1068 - DNA, 4746 bp, Homo sapiens
agcacaaccgcctaagcggcggaactctggagagtgcggaacctaggatcctaggaaactgaaggcaacggaacctgggggcgatggaatccgggagcggtggaacccggagcctgtagaacttgaatctagaggaacctgacagcggcgccgagggggccacccggactctgtttggaacggaagcacagtgtccgccgcttcctggttgcgggtcagcgcccaggtcctgggctggccgccgggatgttgccctacacagtgaacttcaaggtgtcggcgcgcaccctcacgggggccctcaacgcccacaacaaggcggcggtggactggggctggcaaggtttaattgcttatggatgtcattcacttgtggtagtgattgattccattactgcccaaactcttcaagttttagaaaagcataaagctgatgttgtaaaggttaaatgggccagggaaaactatcaccataacattggctcaccatattgcttacggttagcttctgctgatgtcaatgggaagatcatcgtctgggatgtagcagcaggagtagctcagtgtgagatccaagagcatgccaagcctatccaggatgttcagtggttgtggaatcaagatgcttcccgcgatttactgcttgctatccacccgccaaattacattgtgctctggaatgccgacactggcaccaaactatggaagaagagctatgcagataacattctttctttttcttttgacccttttgatccctcacatttaactttgcttaccagcgagggtattgttttcatctcagacttctccccatccaagcctccctcaggccctgggaaaaaagtttacatatccagcccacactctagcccagctcataacaagctggccacagccacaggtgccaagaaagctctaaataaagtaaaaattttaatcactcaagagaaacctagtgctgaattcataactctcaatgattgccttcagttggcatacctgccttcaaaaaggaatcacatgttgttgctctatcctcgagagattttaatccttgaccttgaggtgaatcagacggtgggtgtgattgcaatagaacgcacaggagttccatttttacaggtaataccctgctttcagcgtgatggtttattttgtctacatgaaaatggttgtataactttacgtgttcgaagatcttataataacatttttaccacttcaaatgaggaaccagatccagatccagttcaggagcttacctatgatttacgaagccagtgtgatgcaatcagggtgacaaaaaccgtccgtcccttcagtatggtgtgctgtcctgtcaatgagaatgcagccgccctcgtagtgagtgatggcagggtcatgatatgggaactcaagtctgcagtttgtaatcgaaattcacggaacagtagttctggtgtgtcacctttatattcaccagtgtctttctgtggaattcctgtaggagtgctacagaataaactcccagacctttccttagataacatgattgggcaaagtgcaattgctggggaagaacatcccagaggttcaattctgcgggaagtgcacctcaagttcctgctgacgggactgctttcaggactgcccgcaccacagtttgctattcgtatgtgtccaccgttgaccacaaaaaacatcaagatgtatcagccactgctggctgttggtacaagtaatggttctgtcctggtgtaccatctcaccagtggtctgctacacaaagagttaagcatccactcatgtgaagtcaagggtattgaatggacaagtttgactagttttctttcttttgctacctcaacaccaaacaatatgggattagtgagaaatgaacttcaactggttgatcttccaacaggtaggagcattgcttttcgtggtgaaagaggcaatgatgaatctgccatcgaaatgattaaagtatctcatttgaagcagtatttggcagtcgtattcagagataaacccctggagctatgggatgttaggacttgtacccttcttagagagatgtccaaaaacttccctacaataactgctttggagtggtcaccatctcacaacttgaagagcctgagaaagaagcaacttgcaactcgagaggccatggcccgccagaccgtagtctcagacacagagctgagtattgttgaatcatctgtgatcagcttgctgcaggaggcagaaagtaaatctgaacttagtcagaacatctctgcccgggaacattttgtatttaccgatattgatggccaagtgtatcatctcactgttgaaggaaactcagtaaaagacagtgctcggattccaccagatggaagtatgggtagtattacctgcatcgcttggaaaggtgatacattagtgcttggagatatggatggaaatttaaatttctgggacttgaaaggcagagtatccagaggaatacccacacaccgaagttgggtgaggaagattcgttttgctcctggtaaaggaaatcaaaaattaatagcaatgtacaatgatggagctgaagtgtgggatactaaagaggttcagatggtgagcagtttaagaagtggcagaaatgtgacctttcgtatattggatgtggactggtgtacgtcagataaagtgatcttggcctcagatgatgggtgcatcagagtcctagagatgtctatgaagtctgcgtgctttagaatggatgaacaagagttaaccgagcctgtgtggtgcccctatctccttgttccaagggcctctcttgccttgaaagccttcttattacaccagccttggaatggacagtattctttggacatttctcatgttgactatccagaaaatgaagaaataaagaatctcctccaagaacagttgaattcattgtctaatgacataaagaaactgttgcttgatccagaattcactctcttgcagaggtgcctgcttgtttcaaggctctatggtgatgaatcggagctgcacttctggactgtcgctgcccactacctgcacagcttatcccaggaaaagtcagccagcacaacagctcctaaagaagctgctcctcgagacaaactgagcaacccactggatatatgctatgacgtgctctgtgaaaatgcctactttcagaaatttcagctagaaagggttaatctgcaggaagtgaaacggtcaacttatgatcatacaaggaaatgtacagaccagctactgctcttgggtcaaacagacagagctgtgcagttgctgttggaaacaagtgcagataaccagcattattactgtgattcactgaaagcctgtttagtcactactgtcacctcgtcaggcccctctcagagcaccattaagttggtggcaacgaatatgattgccaatggcaaattggcagagggcgttcagttgctctgcctgatagataaggctgcagacgcctgccgctacctgcagacatacggcgagtggaatcgggctgcatggctggcaaaagtccgtttgaatcctgaggagtgtgccgatgttttaaggcggtgggttgaccacctttgttctccacaagtcaatcagaaatcaaaggctctcctggttctcctctctctgggctgcttttttagcgtggcagagacgcttcacagcatgagatactttgatagagcagccttatttgtggaagcttgcctcaagtatggagcatttgaagtcactgaggacacagagaaactcatcactgctatatatgcagattatgcccggagtttgaagaacctcggttttaagcagggagcagttctctttgcttcaaaagccggagcagctggcaaagacttattgaatgagcttgagtcccccaaggaagaacccattgaagagtgacagcttaataaatgccagggaatctgacctggaaggcagatgggagggggctggtctggctgtggccaccgtcacagtccaggatgaagaggagtacagggtcctgtgagctgtttgaccactgttctaagactatgtgtgcccaaaagcacataagcatctatgttgagagtaagtttgtatcctgcgttggtctcagaaagaacgtgaatgcttaagattttgaaagtacataatattttatactttgggagagagctttaagagtccctggaaatactttttaatttttttaacttaaaattcaagagactgaatcacttttctcattgattaaatgtaaagattattgagaaacctatagtaaatgaaatttgtgagatgttttctcaaatatatgctgtgcctgtacttatatacagtctttcaagagagatacaaacaaggcagaaacatttaaactagtattaaaggtagtttaccaaagcattttttgttttcttaccttgaaaacacagaaccgttaattccttggtttaagcagttgctaagttttgtaattttaggctcagaggaccataggaggttttaagatttatgtttagtccgataggtgaggtctttgatattttgaattttaactccttttatgatacatcacagtaacctcatttttgaagtctttctttgtactttaatgttctctctgttctaatagttgaagtatgagatgtaactattataaactgttgctgaaaacataaatgtctgtaacttacaaacatgataaataaattaaaaattccatccaggaaaaaaaaaaaa

SEQ ID NO: 1069 - DNA, 1267 bp, Homo sapiens
tccacccaagagcaacctggaactaagttattcggcaacgaactgttccactttgttgtgaggcaatagatgtggaaattccctgacgaggggctctgtcctcatacttcctgcggagcttattgtcgtaagaatatctgtcatcctgctaatgtgcattgaaaggagagcaacggggctgaggccgtgtcagcacgatggaccccaaacagaccaccctcctgtgtcttggggactttcccatgcctttcatatctgccaaatcgagtcctgtgattcccttggatggatctgtgaaaatccagtgccaggccattcgtgaagcttacctgacccagctgatgatcataaaaaactccacgtaccgagagataggcagaagactgaagttttggaatgagactgatcctgagttcgtcattgaccacatggacgcaaacaaggcagggcgctatcagtgccaatataggatagggcactacaggttccggtacagtgacaccctggagctggtagtgacaggcttgtatggcaaacccttcctctctgcagatcggggtctggtgttgatgccaggagagaatatttccctcacgtgcagctcagcacacatcccatttgatagattttcactggccaaggagggagaactttctctgccacagcaccaaagtggggaacacccggccaacttctctttgggtcctgtggacctcaatgtctcagggatctacaggtgctacggttggtacaacaggagcccctacctgtggtccttccccagtaatgccttggagcttgtggtcacaggtaggtaccgcccagtccagccctgtgtctgggttggctgtccagggccttgccaccgggcaggaatatgaagacgtgcactgagagtgaagtgaagagaggcaaaggctctcactccaggacagtggagagagaaaggcttccccaccacactttccgctttcacttcctcgctagagttctccagacagggttcattgaaaacttagtctgtggagaacagaagggctaactcagtttgtttcattttatttatttcattttattttccgggatagagtcttgctctttcgccaaggctggagtgcagtggcacgatctcgactcactgcaaccttcgcctcccaggagaatcacttgaacccaggaggcagctgttgcagtgagccaagatcacgccattgcactccagcctgggtgacagaacgagactccacctcaagaaaaaaaaaaaaaa

SEQ ID NO: 1070 - DNA, 4187 bp, Homo sapiens
cgtagcgcccgcagagcaacgcaaagaggaagaacagagaaacggctatgagaaaaagggccgaagagtgagaagcagagggccttacccgagggggcggcaaccgggggccccacggtctccggccgcgcccgcgctggccgctgatagcgggctcacaacgatgacgtagcgaggagcggaaaacgcggtaaccaaggcggccccaggcgcgcacttccgcccggccttccaccggtccaggtctgcccctccgcagcgatagttcacgctctcggcggggctgtaccggaagttgcctctacttccgcccgttccggggcggggcttacttcgcagcgactacttgccgcacttccgggctgccaggcagctgctgtggctccaggatgatggagacagagcgacttgtgctaccccctccagatcccctggacctaccccttcgggccgtggagctcggatgcacggggcactgggagctgctgaacttgcctggagctccagagagtagccttccccatggcctccctccttgtgccccagatctgcagcaagaagcagaacagttgtttctgtcatccccagcctggctgcctctgcatggtgtggagcactcagcccgaaaatggcagaggaagacggatccctggtctcttttggctgtcctgggagccccagtcccatccgacctacaggcccaaagacacccaaccacaggccagatactgggttacaaagaggtcttgctggagaacacaaatctctcggctacaacctccttgtctcttcgccggcctccagggccagcctcccagtccttatggggaaatccaactcagtatcccttctggccaggggggatggatgaacccaccataacagatctgaacacacgggaggaggctgaggaggagatagactttgagaaagatcttcttactattccacctggtttcaagaaaggcatggactttgcaccaaaagattgtccaactccagctcctggactactaagccttagctgtatgttggagcctctggatttgggtgggggtgacgaggatgagaatgaggcagtgggacagccaggaggtcccagaggggacactgtttcagcctctccctgcagtgctcccctggcccgagcaagcagcttggaagacctagtgttgaaggaagcgtccacagctgtatccaccccagaggccccagagcctccatctcaggagcagtgggccatccctgtggacgccacctcccctgttggtgatttctatcgcctcattccccagccagccttccagtgggcatttgagccagatgtgtttcagaaacaggccatcctgcacttggaacggcatgactctgtctttgtcgcagctcacacatctgcaggaaaaacagttgtggctgaatatgccattgccctggcccagaaacacatgacacgcaccatctacacttcgcccatcaaggccctgagcaaccagaagttccgggacttccgaaacacattcggggatgtggggctgctcaccggggatgtacagctgcatccggaggcctcctgcctcatcatgaccacagagatccttcgctccatgctgtacagtggctcagatgttattcgggacctggagtgggtcatctttgatgaggttcactatatcaacgatgtcgagcgtggggtcgtgtgggaggaggtgcttatcatgctacctgaccacgtttctatcatccttctgagtgccaccgtccccaacgcccttgagtttgctgactggattgggcggctgaagcgtcgtcagatctatgtgattagcactgtaacccgccccgtgcccctggagcactatcttttcacagggaacagctccaagacccagggggagctctttttgttgctggactcccgaggagccttccatacaaaagggtactatgcagctgtggaggccaagaaggagagaatgagcaaacacgcccagacctttggggccaagcagcccacacatcaggggggccctgcacaggaccgcggagtgtacctgtccctcctggcctccctccgcacacgtgcccagttgcccgtggtggtgttcaccttctcccggggccgctgtgatgagcaggcctcaggcctcacctcccttgacctcaccaccagttcggagaagagcgagatccacctcttcctgcagcgctgccttgctcgcctccgtggctctgaccgccagctgccccaggtcctgcacatgtcagagctcctgaatcgcggcctgggtgtgcaccatagcggcatcctgcccatcctcaaggagatcgtggagatgctcttcagccgtggcctggtcaaggtcttgtttgccacagagacctttgccatgggagtaaacatgcctgctcgtacagtagtgtttgactccatgcgcaaacacgatggctccaccttccgggacctgctccctggggagtatgtgcagatggcaggccgggcagggcggaggggcctggaccccacaggcaccgttatcctgctctgcaagggccgagtgcccgagatggcagacctgcaccgcatgatgatggggaagccgtcccagctgcagtcccagttccgcctcacgtacactatgatcctcaacttgctgcgagtggatgccctcagggtggaggacatgatgaagaggagcttctctgagtttccctcccgcaaagacagcaaggcccatgaacaggccctggctgaactgaccaagaggctgggagctttggaggagcctgacatgactggccaactggtcgacctgcctgaatattacagctggggggaggaactgacagagacccagcacatgatccagcgacgcatcatggagtctgtgaacgggctgaagtctctctcagcaggaagggtggtggttgtgaagaatcaggagcatcacaacgcattgggagtgatcctacaggtctcctcgaactccaccagcagagtattcacaaccctggtcttgtgtgataagcccttgtcccaggacccacaggacagggggccagccactgcagaggtgccctatccagatgacctcgtgggattcaagctgttcctgcctgaagggccttgtgaccacaccgtggtcaagctccagccaggagatatggctgccatcaccaccaaggtgctccgggtgaatggggagaagatcttggaggacttcagcaagaggcagcagccaaaattcaagaaggatcctccccttgcagccgtgaccactgctgtccaggaactgctgcgtctggctcaggcccacccagccggacctcccaccctcgaccctgtcaatgacctgcagctcaaagatatgtcagttgtagagggtgggctccgggcccggaagctggaggagctgatccagggggctcagtgtgtacacagcccccgttttcctgcccagtacctgaagctgcgggagcgaatgcagatacagaaggagatggagcggctgcgcttcctactgtcggatcagtcattgctgctgcttcctgagtaccatcagcgagtagaggtgctccgaaccctgggttatgtggacgaggcgggcactgtgaagctggcagggcgggtggcttgtgccatgagcagccatgagttgctcctcactgagctcatgtttgacaatgcactgagcaccctgcggcctgaggagattgctgccttgctctctggcctggtctgccagagccctggggacgctggggatcagctcccaaacaccctcaagcagggaatagaacgtgtccgggctgtggccaagcggattggtgaggtccaggtggcttgtggcctgaaccagacggtggaggaatttgtgggggagctgaattttgggctggttgaggttgtatatgagtgggcccggggcatgcccttctccgagttggcagggctctcagggacccctgagggcctggtggtccgctgcattcagcgcctggctgagatgtgtcgctcactgcggggggcagcccgcctggtaggagagcctgtgctgggtgccaagatggagacagcggctaccttgctacggcgggacatcgtatttgcggccagcctctacacccagtgaatgccccatgtaaaaacatgatgataaaacagcaaagcacaaaaaaaaaaaaaaaaa

SEQ ID NO: 1071 - DNA, 7697 bp, Homo sapiens
agaatgggaaactgccttgggagaagccccaagtgagcccaagggcgcagagcagaaggaccctggagtgtaagagcctagattgcaagcctggcaggaggagccggaagaattaacctcgagtctgcacgcttttaagaacaaggcctttaaaaaatccaaagtgtgtggagtttgcaaacaaattattgacggtcaaggtatttcatgccgagcctgcaagtattcctgccacaagaaatgtgaagccaaggtggtgattccctgcggtgtgcaagtccgactggaacaggctccagggagttccacgctgtccagttctctctgccgtgataaacctctgcggcccgtcatcctgagtcccaccatggaggagggccatgggctggacctcacttacatcacggagcgcatcatcgctgtgtccttccctgccggctgctctgaggagtcctacctgcacaacctacaggaggtcacgcgcatgctcaagtccaagcacggggacaactacctggtattaaacctttcagaaaagagatatgaccttacgaagcttaacccaaagatcatggatgtgggctggccagagctccacgcaccgcccctggataagatgtgtaccatatgcaaggcgcaggagtcctggctgaacagcaacctccagcatgtggtcgtcattcactgcaggggcgggaaaggacgcataggagtggtcatatcatcctacatgcatttcaccaacgtctcagccagcgccgaccaggcccttgacaggtttgcaatgaagaagttttatgatgacaaagtttcagctttaatgcagccttcccaaaaacggtatgttcagttcctcagtgggctcctgtccggatcggtgaaaatgaatgcctctcccctgttcctgcattttgtcatcctccacggcacccccaacttcgacacaggtggagtgtgccggccctttctgaagctctaccaagccatgcagcctgtgtacacctccgggatctacaacgttggcccagaaaaccccagcaggatctgcatcgtcatcgagccggcccagcttctgaagggagatgtcatggtgaaatgctaccacaagaaataccgctcggccacccgtgacgtcattttccgcctgcagtttcacactggggctgtgcagggctacgggctggtgtttgggaaggaggatctggacaatgccagcaaagatgaccgttttcctgactatgggaaggttgaattagtcttctctgccacgcctgagaagattcaagggtccgaacacttgtacaacgaccacggtgtgattgtggactacaacacaacagacccactgatacgctgggactcgtacgagaacctcagtgcagatggagaagtgctacacacgcagggccctgtcgatggcagcctttacgcgaaggtgaggaagaaaagctcctcggatcctggcatcccaggtggcccccaggcaatcccggccaccaacagcccagaccacagtgaccacaccttgtctgtcagcagtgactccggccactctacagcctctgccaggacggataagacggaagagcgcctggccccaggaaccaggaggggcctgagtgcccaggagaaggcagagttggaccagctgctcagtggctttggcctggaagatcctggaagctccctcaaggaaatgactgatgctcgaagcaagtacagtgggacccgccacgtggtgccagcccaggttcacgtgaatggagacgctgctctgaaggatcgggagacagacattctggatgacgagatgccccaccacgacctgcacagtgtggacagccttgggaccctgtcctcctcggaagggcctcagtcggcccacctgggtcccttcacctgccacaagagcagccagaactcactcctatctgacggttttggcagcaacgttggtgaagatccgcagggcaccctcgttccggacctgggccttggcatggacggcccctatgagcgggagcggacttttgggagtcgagagcccaagcagccccagcccctgctgagaaagccctcagtgtccgcccagatgcaggcctatgggcagagcagctactccacacagacctgggtgcgccagcagcagatggttgtagctcaccagtatagcttcgccccagatggggaggcccggctggtgagccgctgccctgcagacaatcctggcctcgtccaggcccagcccagagtgccactcacccccacccgagggaccagcagtagggtggctgtccagaggggtgtaggcagtgggccacatccccctgacacacagcagccctctcccagcaaagcgttcaaacccaggtttccaggagaccaggttgtgaatggagccggcccagagctgagcacaggcccctccccaggctcgcccaccctggacatcgaccagtccatcgagcagctcaacaggctgatcctggagctggatcccaccttcgagcccatccctacccacatgaacgccctcggtagccaggccaatggctctgtgtctccagacagcgtgggaggtgggctccgggcaagcagcaggctgcctgacacaggagagggccccagcagggccaccgggcggcaaggctcctctgctgaacagcccctgggcgggagactcaggaagctgagcctggggcagtacgacaacgatgctggggggcagctgcccttctccaaatgtgcatggggaaaggctggtgtggactatgccccaaacctgccgccattcccctcaccagcggacgtcaaagagacgatgacccctggctatccccaggacctcgatattatcgatggcagaattttaagtagcaaggagtccatgtgttcaactccagcatttcctgtgtctccagagacaccgtatgtgaaaacagcgctgcgccatcctccgttcagcccacctgagcccccgctgagcagcccagccagtcagcacaaaggaggacgtgaaccacgaagctgccctgagacgctcactcacgctgtggggatgtcagagagccccatcggacccaaatccacgatgctccgggctgatgcgtcctcgacgccctcctttcagcaggcttttgcttcttcctgcaccatttccagcaacggccctgggcagaggagagagagctcctcttctgcagaacgccagtgggtggagagcagccccaagcccatggtttccctgctggggagcggccggcccaccggaagtcccctcagcgctgagttctccggtaccaggaaggactccccagtgctgtcctgcttcccgccgtcagagctccaggctcctttccacagccatgagctgtccctagcagagccaccggactccctggcgcctcccagcagccaggccttcctgggcttcggcaccgccccagtgggaagtggccttccgcccgaggaggacctgggggccttgctggccaattctcatggagcgtcaccgacccccagcatcccgctgacagcgacaggggctgccgacaatggcttcctgtcccacaactttctcacggtggcgcctggacacagcagccaccacagtccaggcctgcagggccagggtgtgaccctgcccgggcagccacccctccctgagaagaagcgggcctcggagggggatcgttctttgggctcagtctctccctcctccagtggcttctccagcccgcacagcgggagcaccatcagtatccccttcccaaatgtccttcccgacttttccaaggcttcagaagcggcctcacctctgccagatagtccaggtgataaacttgtgatcgtgaaatttgttcaagacacttccaagttctggtacaaggcggatatttcaagagaacaagccatcgccatgttgaaggacaaggagccgggctcattcattgttcgagacagccattccttccgaggggcctatggcctggccatgaaggtggccacgcccccaccttcagtcctgcagctgaacaagaaagctggagatttggccaatgaactcgtccggcactttttgatcgagtgtaccccgaagggagtgcggttgaaagggtgctcgaatgaaccatatttcgggagcctgacggccttggtgtgccagcattccatcacgcccttggccttgccgtgcaagctgcttatcccagagagagatccattggaggaaatagcagaaagttctccccagacggcagccaattcagcagctgagctgttgaagcagggggcagcctgcaatgtgtggtacttgaactctgtggagatggagtccctcaccggccaccaggcgatccagaaggccctgagcatcaccctggtccaggagcctccacctgtgtccacagttgtgcacttcaaggtgtcagcccagggcatcaccctgacagacaatcagaggaagctcttcttccggaggcattaccccgtgaacagtgtgattttctgtgccttggacccacaagacaggaagtggatcaaagatggcccttcctcaaaagtctttggatttgtggcccggaagcagggcagtgccacggataatgtgtgccacctgtttgcagagcatgaccctgagcagcctgccagtgccattgtcaacttcgtatcaaaggtcatgattggttccccaaagaaggtctgagaactcccctccctccctggacccaccgatgcctctcgaagccctggagacagccgttgggtgagggtggggcccccactttttaccaaactagtaaacctgacattccaggcccatgaggggaaagaggatcttccagctctgcaaaaacaagaacaaacaacatcaccgtgaattggcctttcctgaaagtgacttatctgacacatctctgtagccacatgctttttgggtagaagaagctgggcatgggtgcaccccaccccctagggtccccatgggaaagggacatgcaaggaaacagcacagaacacgaggtggtccccatgtccctggcacactagcattccgggggatgaggaatccccagcccttgaggcagaggtgccgagtgactgccatgcttcgcccgtccgcatgggcgcttctgtccagctgcacccgaggccgggggtttccctcacctcggtcttcccaagatggagatgctaacgaaactgagaagggggcgtatgtttgacgaaggtttgtgcaagtcaggcccttctggaacacagcagggcctacaacgaggggcctttgcgatgggctgtgaggatgggggtggtgggaagaattggccacgttggagaccccatgccaccccaccatggtgagtgctctgtgcctcctgctcacctgtggtgagctgggcgagctgggcgagctgggcgagctgggctggggagagcctgtgaggaccgagaggagaaatgagaagaaggaacaaaaatattatttctatgtaatttatattttacttatgccaaattatttatgataatttgccattgctatactgtaccagtgtcaaatgctgcagcctgccaagctgtgattttgtgaggcttgtccctatgtaggatgcaccgcaggcccctggccactgaaagagtgtgcagtggactgtgggtctcccatatgcggtgccgcccaaaggtggctttgcctcaagcaacctaccctgatgttttactcattggaatgtttttccccgattgtggatgacttcttttctgatggagagagtccaggagggatggaaaactcctggatttaagctcagcatcccccacatgggcttttcgatcatcttcaggcctgaagctgcacgacctgaagttcgcctgcatttatcagccctctttgtgctgctccttgccaccttggggttcctgctggggaccatgtgtggttgtggcatgtgtgagcagaagggaggatgaggaaaaagagaagaaaccccggtactgacaagctgtttttgagtgccactgtttgccatcatctaagccactgaatcaagtgtatttcaggcttatttcaacattccaatgccctggttttcctgcttgaatctgttcgtggtcaaaggtttgggggaatttgtgaccctggaacatccccagagtgaaagatggagctgggccacatcagaataaggccttggccccatcctctcacagcctaggtgctctgcaggcatgctgactgtcctgattgcgatccagcccgaaattccctcctctgctttcaaaagtcaaatcccccattcttaggccacactggtgtcacaagctcctgtcagggagctggggtttgggaatgtgctttgtgaactctgctttaaagtgaggggccgaggaaaacttagaaacaggcagagttggaagcagccaaatcacagtgggtgttgtgtgtgtgtgcgtgtgtgcatgcgtgcgtgtatgcgtgtgtgaaagcaggtggaccattccactttttagctcctattgatgcaccaaaccaagtgcctcatttctgtgccaaatgtttgccttggtcgttgtggacctccttctctaacttgcggtggcatgactgtcaggaggtgctggcattttcagcagatcctcatgtgttgaccctgatgtctttagcagaggcctctagcatctcggtttttcatccactgcaggaatgtggccacagggagcagaggtttgtactttccccaagaggtcctcatcctgagacggtctctacccatgtttaacccaaagagtgcaggccaggttccttatccttctgatgaaggatgagagagctcatttagaagtcagagcaaactagggtctcagtattgagaaacgcagcctgccagggaatcacagagacatcggggtgcccgcgatggccctcatgaagccatgcctcgacggcattcaggaagccctgcaaacgtgctttttgaactcattggccaggtgtgatttttacacaaggtaaacgtggtcaagggcatcggggaatttgctccaagcagatagctccctctgaggaaccaaaggaagcaagtttccacgatttctgaagagctggtataggaagtttctttcttccttttgtgttacatgtgcattaaacagaacaagctgtgtgtcatcacagattgtactgtgggctcagaaaccgtgagagagcccccaccgtggacaccggctctagggccacaggaaaaggaacgtttccaggcattttgtctccagggctcccgctggacaggcacgtactgccctggggagtaaatgcggagagttcacgaactgtgcccaacgcatgttatagccagggtcctactaactactcagtaaaagaacgtattgttgtattcctccagtgttaagctatagccatgttaaaagtcactgtgcatttattctcagcatcaaataccttgtaacgtcttctctgccttgttagtgcatatttttacttttctgatactgtaaagaatatatccagtatgtaaatgaatgttctataaatcttttgtatagtcattttctctgctccttaaatatcatctctattcagagtataataaaattatgaacttggtaaaaaaaaaaaaaaaaaaaaaaaaaaaaaaaaaaaaaaaaaaaaaaaaaaaaaaaaaaaaaaaaaaaaaaaa

SEQ ID NO: 1072 - DNA, 2162 bp, Homo sapiens
cactccctgggctaaacagcatcaccatgtctgttcgatacagctcaagcaagcactactcttcctcccgcagtggaggaggaggaggaggaggaggatgtggaggaggaggaggagtgtcatccctaagaatttctagcagcaaaggctcccttggtggaggatttagctcaggggggttcagtggtggctcttttagccgtgggagctctggtgggggctgctttgggggctcatcaggtggctatggaggattaggaggttttggtggaggtagctttcgtggaagctatggaagtagcagctttggtgggagttatggaggcagctttggagggggcagtttcggaggtggcagctttggtgggggcagctttggtggaggcggctttggtggaggcggctttggaggaggctttggtggtggatttggaggagatggtggccttctctctggaaatgaaaaagtaaccatgcagaatctgaatgaccgcctggcttcctacttggacaaagttcgggctctggaagaatcaaactatgagctggaaggcaaaatcaaggagtggtatgaaaagcatggcaactcacatcagggggagcctcgtgactacagcaaatactacaaaaccatcgatgaccttaaaaatcagattctcaacctaacaactgataatgccaacatcctgcttcagatcgacaatgccaggctggcagctgatgacttcaggctgaagtatgagaatgaggtagctctgcgccagagcgtggaggctgacatcaacggcctgcgtagggtgctggatgagctgaccctgaccaaggctgacctggagatgcaaattgagagcctgactgaagagctggcctatctgaagaagaaccacgaggaggaaatgaaagaccttcgaaatgtgtccactggtgatgtgaatgtggaaatgaatgctgccccgggtgttgatctgactcaacttctgaataacatgagaagccaatatgaacaacttgctgaacaaaaccgcaaagatgctgaagcctggttcaatgaaaagagcaaggaactgactacagaaattgataataacattgaacagatatccagctataaatctgagattactgaattgagacgtaatgtacaagctctggagatagaactacagtcccaactggccttgaaacaatccctggaagcctccttggcagaaacagaaggtcgctactgtgtgcagctctcacagattcaggcccagatatccgctctggaagaacagttgcaacagattcgagctgaaaccgagtgccagaatactgaataccaacaactcctggatattaagatccgactggagaatgaaattcaaacctaccgcagcctgctagaaggagagggaagttccggaggcggcggacgcggcggcggaagtttcggcggcggctacggcggcggaagctccggcggcggaagctccggcggcggccacggcggcggccacggcggcagttccggcggcggctacggaggcggaagctccggcggcggaagctccggcggcggctacgggggcggaagctccagcggcggccacggcggcagttccagcggcggctacggtggtggcagttccggcggcggcggcggcggctacgggggcggcagctccggcggcggcagcagctccggcggcggatacggcggcggcagctccagcggaggccacaagtcctcctcttccgggtccgtgggcgagtcttcatctaagggaccaagatactaacaaaaccagagtaatcaagacaattattgaagaggtggcgcccgacggtagagttctttcatctatggttgaatcagaaaccaagaaacactactattaaactgcatcaagaggaaagagtctcccttcacacagaccattatttacagatgcatggaaaacaaagtctccaagaaaacacttctgtcttgatggtctatggaaatagaccttgaaaataaggtgtctacaaggtgttttgtggtttctgtatttcttcttttcactttaccagaaagtgttctttaatggaaagaaaaacaactttctgttctcatttactaatgaatttcaataaactttcttactgatgcaaactaaaaaaaaaaaaaaaaaaaaaaa

SEQ ID NO: 1073 - DNA, 2747 bp, Homo sapiens
tgctctgtgctgggatcatggaacttgcactgctgtgtgggctggtggtgatggctggtgtgattccaatccagggcgggatcctgaacctgaacaagatggtcaagcaagtgactgggaaaatgcccatcctctcctactggccctacggctgtcactgcggactaggtggcagaggccaacccaaagatgccacggactggtgctgccagacccatgactgctgctatgaccacctgaagacccaggggtgcagcatctacaaggactattacagatacaacttttcccaggggaacatccactgctctgacaagggaagctggtgtgagcagcagctgtgtgcctgtgacaaggaggtggccttctgcctgaagcgcaacctggacacctaccagaagcgactgcgtttctactggcggccccactgccgggggcagacccctgggtgctagaagcccacaccctctaccctgttcctcagcatggagctctggcatccccacctcagtatctaacctgaaccagcctggcttttcaaacactccggggggaggtagtcccagcctcccccggaaccctctaccaatgccttctgaccttctgaagctttccgaatcctcccagttgaggcagtagctgtgtcctctgagggtggatgggaatcttgggagaagcccaagcaagggagccctcagaggtggtgtttggaccaaagcatcggggtgggggaggggtctgccgctgtcccccacctgctggcccccttgtccttcctcaccccctccaatatagtctcggagctacaaccgcagcagccactataaagggcaatattgatctttctgtccatgtggctctatcttttaaaacctcaaggccctccactgtcctaagataaagcctctcataggcactggggaccctgcacagtctggccatgtgaccctctccccaggcaagctctgaagtccctgcaggtggaggccatgcctgtcttaaactcagttgcatccctggtgcccaaagcaacaccagaaccaagaaggagctccataaatccttcttgggtgaagcctagacaaagccgccaggtcttgtggctccaggcaccagagccttgagtactttctcctgcctccaggcattggctcagggtgaattacaaggggctactgaatggctattactttcatcacgactgatccccacctcctcagggtcaaagggctactttctggaagtctccccaggctgactccttctccctgactgcaagggctcactccctcctccaagctcccacaatgcttcatggctctgccgcttacctagcttggcctagagtggcaaatggaacttctctgatctcccccaactagactggagcccccgaaggatggagaccatgtctgtgccatctctgtttcccctgttttcccacatactaggtgctcaattcatgcctgtgaatggcgtgagcccataatggatacacagaggttgcagcagatggtgtgggtacctcacccagatatcatccaggcccaaggcccctctccctgagtgaggccaggtgttggcagccaactgctccaatctgcctccttcccctaaatactgccctggtctagtgggagctgccttccccctgccccacctctcccaccaagaggccacctgtcactcatggccaggagagtgacaccatggagggtacaattgccagctcccccgtgtctgtgcaggattgtctgggttgaatgacactctcaaattgttcctgggatcgggctgaggccaggcctctcctggaaccacctctctgcttggtctgaccccttggcctatccagttttcctggttccctcacaggtttctccagaaagtactccctcagtaaagcatttgcacaagaatccttgtctcaggctctgcttctaaggaaagagactgaagagggacaactttttcctatgaggactcccaatctgccatttgtgtgtggctagctgtttccagccagggggctgaggcacctgcagtcacccacactctgggcctgtggcaccatctgtgcctcagctgactgagcagttctgagatgtggtgactcatgtgaagtggtgtcataggaatgaaggactgtgggcgctgggttcaaattccagttctatgcaccactccaggtagggatacccatgggggcagctgtgcctgtgtgggggaacagggtagggaaatctccataccttctcaattttgctgtgaacctaaaactgccatataaagataaagtctaggccaggcatggtggctcatgcctgtaatcccaacacttagggtggctgaggcaggcagatcacctggggtcaggagttcaagaccagcctgcccaacatggcaaaacctcgtctctactaaaaatacaaaaattagccaggcatcgtggtgggtgcctgtaatcccagctattcaggaggctgaggcaggagaatcacttggacctgggaggcagaggtttcagtgagcccagatcgcgacactgcactccagcctgggcaacagagtgacactctgtctcaaaaaataaaataaaataaaataaaataaaataaaataaaataaaaaaaaaaaaaaaaaaaaaaaaaaaaaaaaaaaaaaaaaaaaaaaaaaaaaaaaaaaaaaaaaaaaaaaaaaaaaaaaaaaaaaaaaaaaaaaaaaaaaaaaaaaaaaaaaaaaaaaaa

SEQ ID NO: 1074 - DNA, 1719 bp, Homo sapiens
ggcgatgggaaggcgggcgcagtcgacccaagggtggagaagagggaaggcgaaggacgcgcgttcccgggctcgtgaccgccagcggcccggggaacccgctcccagacagactcggagagatggcaggcggaagacaccggcgcgtcgtgggcaccctccacctgctgctgctggtggccgccctgccctgggcatccaggggggtcagtccgagtgcctcagcctggccagaggagaagaattaccaccagccagccattttgaattcatcggctcttcggcaaattgcagaaggcaccagtatctctgaaatgtggcaaaatgacttacagccattgctgatagagcgatacccgggatcccctggaagctatgctgctcgtcagcacatcatgcagcgaattcagaggcttcaggctgactgggtcttggaaatagacaccttcttgagtcagacaccctatgggtaccggtctttctcaaatatcatcagcaccctcaatcccactgctaaacgacatttggtcctcgcctgccactatgactccaagtatttttcccactggaacaacagagtgtttgtaggagccactgattcagccgtgccatgtgcaatgatgttggaacttgctcgtgccttagacaagaaactcctttccttaaagactgtttcagactccaagccagatttgtcactccagctgatcttctttgatggtgaagaggcttttcttcactggtctcctcaagattctctctatgggtctcgacacttagctgcaaagatggcatcgaccccgcacccacctggagcgagaggcaccagccaactgcatggcatggatttattggtcttattggatttgattggagctccaaacccaacgtttcccaatttttttccaaactcagccaggtggttcgaaagacttcaagcaattgaacatgaacttcatgaattgggtttgctcaaggatcactctttggaggggcggtatttccagaattacagttatggaggtgtgattcaggatgaccatattccatttttaagaagaggtgttccagttctgcatctgataccgtctcctttccctgaagtctggcacaccatggatgacaatgaagaaaatttggatgaatcaaccattgacaatctaaacaaaatcctacaagtctttgtgttggaatatcttcatttgtaatactctgatttagtttaggataattggttctagaattgaattcaaaagtcaaggcatcatttaaaataatctgatttcagacaaatgctgtgtggaaacatctatcctatagatcatcctattcttatgtgtctttggttatcagatcaattacagaataattgtgttgtgatattgtgtcctaaattgctcattaatttttatttacagattgaaaaagagggaccgtgtaaagaaaatggaaaataaatatctttcaaagactcttttagataaacacgatgaggcaaaatcaggttcattcattcaacgatagtttctcaacagtacttaaatagcggttggaaaacgtagccttcattttatgattttttcatatgtggaaatctattacatgtaatacaaaacaaacatgtagtttgaaggcggtcagatttctttgagaaatctttgtagagttaattttatggaaattaaaatcagaattaaatgctaaaaaaaaaaaaaaaaa

SEQ ID NO: 1075 - DNA, 13003 bp, Homo sapiens
gcggcgcgcacggtatggcggcggcggcggcggcggcggcgcgcgcctgagaagaggggacgccagcccggtcaggcctcggcgcggcctacacgctccgctcgctcgctcgctcccgcctcccgccccgcgcccggccatggcggagccgtcgtccgcccgacgcccggtgcctctcatcgagtcggagctgtacttccttatcgcccggtacctatcggcgggcccgtgtcggagagcggcccaggtgctggtgcaggagctggagcagtaccagttgttgccgaagagattggactgggagggcaacgagcacaacaggagctacgaggagttggtcttgtccaataagcatgtggctcctgatcatcttttgcaaatctgccagcgcatcggtcctatgttggataaagaaattccacccagtatttcaagagtcacttctttacttggtgcaggaaggcagtctttgctacgtacagcaaaagactgcaggcacacagtttggaagggctctgcctttgctgctcttcatagaggaagacctcctgaaatgccagtgaattatggttccccaccaaatcttgtggagatacatcgaggaaaacaactcacagggtgttccacttttagtacagcatttccaggaactatgtatcagcatataaaaatgcacagaaggattctcggacatctatctgctgtttactgtgtagcatttgataggacaggacatagaatctttacaggttcagatgactgtttggtaaagatttggtcaacacataatggccgcttgttatctacattaagaggtcattctgcagaaatttcagatatggcagtaaactatgagaatacaatgattgctgcggggagctgtgataaaattattagagtgtggtgcttgagaacttgtgccccagttgctgtgctccaaggacacacaggatcaattacatctttacagtttagcccgatggccaaaggctctcaaagatacatggtttccactggtgctgatgggacagtttgcttttggcaatgggatttagaatccttaaaatttagcccacgtcccctgaagttcactgaaaagcctaggccaggcgttcaaatgctttgttcttcttttagtgttggtggtatgtttttagccacaggtagtactgatcatgtaatcagaatgtattttttgggttttgaagcacccgaaaaaatcgcagaacttgaaagccacactgataaagtagatagtatccaattttgtaacaatggtgatcggttcctaagtggtagcagagatggaacagcacggatttggagatttgagcagttagaatggaggagcattttattggatatggctaccagaatctcaggggacttatcttccgaagaggaaaggtttatgaaacctaaagtaacaatgatagcttggaatcaaaatgatagcattgttgtcacagctgtgaatgatcatgtcctcaaagtgtggaattcttacactggacaactgcttcataacttaatgggacatgctgatgaagtatttgttctggagacacatccctttgattccagaattatgttatctgcaggacatgatggcagcatatttatatgggatattacaaaaggtaccaagatgaaacattattttaatatgattgaaggacaaggacatggagctgtgtttgactgtaagttttcacaggatggacagcattttgcctgtacagattctcatgggcaccttctgatatttggttttggatgcagcaaaccatatgaaaagattcctgatcagatgttcttccatactgactatcgaccacttattagagattctaataattatgtcttagatgagcaaactcagcaggctcctcatcttatgcctccaccattcttggtagatgtagatggaaatcctcatccaaccaagtatcagagattagtaccaggccgagaaaattctgcagatgaacatttgattccacagctgggctatgtggcaacaagtgatggagaggtgattgaacaaattataagcctgcaaaccaatgataatgatgaacgcagcccagaatcgagtattcttgatggaatgataagacagttgcagcagcagcaagatcagagaatgggagcagatcaggatactattccaagaggactttcaaatggtgaagaaacaccccggagaggttttagaaggctgagcttagacattcagtcccctccaaatattggtctgcgtcgtagtggacaagttgaaggtgttcgtcagatgcatcaaaacgctccacgcagtcagattgctacagaacgtgacctgcaggcttggaaacgaagagtggttgtaccagaggtaccactaggcatatttaggaagctggaagacttccgattagagaaaggtgaagaggaaagaaatctttatataataggaagaaaaagaaagactcttcagctctcacataagtcggattcagtggttttggtatcacagtctagacaaaggacatgtaggcgtaaatatccaaattatggtagaagaaatcgtagctggcgtgagttatcttctggaaatgagtcttcaagctctgtaagacatgagacttcctgtgatcagagtgaaggttctggttcttcagaagaggatgaatggagaagtgacagaaaaagtgagagttacagcgaaagttcaagtgactcttcatctagatattccgattggacagctgatgcgggcatcaatttgcagcctcctttaagaacatcatgtcgtcgacgaattactcgattttgtagtagttcagaagatgaaatatctactgagaatttatctcctccaaaaagaagacgaaagagaaagaaagaaaataagcctaagaaggagaatttgcggaggatgactccagcagagcttgcaaatatggagcatttatatgaatttcaccctccagtttggattactgacaccacacttagaaaatctccttttgttcctcaaatgggtgatgaggtaatatattttcgacagggtcatgaagcttatattgaggctgtaagaagaaataatatttatgaactgaaccctaataaggagccatggagaaaaatggatcttagggatcaagaattggttaaaatagttggaatacgatatgaagttgggccccctacactctgttgcctaaaactagcatttatagatccagcaactggaaaacttatggacaaatctttctctattagatatcatgatatgccagatgttattgactttcttgtattgcgtcaattttatgatgaagcaagacagaggaattggcagtcttgtgacagattccgctctattattgatgatgcttggtggtttggaacagtgttaagtcaagagccatatcaaccacagtatcctgatagtcatttccagtgttatattgttaggtgggataatactgaaattgaaaaacttagcccatgggacatggaaccaattcctgataatgttgatccacctgaagaattaggagctagtatttctgtcacaacagatgagctagagaaattgctctataaaccacaagctggtgaatggggtcagaaatcaagagatgaagaatgtgatagaattatcagtggtatagatcaacttttgaatcttgatatagcagcagcttttgcaggccctgttgatttgtgtacatacccgaagtactgtactgtagtagcttatccaaccgatctttacacaattcgaatgagacttgttaatcgattttacaggaggctgtctgcgttagtttgggaagtcagatatatagaacataatgccagaacatttaacgaacctgagagtgtaattgcaagatcagctaaaaagataactgaccaacttttaaaatttatcaagaatcaacactgtacaaatatctcagaactttctaacacatctgaaaatgatgagcaaaatgctgaggatttggatgatagtgatcttcctaaaacatcttctggaaggaggagagtccatgatgggaaaaaaagcatcagagctacgaactatgttgaaagcaactggaagaaacagtgtaaggaactagtgaacttaatttttcagtgtgaagattctgaaccatttagacaacctgttgatttggttgaatatccagactacagagatattatagataccccaatggattttggaacagtaagggaaactctagatgcgggaaattatgacagccctttggagttttgcaaagacatccggctgatatttagcaatgcaaaagcgtatacaccaaacaaaagatcaaagatttatagtatgaccttgagattatctgccttatttgaagaaaaaatgaagaaaatctcttctgattttaaaattggtcaaaaattcaatgaaaaacttcgaagaagccagaggttcaagcaacggcaaaattgtaaaggtgacagtcagcctaacaaaagtatcagaaacctcaagccgaagaggttaaaatctcagacaaaaataattcctgagttggtaggttctcctacccagtctacctcaagtaggacagcttatcttggaacccacaagacaagtgctggtatctcttcaggtgttacttctggtgactcttcagattcagcagaatcatcagaaaggaggaaaagaaatagacctataacaaatggttctacattatctgaaagtgaagtggaagattctttagctacctctttgtcatcgtcagcttccagtagttctgaggaaagcaaagagagttccagagctcgtgaatcctcctcacgcagtgggctatccagaagcagcaatctcagggtaaccagaactagagctgctcaaagaaaaactggtcccgtttcattagcaaatggatgtggcagaaaagccactcgaaagagagtctatttaagtgattctgataacaattcattggagactggtgaaattctaaaagccagagctggaaataaccgaaaagtcttaaggaagtgtgctgctgtggctgccaataaaataaagctaatgagtgatgtagaagagaattctagctctgaaagtgtctgttctggtcggaagctgcctcaccgcaatgcttctgctgtagctagaaaaaagttattacataattctgaagatgaacagagcttaaagtcagaaattgaagaagaggagctaaaagatgaaaatcaactattaccagtgtccagttctcacactgcccagagcaatgttgatgaatctgaaaacagagactcagagtcagaaagtgatttgcgggtagcccggaaaaattggcatgctaatggttacaagtcccatactccagcaccttcaaagacaaaatttcttaaaatagagtcttctgaggaagactctaaaagtcatgattcagatcatgcatgtaacagaactgctggcccatcaacgtctgtgcagaaacttaaggcagagagcatctcagaggaagcagattctgaaccaggaagatctggtggtaggaaatacaatacatttcacaagaatgcgagtttctttaaaaaaaccaagattctgagtgactcagaagactctgaatctgaagagcaagatagagaagatgggaaatgtcataaaatggaaatgaacccaatttcaggaaatctgaactgtgaccctattgctatgtcccagtgttcctcagatcatggatgtgaaactgatttagattcagatgatgacaaaatagaaaaaccaaacaattttatgaaagattctgcatcacaagacaatggactaagcagaaaaatttccaggaaaagggtctgttccagtgactcagacagtagtttacaggtggttaagaaatcatcaaaagccagaacaggtctcctgaggattactcgaagatgtgcagctacggctgccaataagatcaagctcatgagtgatgtagaagatgtcagtttagaaaatgtgcacactagaagcaaaaatggaaggaaaaaacctctccatcttgcttgtactacagctaagaagaaattgagtgattgtgaaggaagtgtacattgtgaagtaccaagtgaacagtatgcctgtgaaggcaagccacctgatcctgactccgaaggtagtacaaaagtgcttagtcaggctctaaatggagactcagactctgaagatatgttgaattcagaacacaagcacaggcataccaatattcacaaaatagatgcaccttctaaaagaaaaagttcctctgttacatcttcaggagaagattcaaaaagtcatattccagggagtgagactgataggacattttcttcagagtcaaccttggcacaaaaagctactgcagagaataattttgaagtggaactgaattatgggctgcgcaggtggaatggcagaagactcaggacctatggaaaggctccttttagtaagacaaaagtgattcatgattcacaggaaacagcagagaaggaagtaaaaaggaagagatcgcatcctgaattggaaaatgtgaaaatctctgaaacaactgggaattcaaagtttagacctgatactagttccaaatcatcagatttgggatctgtaactgaatcagatattgactgtactgataatacaaaaaccaaaaggaggaaaacgaaaggaaaagcaaaagtagttagaaaaggtaaaacttttacagctaacatatctaaaactgtgagacgtcaaagacaaagcaaacgccctaggttaagtgtggatgataatgactgggaggatttggactatgcaaaatctaaaagagttcttcgacgttcaaaaataaaaacgagaaatcagggtagaaggactgtgagataccatgatggggatgatgacagaagtttagaaaatgtgttagatttcaatggttgcaccttatgaccttgagggaaagccagttcatttaagaggaaatggactggcatttatggtgaaagctggctgttaaaattatttttttgtcttacaattcagggaatatatttatatttttctatgaaaagttatgaatgtgactaaatcatgactgttatttttatttgcacttgctggtctttgtagcagcattcagcacaggtgccaaaatatgcttcattttgggggcagatctattttgacagtatttgactacatatagcaagagtttgaaatatgttaaacactagacatcctggttatcaaaaccaatgagcattactttcatggcagcaagtgtcatgcagttattttctgaatttgtcaaagaggcagtagtttctaacccctgttctatagtagttacaacaatttcacaacctatgtttacagattcttcataaatacatgcatactgacactataatcatgggaggtgtaaccatgattagtaggcgaggtacctaccacttttttttttttcttcccctggctacttgagtagaatgcattataccagatctggtcactttcattgaaatggtttctaattttcttcccaagtgctgttgggtttttttcttcttaaggaaaacgttgtcacttttatgttataaacttgaatttataaagtgctggtaaattatttttaatgatttgagtgcatgttttaaacctctaggaccagagcatagtcagagcattttcttttaaattgtgcactaacaaaatgctatataatctgtcttctgtccaagatctcctggtttccattgtaagggatttaaccaaaatcttgctcttccataatcttactctgtgaaatagaggaattcgtgtgccttagatttagaagtgtgttctttaatagagtgtacagggctaaaagagtatttaagttaatatgtaggtttcccccatctgtattccaattgtagaggtgagttttgttaagagtacaattgcaaatcttatctatataggaaaatagctaaatgtcattctccatctctttgttttagtttactgcttccatgtgcaatcctaagcattctttgctggggcaactaaatgtatctttattagtgacttctagtccaaatataagaaactgtcatgttttgtgggaaaataattttataatccatttaaagtgaaagtttatcacacaaatagtacacttattttctaaccaaatacttgataggttatgctactccagtgtagatggccattcctaacttgtttgtgcctgaagatggacttgattcaaatggtttacatatttagtgggtaagggatatgttacagtaccccacctgtaagttatttattagccctaattgtgtttgatttcagacaaaattaacccttttctcctgtgtatctttgaagtggcagataaggtgaagcatcagactggtatcaatattagacaatgttatttattagccctaattgtgtttggtttcagacaaaaccttttctcctgtgtatctttgaagtggcagacaaggcgaagcatcagactggtattaatgttagagaatgttctgaagtgttcctattttgtagttatctattccatttgacatagtagaaggtacattttctttctactctgatgcatggggaaggatgtttttggacattatcaactgagataggtgggaaacctcctctcatttgtggcttagagagctatcaccatttcagaactatgatgcttttcttctcagaacttgtgttaagtagatagtaaacagattgattcatgataattgtccttgactaagactgaaaagactaatgggatgccttttactttgctaattttaaaaactggtgatagatgtcaaatccattaatttatttaaactcttcttaaccttctcttttataatctgttctcaggttttaactccatgtttaccatcatttgcaaaaaggtaccaaaaaaatccataaataaatatggaatacattcataagtacatacattcttttggtataaaacaatattttgacagtttaggcttcattaatagaactattctgattatttggactgcattaattggtcattgactggccatccaattaccattttttctttcagtccaaaatagttagacccttgcatacagaagtggtattttggtttttaatcagatttggtttcatcagaagcagcaagaatggacctgatgtctttaaaagcatagccgacaatggtagcttctcaagttatgaaataaaactgagagataatggagaaaataatttttatgggtttttttggttatggtgctattcctaaggttaactttgaatatgtgacacacacactcctaagtacctttaaggaaaattaataaatcattaatagttaaaatgtttacattgagcactagaacatgtttggccttttttttctacgttatgcaaaatgcccagggatttaatgcacaggtgtactttaatgtttagggtcagtttgtagtattcttgagaaaaagataaagggttataatttgaatgtgaactgatccagaaataagtgctgtacctttccactgcacttgaagttcaacttaatggtgtatgtgaaaaacaaaaactactttggttgtgtatgtccaaagtcctatggttttattcatttatggttttacaggctttgaagtactcagatttgatttttgctttcttggaaagactcactttaccaagcatataaaggaaaaatgatttcaaacattgacaagatagatgagtgttaacaaagctttcttttttcgtgtcctccttatttaaaaaggtatacttacaatgtgaagtaacttatgaataaaaggaaaagtttatcccatattcaaataattcctaaggtcagcctccctttttgtaagtggcaaatatctgattaaatcatttctcagtttattaatccttggaaacaatgatatagcagttactcacagcttgtaaattacaacagaaaggttcctttcaaatagtagagctgcacctaaagaggaaattgggtttataagaaaatggaggcaaagaacttaagttttaagaaaaagcacttcaaaacagaagggcaaatggaaaaggggaatataaaacaaaccaataaaaataccatctgagggtgttactgtccaaaagtaaagaataagatgcatcactaagccctttgcactcgttatgacctcgtaagtaaaaattatcacttagaataaggggtgcacactacattccctctgtcttctagacttttttttttgtagaagaatcagaaaacaatttactaacctccctgtttgatattaaaaataggaagaattttaatattttctgttagtacaagttgaacttgattgtgccaactgaaaccccagaggtttgtatatcagtagaatgcaagaacattgttaaaggtgcttacgatcttttttgttttcctttccactccattgtatcaattttttgagtaacttttaaatggctagaaaatggtctttttgctttgcccttttaaagctgaaataaccagctccattcttttcatgaatagtaagttgatatatttatttatcaggtatcttgcagttgtcaccaaatactgtagttttcttatgttgtatggaaattatagttcaattattttaatgtgatagagtgcaacaagtcattgtagaacttttcacctgttaatgttgaagttatacctctgaatttctgctgtggatatcaaggaaataataaagcagaaaccccaagaaatttgcaacttaacagtttgagactgtctcttatcctagtatttgggaagagaaggaataaatttgtcaaaactaggtgagaaaatagagcattgtgggaaaaactgagtccaactagattagcaaatgttaattcctagctcaaactgtgaatagtaaggattgaaaagtaaagtatgtaatgctaagggctgtgttgtcttttcttacgattttaagttttaaaggctgttaaattacagagatgttgcccaaggatacatggggattctcaaaagtaagagatttttacctttttcataatctgccaagctggttcctaatatattgttaaattggtagaaaaatatctttaaattggtgtctgctcaagaattgcttttctagatttgatggagggagggggagagtcacatcatttggattctaccaatctgcaggctctatctttggcaacatgtaaataattagactatacatctgtttctcaagtatggcaagaccaatagtttgaatttaattatcaatgctatggtatactttctggtcatattttagttatgtcagttttaaggtaagttttttcatttattaaagcccttaaatgagattttagactgccaaagagaagaggcagtccaattgacctaactgaaatgagatgaccagtatatagagcctagatggactgtagcagctctacccctttgttttacaaggtaaatcattttaaaaattaccttttttgatcagtgggtaaaagttaaagggatctttaatttttgatatattcaagttaattttctaaatgtgaatcagtccttggactgcaactatatattcacctacaaaatcccaatcaaaaaattacatgagcctgtcaagcagatctttagttttccacttcacataagatcgttaatgttctaaattaatctattcatttagatgatttttgtcagttcttaaatgggatataataaatttagcattttcatcttaacaagcaaaagagttaaaaaacaaaacaaaacactactccaagccaaatacattctagctggttaattccagacttgtcccaagtggttccccaacctcttttccactggtaatttcttttcatgcaggcagaatataggggtgcgagcgctgtgagttttacatatgagcttggataggggaactgaagcgagtcaggagccctgctggaaaaggggtttgccattggattgtctgtggcctggtttctttccagtagtacagtaatagggtagattgaaaacaagtatttacttctgattctgcctgcatttagtgtgaaatgctcttaaggtattgcttctaaaaagcaaattaagcagttaagtataaagtccctgcacgaggatttcaaaataaggcttttatgagatttttattaaaaattgcaatagccatcacaaatctgagtttttctaggggtgagagaaaactgtattgtgatgagctagattagttgtagttccagaataagaacaaaaattcagagttgtgtggtgcccatcattgagtaaatgaaccctaaaaatgaataagctaatgaactagttcatggaattatttctgatggtcttttgacctgatgctgccatactgcagtgttaccagctccccctagaaaacggaactgtttaaaaacacagcaagttacagaaaccattttattctacagccattggggtacttcagtttatgggatgtttttggaaacttctgctttgggagggatgaagatcattgataaatgttatttgctttctgagttttggggtcatttcattgcttatcaatgaagggcagacagaggagagaatatctcaagtcttttctgataaaaggcttgcttgagggagcttataacttgcacctagagggtttacccactttgtggatttgatttatccaccaaccacagcaaccaataatgtcaagattctaggagtttatgaaagaggctagtatgttttcattttgagtcagacattcttttctcattctcaaatctgttttaaatgctccaattttaaaaatgccaatgaaaattttataatgcttctgtagtaaccatatgcagtttactttgaatttaggaaaacagttttgtatgatgaaatattgtgcagaatctgtaaataaggtagcttaaaaattaaaaaaaagtctaattaaaaaaaaaaaaaaaaaa

SEQ ID NO: 1076 - DNA, 2924 bp, Homo sapiens
gacggcgacgcggcgcaggcggcgggagtgcgagctgggcccgtgtttcggccgccgccatggccgcggtggacctggagaagctgcgggcgtcgggcgcgggcaaggccatcggcgtcctgaccagcggcggcgacgcgcaaggcatgaacgctgctgtccgggctgtgacgcgcatgggcatttatgtgggtgccaaagtcttcctcatctacgagggctatgagggcctcgtggagggaggtgagaacatcaagcaggccaactggctgagcgtctccaacatcatccagctgggcggcactatcattggcagcgctcgctgcaaggcctttaccaccagggaggggcgccgggcagcggcctacaacctggtccagcacggcatcaccaacctgtgcgtcatcggcggggatggcagcctcacaggtgccaacatcttccgcagcgagtggggcagcctgctggaggagctggtggcggaaggtaagatctcagagactacagcccggacctactcgcacctgaacatcgcgggcctagtgggctccatcgataacgacttctgcggcaccgacatgaccatcggcacggactcggccctccaccgcatcatggaggtcatcgatgccatcaccaccactgcccagagccaccagaggaccttcgtgctggaagtgatgggccggcactgcgggtacctggcgctggtatctgcactggcctcaggggccgactggctgttcatccccgaggctccacccgaggacggctgggagaacttcatgtgtgagaggctgggtgagactcggagccgtgggtcccgactgaacatcatcatcatcgctgagggtgccattgaccgcaacgggaagcccatctcgtccagctacgtgaaggacctggtggttcagaggctgggcttcgacacccgtgtaactgtgctgggccacgtgcagcggggagggacgccctctgccttcgaccggatcctgagcagcaagatgggcatggaggcggtgatggcgctgctggaagccacgcctgacacgccggcctgcgtggtcaccctctcggggaaccagtcagtgcggctgcccctcatggagtgcgtgcagatgaccaaggaagtgcagaaagccatggatgacaagaggtttgacgaggccacccagctccgtggtgggagcttcgagaacaactggaacatttacaagctcctcgcccaccagaagccccccaaggagaagtctaacttctccctggccatcctgaatgtgggggccccggcggctggcatgaatgcggccgtgcgctcggcggtgcggaccggcatctcccatggacacacagtatacgtggtgcacgatggcttcgaaggcctagccaagggtcaggtgcaagaagtaggctggcacgacgtggccggctggttggggcgtggtggctccatgctggggaccaagaggaccctgcccaagggccagctggagtccattgtggagaacatccgcatctatggtattcacgccctgctggtggtcggtgggtttgaggcctatgaaggggtgctgcagctggtggaggctcgcgggcgctacgaggagctctgcatcgtcatgtgtgtcatcccagccaccatcagcaacaacgtccctggcaccgacttcagcctgggctccgacactgctgtaaatgccgccatggagagctgtgaccgcatcaaacagtctgcctcggggaccaagcgccgtgtgttcatcgtggagaccatggggggttactgtggctacctggccaccgtgactggcattgctgtgggggccgacgccgcctacgtcttcgaggaccctttcaacatccacgacttaaaggtcaacgtggagcacatgacggagaagatgaagacagacattcagaggggcctggtgctgcggaacgagaagtgccatgactactacaccacggagttcctgtacaacctgtactcatcagagggcaagggcgtcttcgactgcaggaccaatgtcctgggccacctgcagcagggtggcgctccaaccccctttgaccggaactatgggaccaagctgggggtgaaggccatgctgtggttgtcggagaagctgcgcgaggtttaccgcaagggacgggtgttcgccaatgccccagactcggcctgcgtgatcggcctgaagaagaaggcggtggccttcagccccgtcactgagctcaagaaagacactgatttcgagcaccgcatgccacgggagcagtggtggctgagcctgcggctcatgctgaagatgctggcacaataccgcatcagtatggccgcctacgtgtcaggggagctggagcacgtgacccgccgcaccctgagcatggacaagggcttctgaggccagccatgcccacgcccctccccagcccccacccatgccagcgcagcgccagggctcagatggggcctgggctgttgtgtctggagcctgcaggcaggtgggggctgcgtccctgctcagcccatcccctgcctctatccctggccacctgccaggcctccctcgggctggtgtcttgagaccagcctgccaggccctccagcaggaggacagagtgccctggggcatccaccttcctgcccaggggacgtggcgctgtcggtgtttggaggctgctgccccctggctttggcgccccatgggccctcagcgtctccccatgctgggctcactacatgggccagcccttgctctacctggccggtaggctgctggcgcctaggttgtgttgagagggggatgcccctggccctgcctcactgtgacctgctcctgcccacgtgcagcacctgtcaccttttctagaaataaaatcaccctgactgtggggtgcatcggtctccggagaaaacaaaaaaa

SEQ ID NO: 1077 - DNA, 2133 bp, Homo sapiens
aggcgccgcagcgcagtggcgggcacgcgcagccgagaagatgtctccgacgccgccgctcttcagtttgcccgaagcgcggacgcggtttacgaagtctaccagagaggccttgaacaacaaaaacatcaagccattgttaagtaccttcagccaggtacctggcagtgaaaatgaaaaaaaatgtacccttgaccaagctttcagaggtattctagaagaagaaattataaatcattcatcatgtgaaaacgttttagctattatttctcttgctattgggggagtaactgaaggtatttgtaccgcatctacaccttttgtattgttgggagatgttttggattgtcttcctttggatcagtgtgacacaatattcacttttgtggaaaaaaatgttgctacttggaaatcaaatacattctattctgctgggaaaaattacttactacgtatgtgcaatgatctcctaagaagattgtctaaatcccagaatacagtcttctgtggacggattcagctctttttggccaggcttttccctctgtctgagaaatcaggtcttaacttgcagagtcagtttaatctggaaaatgtcactgttttcaatacaaatgagcaggaaagcaccctgggtcagaagcacactgaagatagagaagaaggaatggatgtagaagaaggcgaaatgggagacgaggaagctccaacaacgtgctctattccaattgattacaacctgtatcgaaaattctggtcacttcaggattacttcaggaaccctgtgcaatgctatgagaagatttcatggaaaacttttctcaagtattctgaagaagttttagctgtttttaagagttataaattagatgatactcaggcctcaagaaaaaagatggaagaattgaaaacaggaggagaacatgtatattttgcaaaatttttaacaagtgaaaagctgatggatttacaactgagtgacagtaactttcgtcgacacatcctgttgcagtatctcattttattccaatatctcaaggggcaggtcaaattcaaaagttcaaactatgttttaactgatgagcaatcactttggattgaagatactacaaaatcagtttatcaactactatctgaaaacccccccgatggagaaagattttcaaagatggtagagcatatattaaacactgaagaaaactggaactcgtggaaaaatgaaggttgcccaagttttgtgaaagaaagaacatcagataccaaacctacgagaataattcggaagagaacagcacccgaggacttcctagggaaaggacccaccaaaaaaattctgatgggaaatgaggagttaacaaggctttggaatctttgccctgataatatggaagcctgtaaatcagagacaagggaacacatgcccactttggaggaattctttgaagaagccattgaacaggcagaccctgaaaatatggtggaaaatgaatataaggctgtgaacaattcaaattatggttggagagccctgagactattagcacggagaagccctcacttcttccagccaaccaaccagcagtttaaaagtttaccagaatatcttgaaaatatggtaataaagctagccaaggaattaccgcctccttctgaagaaataaaaacaggtgaggatgaagatgaggaagataatgatgctctactgaaggaaaatgaaagtcctgatgttcggcgagacaaacctgtaacaggagaacaaatagaggtatttgccaacaagctgggtgaacaatggaagattctggctccctacttggaaatgaaagactcagaaattaggcagattgagtgtgacagtgaagacatgaagatgagagctaagcagctcctggttgcctggcaagatcaagagggagttcatgcaacacctgagaatctgattaatgcactgaataagtctggattaagtgaccttgcagaaagtctaactaatgacaatgagacaaatagttagcttcttttttttttctttttattaaaactgtgatagattttgttaccaagcagcatttgataagaggtccactggttttggtaaacaataaacatttttataacaaaaaaaaaaaaaaa

SEQ ID NO: 1078 - DNA, 2430 bp, Homo sapiens
cccggccggtgagcaacggctctgcggccatggcgagcggcgagcattcccccggcagcggcgcggcccggcggccgctgcactccgcgcaggctgtggacgtggcctcggcctccaacttccgggcctttgagctgctgcacttgcacctggacctgcgggctgagttcgggcctccagggcccggcgcagggagccgggggctgagcggcaccgcggtcctggacctgcgctgcctggagcccgagggcgccgccgagctgcggctggactcgcacccgtgcctggaggtgacggcggcggcgctgcggcgggagcggcccggctcggaggagccgcctgcggagcccgtgagcttctacacgcagcccttctcgcactatggccaggccctgtgcgtgtccttcccgcagccctgccgcgccgccgagcgcctccaggtgctgctcacctaccgcgtcggggagggacccggggtttgctggttggctcccgagcagacagcaggaaagaagaagcccttcgtgtacacccagggccaggctgtcctaaaccgggccttcttcccttgcttcgacacgcctgctgttaaatacaagtattcagctcttattgaggtcccagatggcttcacagctgtgatgagtgctagcacctgggagaagagaggtccaaataagttcttcttccagatgtgtcagcccatcccctcctatctgatagctttggccatcggagatctggtttcggctgaagttggacccaggagccgggtgtgggctgagccctgcctgattgatgctgccaaggaggagtacaacggggtgatagaagaatttttggcaacaggagagaagctttttggaccttatgtttggggaaggtatgacttgctcttcatgccaccgtcctttccatttggaggaatggagaacccttgtctgacctttgtcaccccctgcctgctagctggggaccgctccttggcagatgtcatcatccatgagatctcccacagttggtttgggaacctggtcaccaacgccaactggggtgaattctggctcaatgaaggtttcaccatgtacgcccagaggaggatctccaccatcctctttggcgctgcgtacacctgcttggaggctgcaacggggcgggctctgctgcgtcagcacatggacatcactggagaggaaaacccactcaacaagctccgcgtgaagattgaaccaggcgttgacccggacgacacctataatgagaccccctacgagaaaggtttctgctttgtctcatacctggcccacttggtgggtgatcaggatcagtttgacagttttctcaaggcctatgtgcatgaattcaaattccgaagcatcttagccgatgactttctggacttctacttggaatatttccctgagcttaagaaaaagagagtggatatcattccaggttttgagtttgatcgatggctgaatacccccggctggcccccgtacctccctgatctctcccctggggactcactcatgaagcctgctgaagagctagcccaactgtgggcagccgaggagctggacatgaaggccattgaagccgtggccatctctccctggaagacctaccagctggtctacttcctggataagatcctccagaaatcccctctccctcctgggaatgtgaaaaaacttggagacacatacccaagtatctcaaatgcccggaatgcagagctccggctgcgatggggccaaatcgtccttaagaacgaccaccaggaagatttctggaaagtgaaggagttcctgcataaccaggggaagcagaagtatacacttccgctgtaccacgcaatgatgggtggcagtgaggtggcccagaccctcgccaaggagacttttgcatccaccgcctcccagctccacagcaatgttgtcaactatgtccagcagatcgtggcacccaagggcagttagaggctcgtgtgcatggcccctgcctcttcaggctctccaggctttcagaataattgtttgttcccaaattcctgttccctgatcaacttcctggagtttatatcccctcaggataatctattctctagcttaggtatctgtgactcttgggcctctgctctggtgggaacttacttctctatagcccactgagccccgagacagagaacctgcccacagctctccccgctacaggctgcaggcactgcagggcagcgggtattctcctccccacctaagtctctgggaagaagtggagaggactgatgctcttcttttttctctttctgtcctttttcttgctgattttatgcaaagggctggcattctgattgttcttttttcaggtttaatccttattttaataaagttttcaagcaaaaattaagttaaaaaaaaaaaaaaaaaa

SEQ ID NO: 1079 - DNA, 536 bp, Homo sapiens
gtcaaagggcgcggggcggtgcctgcgaagagccacacggcgcgacaagatggcggataaggagaagaagaaaaaggagagcatcttggacttgtccaagtacatcgacaagacgatccgggtaaagttccagggaggccgcgaagccagtggaatcctgaagggcttcgacccactcctcaaccttgtgctggacggcaccattgagtacatgcgagaccctgacgaccagtacaagctcacggaggacacccggcagctgggcctcgtggtgtgccggggcacgtccgtggtgctaatctgcccgcaggacggcatggaggccatccccaaccccttcatccagcagcaggacgcctagcctggccgggggcgcggggggtgcagggcaggcccgagcagctcggtttcccgcggacttggctgctgctcccaccgcagtaccgcctcctggaacggaagcattttcctttttgtataggttgaatttttgttttcttaataaaattgcaaacctcaaaaaaaaaaaaaaaaaa

SEQ ID NO: 1080 - DNA, 1935 bp, Homo sapiens
atctccgctggttcccggaagccgccgcggacaagctctcccgggcgcgggcgggggtcgtgtgcttggaggaagccgcggaacccccagcgtccgtccatggcgtggagccttgggagctggctgggtggctgcctgctggtgtcagcattgggaatggtaccacctcccgaaaatgtcagaatgaattctgttaatttcaagaacattctacagtgggagtcacctgcttttgccaaagggaacctgactttcacagctcagtacctaagttataggatattccaagataaatgcatgaatactaccttgacggaatgtgatttctcaagtctttccaagtatggtgaccacaccttgagagtcagggctgaatttgcagatgagcattcagactgggtaaacatcaccttctgtcctgtggatgacaccattattggaccccctggaatgcaagtagaagtacttgctgattctttacatatgcgtttcttagcccctaaaattgagaatgaatacgaaacttggactatgaagaatgtgtataactcatggacttataatgtgcaatactggaaaaacggtactgatgaaaagtttcaaattactccccagtatgactttgaggtcctcagaaacctggagccatggacaacttattgtgttcaagttcgagggtttcttcctgatcggaacaaagctggggaatggagtgagcctgtctgtgagcaaacaacccatgacgaaacggtcccctcctggatggtggccgtcatcctcatggcctcggtcttcatggtctgcctggcactcctcggctgcttcgccttgctgtggtgcgtttacaagaagacaaagtacgccttctcccctaggaattctcttccacagcacctgaaagagtttttgggccatcctcatcataacacacttctgtttttctcctttccattgtcggatgagaatgatgtttttgacaagctaagtgtcattgcagaagactctgagagcggcaagcagaatcctggtgacagctgcagcctcgggaccccgcctgggcaggggccccaaagctaggctctgagaaggaaacacactcggctgggcacagtgacgtactccatctcacatctgcctcagtgagggatcagggcagcaaacaagggccaagaccatctgagccagccccacatctagaactcccagaccctggacttagccaccagagagctacattttaaaggctgtcttggcaaaaatactccatttgggaactcactgccttataaaggctttcatgatgttttcagaagttggccactgagagtgtaattttcagccttttatatcactaaaataagatcatgttttaattgtgagaaacagggccgagcacagtggctcacgcctgtaataccagcaccttagaggtcgaggcaggcggatcacttgaggtcaggagttcaagaccagcctggccaatatggtgaaacccagtctctactaaaaatacaaaaattagctaggcatgatggcgcatgcctataatcccagctactcgagtgcctgaggcaggagaattgcatgaacccgggaggaggaggaggaggttgcagtgagccgagatagcggcactgcactccagcctgggtgacaaagtgagactccatctcaaaaaaaaaaaaaaaaaaaattgtgagaaacagaaatacttaaaatgaggaataagaatggagatgttacatctggtagatgtaacattctaccagattatggatggactgatctgaaaatcgacctcaactcaagggtggtcagctcaatgctacacagagcacggacttttggattctttgcagtactttgaatttatttttctacctatatatgttttatatgctgctggtgctccattaaagttttactctgtgttgc

SEQ ID NO: 1081 - DNA, 2017 bp, Homo sapiens
agacggggcagcgctcgagttcctgcgcgggactgccaaggcacgaccacgggccggaaggctgccaggcccagtgggcaagcgaagaaatgaaccaccgcaacgcgggcgcttcggggcggggccgagtgcgaacctgagccccaaatcccgacccaggcaggggcggggcccggagcggggccttggaggcccagcccgcgcggcgacgtctccgcgtggcgtcacggcaccgactgacggccacccaccatggccgcagaccagcgcccgaaggccgacacgctggccctgaggcaacggctcatcagctcttcctgcagactcttttttcccgaggatcctgttaagattgtccgggcccaagggcagtacatgtacgatgaacagggggcagaatacatcgattgcatcagcaatgtggcgcacgttgggcactgccaccctctcgtggtccaagcagcacatgagcagaaccaggtgctcaacaccaacagccggtacctgcatgacaacatcgtggactatgcgcagaggctgtcagagaccctgccggagcagctctgtgtgttctatttcctgaattctgggtcagaagccaatgacctggccctgaggctggctcgccactacacgggacaccaggacgtggtggtattagatcatgcgtatcacggccacctgagctccctgattgacatcagtccctacaagttccgcaacctggatggccagaaggagtgggtccacgtggcacctctcccagacacctaccggggcccctaccgggaggaccaccccaacccagctatggcctatgccaacgaggtgaaacgtgtggtcagcagtgcacaggagaagggcaggaagattgcagccttcttcgctgagtctctgcccagtgtgggagggcagatcattccccctgctggctacttctcccaagtggcagagcacatccgcaaggccggaggggtctttgttgcagatgagatccaggttggctttggccgggtaggcaagcacttctgggccttccagctccagggaaaagacttcgtccctgacatcgtcaccatgggcaagtccattggcaacggccaccctgttgcctgcgtggccgcaacccagcctgtggcgagggcatttgaagccaccggcgttgagtacttcaacacgtttgggggcagcccagtgtcctgcgctgtggggctggccgtcctgaatgtcttggagaaggagcagctccaggatcatgccaccagtgtaggcagcttcctgatgcagctcctcgggcagcaaaaaatcaaacatcccatcgtcggggatgtcaggggtgttgggctcttcattggtgtggatctgatcaaagatgaggccacaaggacaccagcaactgaagaggctgcctacttggtatcaaggctgaaggagaactacgttttgctgagcactgatggccctgggaggaacatcctgaagtttaagcccccaatgtgcttcagcctggacaatgcacggcaggtggtggcaaagctggatgccattctgactgacatggaagagaaggtgagaagttgtgaaacgctgaggctccagccctaagccagccctgctctgcctaagtgtactccagaagaaactcatctcatccaaatacacgctattgagaaggcgagcctgacctccctcttacagataaagtcagctttcagaggctcagggtgggggggcctgcccgaggccataatgctacccaccccctcctcctaaccactggtctgttggaataacccagatgtctgcatcccctcaagtcagtcaatttcctttctgtccactgggggtggaatggggtagggtgggatactttaaagtgctcctgcttaaataaattagaccagaccagtgtatttctaaagaaaatcctgacatgcacacccattaaaaatagtacattttacagtgtcccagtcatacttttaattggcaaattaaaataatgcaatctgaaaaa

SEQ ID NO: 1082 - DNA, 2929 bp, Homo sapiens
atttccgggtcactgtagatgcgatggcgccgattccaaagactgtggggcggatcaagctagactgctctctacggcccagctgcccactggaggtcgctgctgcacccaaactttgcaaggaattcggtccagaggattacggcgaagaggacatagtggattttcttcgacggcttgtggagagtgatccccagggcctgcaccggatccatgtggatgggagcagcgggcggctgcagctgtggcaccatgattacctcctgggccacttggatgatgaagggaaatcaactggacagagtgacaggggcaagggggctgagggactgggcacctactgtggtctccgcaagtccttcctgtatcctccccaagagtctgagccctgccctcaaagcccctctgcctctgccaccttccccagtgtctcagacagcctgcttcaggtggccatgccccagaagctcctggtgacagaagaggaagccaatcgcctggctgaggagctggtggctgaggaggagcgcatgaaacagaaagcagagaaaaagcgactcaagaagaagcgtcaaaaggaacggaagcgacaggagcgtttggagcagtactgtggggagcccaaggccagcactacctcagatggagatgagagccccccatccagccctggaaacccagttcagggacagtgtggtgaagaagaggactcactggatctatctagcacttttgtgtctctggctttgcgcaaggttggggattggcccctcagtgcccgcagagagaagggactgaaccaggagccccaaggcaggggtctggccctccagaagatgggtcaagaggaagagagccctccaagagaggagaggccccagcagagtccaaaggtacaggcatctccgggactgctggcagctgccttacaacagagccaggaactggcaaagttgggtaccagctttgctcaaaatggtttctaccatgaggccgtggtcctcttcacccaggccttgaagctcaacccccaggaccaccggttatttggaaatcgttccttctgccatgagcggttgggtcagccagcgtgggccctggctgatgcccaggtggcccttaccctacggcctggctggccccggggcctcttccgcctgggcaaggccttgatgggactacagcgcttcagagaggcagctgctgtgtttcaggaaactctgagaggtgggtcccagcctgacgcagcccgagagctccgctcttgccttctccacctcacactgcagggtcagcgaggaggaatctgtgcaccacctctgtcacctggggccctccagccacttccccatgctgagctggcaccctcaggcctaccttccctcaggtgccctcgaagcactgctttgaggtcccctggcctgtctccactcttgcattatccttcatgtcaccgaagccaccccaaccagcccctctcccagactcagagtagaaggccccatcctctcaagccccaggacccttcaaagggctgggacatcctgggacttgggctccagcatctgtctcaggccagatgagggggcaccggtccctcatagggcagggccatgtatatatcccttggtgggggacatagtgtggtgacagttcactgcatattttgagaccttattctctagatccatagttaatgatgccctggcagtcattcctcttgccatggggaagcttctgatgagagaaaggagccccacatccactgaaacatcctttggttctcaagcttcttctggaggcagtaaggaaaaataaaacccaccaaggctcaagaagggaactatagaaaagttcaggtttttaggctatagcagagacagtgagaaagcatctgggcctttctcttcctcttggtccaggggacctcattcaccaactagagcttggtgtacaggaacggggtcacagtgctgagggggcttgagtcccacctttcagcttgatggatgctcacctcttctcagccccagctcgtgccctgtttttctagccatagcccccagattactcacagctcctcatgccatttcctgtccagattgctatgtatgactctgacctctcttgtccagtggtctggtgctcacctcctctcactgctagaatattcaccaagggtttgcatttgggaagtcccttaccagctcctgcttagagctggtagggccatacatgtccacactcccaactggtggctctcccgctgaatggggcctcagcaggtgcccaagctgctacaaccttggccactctgtttctccaccccagcactgggcatggtaattagcctttccccatgttaatttattcagttttttcaagggtcaactgaattccccacttcctgggtaagaagcatgatctccttttaatttcacgtctaagatcctggcagcttcccctagctggttcctctgtagtcctgctgggactgtcagctcatttaaatgtgggtctgcagaaggctttaggtctcccccaacccccttacctttcacagaggaacctttcatcaggataaatgattattgctgccctgtgggtcttgctcaatactgttcatacctggagagagaaggtattgaaacatctcctttatgtgtgactttcccaaatttttaaaaattgtttatggtttaggccccttaaatactgtgtagcaggatgaagtctaccattaccagctgggtcaccttggatgggtctgtcaacatctaagcctcagttccctcacctgtaaaaatgagggtagtccctacctcataagggatattgtgaggatggaaagcgaaagtgtgagaaaatacctcccaagtgcctggtacatagtgggtgctaaataaaccactttttgtctgcaactgtc

SEQ ID NO: 1083 - DNA, 1841 bp, Homo sapiens
tttcaagggtgacttgatttcgcctgatcctggtcggcagggtggggtttcttggcattcctcaggccgggggatgcgacgtctgggtgtggaggtgatgagctaggggttctgtggcactccggctctgctcagggcgacctgcgtaggggcctctggggcaggcccgctttctgtcaaaatggcagcgcccagcgtgcgcgggtatctctgaagttggggtttaagattcttgcccgtgagagcgaacgagcctgccgtacttctgattttgaaacacctgggtctgggcttcccgggcgagcggtggaacctgtgagaagtttctacaatggtgggctcagctctcaggagaggtgcccatgcatatgtctacctggtgagtaaggccagtcacatctccagaggccatcagcaccaggcctggggatcgaggcctcctgcagcagagtgtgccacccaaagagctccaggcagtgtggtggagctgctgggcaaatcctaccctcaggacgaccacagcaacctcacccggaaggtcctcaccagagttggcaggaacctgcacaaccagcagcatcaccctctgtggctgatcaaggagagggtgaaggagcacttctacaagcagtatgtgggccgctttgggaccccgttgttctcggtctacgacaacctttctccagtggtcacgacctggcagaactttgacagcctgctcatcccagctgatcaccccagcaggaagaagggggacaactattacctgaatcggactcacatgctgagagcgcacacgtctgcacaccagtgggacttgctgcacgcgggactggatgccttcctggtggtgggtgatgtctacaggcgtgaccagatcgactcccagcactaccctattttccaccagctggaggccgtgcggctcttctccaagcatgagttatttgctggtataaaggatggagaaagcctgcagctctttgaacaaagttctcgctctgcgcataaacaagagacacacaccatggaggccgtgaagcttgtagagtttgatcttaagcaaacgcttaccaggctcatggcacatctttttggagatgagctggagataagatgggtagactgctacttcccttttacacatccttcctttgagatggagatcaactttcatggagaatggctggaagttcttggctgcggggtgatggaacaacaactggtcaattcagctggtgctcaagaccgaatcggctgggcttttggcctaggattagaaaggctagccatgatcctctacgacatccctgatatccgtctcttctggtgtgaggacgagcgcttcctgaagcagttctgtgtatccaacattaatcagaaggtgaagtttcagcctcttagcaaatatccggctgtgatcaatgatatttcattctggttgccctctgagaattacgcagaaaatgatttctatgacttagtccgaacaattggaggagacctggtggaaaaggttgatctcatagacaagtttgtacatccaaagacgcacaagaccagccactgctaccgcatcacgtaccgccacatggaacggactctgtcccagagagaggtcaggcacatccaccaggccttgcaggaggctgcagtccagctgttgggtgtggagggcaggttctgatgtcaccacttcactcaggctgcagccctcttggggctccaggatttgctgaaagagaaaaagatatggtttgtgaactggggcatcaatcatcttttgataaatggatcagttttaggactttcagaaaataaaagatcgctcttgaaaagct

SEQ ID NO: 1084 - DNA, 4830 bp, Homo sapiens
caaccggttccgagtttgaggcactaggaggagggggagaagcggctgcagcggccgcggcaggagcagcgggagctacagcatcagcaagagcaacagtagctacagccccggcggcggtgcctgttccagtctttgctgctgcagtccgtgcaaccacccagagggggaggggggaaccaccagtcgctgaggaacaagagaaggggggaaagtttaggcgagccttgggggggggggggccagcgccggagccgcgtgagagagggagccgtgttttggtaggggggagtcggactgcaactggcagcagagcgtctccccggccgtgtggactctacaccccctactcctgccgcttctgctgctgcctgtggctggagggtccccctggggctgaatctttgggacttgaccccgttccctcccccttccctcactccccagccgggcgggagcatttattccccagattaattccccttttgggggggggcgggtgtgtgtgtgtgtgtgtgtgtgtgtgtgtgttgggggaagcgtccctgaaatagtaaatattattgagctctttttgcccttttcctgtccgtttttttaatttccttttttgaggtgggaaaactgaaacccaccttgattcgtcccctctcccccctccccaccttccctcgccctaatcccccaacgaggaaggaaggagcagttggttcaatctctggtaatctatgccagcaattatgacaatgttagcagaccatgcagctcgtcagctgcttgatttcagccaaaaactggatatcaacttattagataatgtggtgaattgcttataccatggagaaggagcccagcaaagaatggctcaagaagtactgacacatttaaaggagcatcctgatgcttggacaagagtcgacacaattttggaattttctcagaatatgaatacgaaatactatggactacaaattttggaaaatgtgataaaaacaaggtggaagattcttccaaggaaccagtgcgaaggaataaaaaaatacgttgttggcctcattatcaagacgtcatctgacccaacttgtgtagagaaagaaaaggtgtatatcggaaaattaaatatgatccttgttcagatactgaaacaagaatggcccaaacattggccaacttttatcagtgatattgttggagcaagtaggaccagcgaaagtctctgtcaaaataatatggtgattcttaaactcttgagtgaagaagtatttgatttctctagtggacagataacccaagtcaaatctaagcatttaaaagacagcatgtgcaatgaattctcacagatatttcaactgtgtcagtttgtaatggaaaattctcaaaatgctccacttgtacatgcaaccttggaaacattgctcagatttctgaactggattcccctgggatatatttttgagaccaaattaatcagcacattgatttataagttcctgaatgttccaatgtttcgaaatgtctctctgaagtgcctcactgagattgctggtgtgagtgtaagccaatatgaagaacaatttgtaacactatttactctgacaatgatgcaactaaagcagatgcttcctttaaataccaatattcgacttgcgtactcaaatggaaaagatgatgaacagaacttcattcaaaatctcagtttgtttctctgcacctttcttaaggaacatgatcaacttatagaaaaaagattaaatctcagggaaactcttatggaggcccttcattatatgttgttggtatctgaagtagaagaaactgaaatctttaaaatttgtcttgaatactggaatcatttggctgctgaactctatagagagagtccattctctacatctgcctctccgttgctttctggaagtcaacattttgatgttcctcccaggagacagctatatttgcccatgttattcaaggtccgtttattaatggttagtcgaatggctaaaccagaggaagtattggttgtagagaatgatcaaggagaagttgtgagagaattcatgaaggatacagattccataaatttgtataagaatatgagggaaacattggtttatcttactcatctggattatgtagatacagaaagaataatgacagagaagcttcacaatcaagtgaatggtacagagtggtcatggaaaaatttgaatacattgtgttgggcaataggctccattagtggagcaatgcatgaagaggacgaaaaacgatttcttgttactgttataaaggatctattaggattatgtgaacagaaaagaggcaaagataataaagctattattgcatcaaatatcatgtacatagtaggtcaatacccacgttttttgagagctcactggaaatttctgaagactgtagttaacaagctgttcgaattcatgcatgagacccatgatggagtccaggatatggcttgtgatactttcattaaaatagcccaaaaatgccgcaggcatttcgttcaggttcaggttggagaagtgatgccatttattgatgaaattttgaacaacattaacactattatttgtgatcttcagcctcaacaggttcatacgttttatgaagctgtggggtacatgattggtgcacaaacagatcaaacagtacaagaacacttgatagaaaagtacatgttactccctaatcaagtgtgggatagtataatccagcaggcaaccaaaaatgtggatatactgaaagatcctgaaacagtcaagcagcttggtagcattttgaaaacaaatgtgagagcctgcaaagctgttggacacccctttgtaattcagcttggaagaatttatttagatatgcttaatgtatacaagtgcctcagtgaaaatatttctgcagctatccaagctaatggtgaaatggttacaaagcaaccattgattagaagtatgcgaactgtaaaaagggaaactttaaagttaatatctggttgggtgagccgatccaatgatccacagatggtcgctgaaaattttgttccccctctgttggatgcagttctcattgattatcagagaaatgtcccagctgctagagaaccagaagtgcttagtactatggccataattgtcaacaagttagggggacatataacagctgaaatacctcaaatatttgatgctgtttttgaatgcacattgaatatgataaataaggactttgaagaatatcctgaacatagaacgaactttttcttactacttcaggctgtcaattctcattgtttcccagcattccttgctattccacctacacagtttaaacttgttttggattccatcatttgggctttcaaacatactatgaggaatgtcgcagatacgggcttacagatactttttacactcttacaaaatgttgcacaagaagaagctgcagctcagagtttttatcaaacttatttttgtgatattctccagcatatcttttctgttgtgacagacacttcacatactgctggtttaacaatgcatgcatcaattcttgcatatatgtttaatttggttgaagaaggaaaaataagtacatcattaaatcctggaaatccagttaacaaccaaatctttcttcaggaatatgtggctaatctccttaagtcggccttccctcacctacaagatgctcaagtaaagctctttgtgacagggcttttcagcttaaatcaagatattcctgctttcaaggaacatttaagagatttcctagttcaaataaaggaatttgcaggtgaagacacttctgatttgtttttggaagagagagaaatagccctacggcaggctgatgaagagaaacataaacgtcaaatgtctgtccctggcatctttaatccacatgagattccagaagaaatgtgtgattaaaatccaaattcatgctgttttttttctctgcaactcgttagcagaggaaaacagcatgtgggtatttgtcgaccaaaatgatgccaatttgtaaattaaaatgtcacctagtggccctttttcttatgtgtttttttgtataagaaattttctgtgaaatatccttccattgtttaagcttttgttttggtcatctttatttagtttgcatgaagttgaaaattaaggcatttttaaaaattttacttcatgcccatttttgtggctgggctggggggaggaggcaaattcgatttgaacatatacttgtaattctaatgcaaaattatacaatttttcctgtaaacaataccaatttttaattagggagcattttccttctagtctatttcagcctagaagaaaagataatgagtaaaacaaattgcgttgtttaaaggattatagtgctgcattgtctgaagttagcacctcttggactgaatcgtttgtctagactacatgtattacaaagtctctttggcaagattgcagcaagatcatgtgcatatcatcccattgtaaagcgacttcaaaaatatgggaacacagttagttatttttacacagttctttttgtttttgtgtgtgtgtgctgtcgcttgtcgacaacagctttttgttttcctcaatgaggagtgttgctcatttgtgagccttcattaactcgaagtgaaatggttaaaaatatttatcctgttagaataggctgcatctttttaacaactcattaaaaaacaaaacaactctggcttttgagatgacttatactaatttacattgtttaccaagctgtagtgctttaagaacactacttaaaaagcaaaataaacttggtttacattta

SEQ ID NO: 1085 - DNA, 1451 bp, Homo sapiens
actgcctggaaacgggctgggcctgcctcggacgccgccggtgtcgcggattctctttccgcccgctccatggcggtggatgcctgactggaagcccgagtgggatgcggctgacgcggaagcggctctgctcgtttcttatcgccctgtactgcctattctccctctacgctgcctaccacgtcttcttcgggcgccgccgccaggcgccggccgggtccccgcggggcctcaggaagggggcggcccccgcgcgggagagacgcggccgagaacagtccactttggaaagtgaagaatggaatccttgggaaggagatgaaaaaaatgagcaacaacacagatttaaaactagccttcaaatattagataaatccacgaaaggaaaaacagatctcagtgtacaaatctggggcaaagctgccattggcttgtatctctgggagcatatttttgaaggcttacttgatcccagcgatgtgactgctcaatggagagaaggaaagtcaatcgtaggaagaacacagtacagcttcatcactggtccagctgtaataccagggtacttctccgttgatgtgaataatgtggtactcattttaaatggaagagaaaaagcaaagatcttttatgccacccagtggttactttatgcacaaaatttagtgcaaattcaaaaactccagcatcttgctgttgttttgctcggaaatgaacattgtgataatgagtggataaacccattcctcaaaagaaatggaggcttcgtggagctgcttttcataatatatgacagcccctggattaatgacgtggatgtttttcagtggcctttaggagtagcaacatacaggaattttcctgtggtggaggcaagttggtcaatgctgcatgatgagaggccatatttatgtaatttcttaggaacgatttatgaaaattcatccagacaggcactaatgaacattttgaaaaaagatgggaacgataagctttgttgggtttcagcaagagaacactggcagcctcaggaaacaaatgaaagtcttaagaattaccaagatgccttgcttcagagtgatctcacattgtgcccggtcggagtaaacacagaatgctatcgaatctatgaggcttgctcctatggctccattcctgtggtggaagacgtgatgacagctggcaactgtgggaatacatctgtgcaccacggtgctcctctgcagttactcaagtccatgggtgctccctttatctttatcaagaactggaaggaactccctgctgttttagaaaaagagaaaactataattttacaagaaaaaattgaaagaagaaaaatgttacttcagtggtatcagcacttcaagacagagcttaaaatgaaatttactaatattttagaaagctcatttttaatgaataataaaagttaattatctttttgagct

SEQ ID NO: 1086 - DNA, 2221 bp, Homo sapiens
cacgagggcccgggccgcgagcagccgcggctgtcccggtcgccacccttagcagcggtcgaggtcggtgccgaagcggtgttccccgccttagccgctggcgcctcccaagagagcggccggtgggccctcgtcctgtcagtggcgtcggaggccggcgctgcggtggccgcgcccttctggtgctcggacaccgctgaggagccggggccgggcacggctggctgacggctccgggcagctaaggctgcccgaggagaaggcggcggccgcggcgtaggcgcacgtccggcgggctcctggagcctggaggaggccgaggggaccatgtccgggaggcgcttccacctctccaccaccgaccgcgtcatcaaagctgtcccctttcctccaacccaacggcttactttcaaggaagtatttgagaatgggaaacctaaagttgatgttttaaaaaaccatttggtaaaggaaggacgactggaagaggaagtagccttaaagataatcaatgatggggctgccatcctgaggcaagagaagactatgatagaagtagatgctccaatcacagtatgtggtgatattcatggacaattctttgacctaatgaagttatttgaagttggaggatcacctagtaacacacgctacctctttctgggtgactatgtggacagaggctatttcagtatagagtgtgtgctgtatttatggagtttaaagattaatcatcccaaaacattgtttctgcttcggggaaatcatgaatgcaggcatcttacagactatttcaccttcaaacaggaatgtcgaatcaaatattcggaacaggtgtatgatgcctgtatggagacatttgactgtcttcctcttgctgccctcttaaaccagcagtttctctgtgtacatggaggaatgtcacctgaaattacttctttagatgacattaggaaattagacaggtttacggaacctcccgcctttggacctgtgtgtgacctgctttggtctgatccctcagaggattatggcaatgagaagaccttggagcactatacccacaacactgtccgagggtgctcttatttctacagttaccctgcagtttgtgaatttttgcagaacaataatttactatcaattatcagagcccatgaagcccaagatgctgggtatcgaatgtacaggaagagccaagccacaggctttccatcacttattacaattttctctgcccccaattacctagatgtctataacaataaagctgctgtgttgaaatatgaaaacaatgtcatgaatatcaggcagtttaactgttctccacacccctactggcttccaaactttatggatgttttcacatggtctttgccttttgttggggaaaaagtcacagagatgctggtaaatgtgctcaacatatgctctgatgacgaactgatttctgatgatgaagcagaaggaagcactacagttcgtaaggagatcatcaggaataagatcagagccattgggaagatggcacgggtcttttcaattcttcggcaagaaagtgagagtgtgctgactctcaagggcctgactcccacaggcacactccctctgggcgtcctctcaggaggcaagcagactatcgagacagccacagtagaagcggtagaggcccgggaagccatcagagggttctcgcttcagcacaagatccggagttttgaagaagcgcgaggtctggaccgaattaatgagcgaatgccaccccgaaaggatagcatacacgctggtgggccaatgaaatctgtaacctcagcacactcacatgctgcgcacaggagcgaccaagggaagaaagcccattcatgacttagagtcctgccgtggctcaggtggatctaaaactcaagaacaaattctatttatttattattggaaaatgaaaagcaactcaaaacaacttcaacctggaggtgcatttataattcagtctgcatttattctgtaaaaaggtgactgttttataaattcttttaatttatgttcaatatatataaaaagtgcatctgttttgtttttcccttttttctccataattttaagaaatgaatctgattgttgtcaacacatttgtgaagtcttgtgctataaaggggaacttcccctaataaaagggccttggaaacctcaaaaaaaaaaaaaaaaaaaaaaaaaaaaaaaaaaa

SEQ ID NO: 1087 - DNA, 2070 bp, Homo sapiens
agatcggagagggcacagggccagggactctggccagacataggcccaggtctgtggctggccaactgcggctgtggggcctggcatgtgtctcaacatggcactggagctctacatggacctgctgtcagcaccctgccgtgccgtctacatcttctcgaagaagcatgacatccagttcaactttcagtttgtggatctgctgaaaggtcaactcccactgctgcctggcaggcctggtcctggggggaggcaggacacacagattgcggcttttctttttttcttgttttttgatggagtctcgctctgttgcccagcatggagtacggtggtgctatctcggctcactgcaacctctgctgggttcaagtgcgtctcctgcctcagcctcccgagtagctgggattagaggtgcatgccaccacgcccagctaattttttgtatttttaacaggggtttcaccatgttggccaggctggtctcaaactcctgacctcaagtgatctgcccacctcagcctccagagtgctgggattacaggcgtgagccaccgcgcacagcctgataggggcgtttctgaggagcagagacagagacaagggaatcaccccagaggtccacagggaaggaaaagatgccacgcggcttgtaggctgcatccttgtccagcctaccttagtcagtgctcactaatgacagtccccacgccacagatgaacaggcttttcgaggagaagggggaaggaacagtagctgggactccctgggctcccaccaggcaccctggcttccttgtgggattctaggaccttgtgaactcagcacctgcccaccaggttggcaaagggggcagaagtgcacagtccgtctacacccatcctccccagtgttcagaaaggctcagggctccactaaccctgagtgagggtcagaggggtgggctccaactccatccccagcacagagggactccaaaagctcagcctgcaaaagcagaagcctctagaacacagaggaagagacagggaagctgtggaaatgaacgggctgcgagtggagcccccagaaatgtttccaactggaggcggctggtccaggaagagtttcagttcctgcccccacctcaggttccctgttaagatgaccctgattgtgtccgagaagcttccctttggatgtccagctgtgtgctgggcctggcttccttaaagtggagacagagtgagagcgatgggattgcggatgggacccaggccctcagggcttcaggtcaccaccacagcaaaggatacattgacatcaaccccctcaggaagctgcccagcctcaaagatgggaaatttatcttaagtgaaagttgctgatcccaaagataacagggaaggaagtttcagctgagaagatggagcatgcagtggaagaggtgaagaacagcctgcagctctttgaggagtattttctgcaggataagatgttcatcaccgggaaccaaatctcactggctgacctggtggccgtggtggagatgatgcagcccatggcagccaactataatgtcttcctcaacagctccaagctagctgagtggcgtatgcgggtggagctgaatattggctgtggcctctttagggaggcccatgatcgactaatgcagttggccgactgggacttttcaacattggatccaatggtcacgaggaaaatctgccgggcacggtggctcacgcctgtaatcccagcactttgagaggccgaggctggcaggtcacttgaggccaggagttcaagaccagcctggccaacatggtgaaaccctgtctctactaaaaatacaattagctgagcatggtggcacatgcctgaaatcccagctacccgggtggctgaggcacgagaatcgcttgaacccaggaggcagaggttgcagtgagcagagattgcaccactgcacttcagcctgagtgacagagaggggcaaagtcaaaaaacaaacaaacgaaccaacccacacactctcacttttatcttgtttctataaattaataaatacagcctttgtgagttgg

SEQ ID NO: 1088 - DNA, 1637 bp, Homo sapiens
ggcaagacgcctcttcagttgtctgctactcagaggaaggggcggttggtgcggcctccattgttcgtgttttaaggcgccatgaggggtgacagaggccgtggtcgtggtgggcgctttggttccagaggaggcccaggaggagggttcaggccctttgtaccacatatcccatttgacttctatttgtgtgaaatggcctttccccgggtcaagccagcacctgatgaaacttccttcagtgaggccttgctgaagaggaatcaggacctggctcccaattctgctgaacaggcatctatcctttctctggtgacaaaaataaacaatgtgattgataatctgattgtggctccagggacatttgaagtgcaaattgaagaagttcgacaggtgggatcctataaaaaggggacaatgactacaggacacaatgtggctgacctggtggtgatactcaagattctgccaacgttggaagctgttgctgccctggggaacaaagtcgtggaaagcctaagagcacaggatccttctgaagttttaaccatgctgaccaacgaaactggctttgaaatcagttcttctgatgctacagtgaagattctcattacaacagtgccacccaatcttcgaaaactggatccagaactccatttggatatcaaagtattgcagagtgccttagcagccatccgacatgcccgctggttcgaggaaaatgcttctcagtccacagttaaagttctcatcagactactgaaggacttgaggattcgttttcctggctttgagcccctcacaccctggatccttgacctactaggccattatgctgtgatgaacaaccccaccagacagcctttggccctaaacgttgcatacaggcgctgcttgcagattctggctgcaggactgttcctgccaggttcagtgggtatcactgacccctgtgagagtggcaactttagagtacacacagtcatgaccctagaacagcaggacatggtctgctatacagctcagactctcgtccgaatcctctcacatggtggctttaggaagatccttggccaggagggtgatgccagctatcttgcttctgaaatatctacctgggatggagtgatagtaacaccttcagaaaaggcttatgagaagccaccagagaagaaggaaggagaggaagaagaggagaatacagaagaaccacctcaaggagaggaagaagaaagcatggaaactcaggagtgacattcccttcactccttttcctacccaagggggaagactggagcctaagctgcctgctactgggctttacatggtgacagacatttccgtgggatagggaagatagcaggaagaaaagtaaactccatagaagtgtcattccactgggttttgatattggcttagctgccagtctcccatttgtgacctatgccatccatctataatggaggataccaacatttcttcctaatattctataatctccaactcctgaaaacccctctctcaactaatactttgctgttgaaatgttgtgaaatgttaagtgtctggaaatttttttttctaagaaaaactattaaagtacttcctagtaaaaaaaaaaaaaaaaaaaaaaaaaa

SEQ ID NO: 1089 - DNA, 9351 bp, Homo sapiens; identical to SEQ ID NO: 216

SEQ ID NO: 1090 - DNA, 2115 bp, Homo sapiens
ggcggagcggcgggcggggcgtcgccgtactaggcctgccccctgtccggccagcccctcgaagcacctactccacaggtccagccggccggtgagcgcctggggaccgcagaggtgagagtcgcgcccgggagtccgccgcctgcgccaggatggagttcgtgaaatgccttggccaccccgaagagttctacaacctggtgcgcttccggatcgggggcaagcggaaggtgatgcccaagatggaccaggactcgctcagcagcagcctgaaaacttgctacaagtatctcaatcagaccagtcgcagtttcgcagctgttatccaggcgctggatggggaaatgcgcaacgcagtgtgcatattttatctggttctccgagctctggacacactggaagatgacatgaccatcagtgtggaaaagaaggtcccgctgttacacaactttcactctttcctttaccaaccagactggcggttcatggagagcaaggagaaggatcgccaggtgctggaggacttcccaacgatctcccttgagtttagaaatctggctgagaaataccaaacagtgattgccgacatttgccggagaatgggcattgggatggcagagtttttggataagcatgtgacctctgaacaggagtgggacaagtactgccactatgttgctgggctggtcggaattggcctttcccgtcttttctcagcctcagagtttgaagaccccttagttggtgaagatacagaacgtgccaactctatgggcctgtttttgcagaaaacaaacatcatccgtgactatctggaagaccagcaaggaggaagagagttctggcctcaagaggtttggagcaggtatgttaagaagttaggggattttgctaagccggagaatattgacttggccgtgcagtgcctgaatgaacttataaccaatgcactgcaccacatcccagatgtcatcacctacctttcgagactcagaaaccagagtgtgtttaacttctgtgctattccacaggtgatggccattgccactttggctgcctgttataataaccagcaggtgttcaaaggggcagtgaagattcggaaagggcaagcagtgaccctgatgatggatgccaccaatatgccagctgtcaaagccatcatatatcagtatatggaagagatttatcatagaatccccgactcagacccatcttctagcaaaacaaggcagatcatctccaccatccggacgcagaatcttcccaactgtcagctgatttcccgaagccactactcccccatctacctgtcgtttgtcatgcttttggctgccctgagctggcagtacctgaccactctctcccaggtaacagaagactatgttcagactggagaacactgatcccaaatttgtccatagctgaagtccaccataaagtggatttactttttttctttaaggatggatgttgtgttctctttatttttttcctactactttaatccctaaaagaacgctgtgtggctgggacctttaggaaagtgaaatgcaggtgagaagaacctaaacatgaaaggaaagggtgcctcatcccagcaacctgtccttgtgggtgatgatcactgtgctgcttgtggctcatggcagagcattcagtgccacggtttaggtgaagtcgctgcatatgtgactgtcatgagatcctacttagtatgatcctggctagaatgataattaaaagtatttaatttgaagcaccatttgaatgttcgtaatagtagaaaatgatgtgaattttctttctgttcggctcctatttttctcatcattttgttttctttaattgggttgaatggagtagatagaaatatttatggtttaggtaacagttagatgtttcctaagaatgcaaactgccttttccacacaaaggctgggaataaaattctgggtattctcgtattctcatttaaaggagtttagctttcagagagaaacagcaggattgcttttgaccttttagaagattggtctccagtaaaggtggacatttttgagatttttataataaagaatttaattgctctgcatttgtcaagtaaaaaaaaaa

SEQ ID NO: 1091 - DNA, 5942 bp, Homo sapiens
aaaaggcggcaaggagccgagaggctgcttcggagtgtgaggaggacagccggaccgagccaacgccggggactttgttccctccgcggaggggactcggcaactcgcagcggcagggtctggggccggcgcctgggagggatctgcgccccccactcactccctagctgtgttcccgccgccgccccggctagtctccggcgctggcgcctatggtcggcctccgacagcgctccggagggaccgggggagctcccaggcgcccgggactggagactgatgcatgagggggctacggaggcgcaggagcggtggtgatggtctgggaagcggagctgaagtgccctgggctttggtgaggcgtgacagtttatcatgaccgtgttcaggcaggaaaacgtggatgattactacgacaccggcgaggaacttggcagtggacagtttgcggttgtgaagaaatgccgtgagaaaagcaccggcctccagtatgccgccaaattcatcaagaaaaggaggactaagtccagccggcggggtgtgagccgcgaggacatcgagcgggaggtcagcatcctgaaggagatccagcaccccaatgtcatcaccctgcacgaggtctatgagaacaagacggacgtcatcctgatcttggaactcgttgcaggtggcgagctgtttgacttcttagctgaaaaggaatctttaactgaagaggaagcaactgaatttctcaaacaaattcttaatggtgtttactacctgcactcccttcaaatcgcccactttgatcttaagcctgagaacataatgcttttggatagaaatgtccccaaacctcggatcaagatcattgactttgggttggcccataaaattgactttggaaatgaatttaaaaacatatttgggactccagagtttgtcgctcctgagatagtcaactatgaacctcttggtcttgaggcagatatgtggagtatcggggtaataacctatatcctcctaagtggggcctccccatttcttggagacactaagcaagaaacgttagcaaatgtatccgctgtcaactacgaatttgaggatgaatacttcagtaataccagtgccctagccaaagatttcataagaagacttctggtcaaggatccaaagaagagaatgacaattcaagatagtttgcagcatccctggatcaagcctaaagatacacaacaggcacttagtagaaaagcatcagcagtaaacatggagaaattcaagaagtttgcagcccggaaaaaatggaaacaatccgttcgcttgatatcactgtgccaaagattatccaggtcattcctgtccagaagtaacatgagtgttgccagaagcgatgatactctggatgaggaagactcctttgtgatgaaagccatcatccatgccatcaacgatgacaatgtcccaggcctgcagcaccttctgggctcattatccaactatgatgttaaccaacccaacaagcacgggacacctccattactcattgctgctggctgtgggaatattcaaatactacagttgctcattaaaagaggctcgagaatcgatgtccaggataagggcgggtccaatgccgtctactgggctgctcggcatggccacgtcgataccttgaaatttctcagtgagaacaaatgccctttggatgtgaaagacaagtctggagagatggccctccacgtggcagctcgctatggccatgctgacgtggctcagttactgtgcagcttcggctcaaatcccaatatccaggacaaggaagaagaaacccccctgcactgtgctgcttggcacggctattactctgtggccaaagccctttgtgaagccggctgtaacgtgaacatcaagaaccgagaaggagagacgcccctcctgacagcctctgccaggggctaccacgacatcgtggagtgtctggccgaacatggagccgaccttaatgcttgcgacaaggacggacacattgcccttcatctggctgtaagacggtgtcagatggaggtaatcaagactctcctcagccaagggtgtttcgtcgattatcaagacaggcacggcaatactcccctccatgtggcatgtaaagatggcaacatgcctatcgtggtggccctctgtgaagcaaactgcaatttggacatctccaacaagtatgggcgaacgcctctgcaccttgcggccaacaacggaatcctagacgtggtccggtatctctgtctgatgggagccagcgttgaggcgctgaccacggacggaaagacggcagaagatcttgctagatcggaacagcacgagcacgtagcaggtctccttgcaagacttcgaaaggatacgcaccgaggactcttcatccagcagctccgacccacacagaacctgcagccaagaattaagctcaagctgtttggccactcgggatccgggaaaaccacccttgtagaatctctcaagtgtgggctgctgaggagctttttcagaaggcgtcggcccagactgtcttccaccaactccagcaggttcccaccttcacccctggcttctaagcccacagtctcagtgagcatcaacaacctgtacccaggctgcgagaacgtgagtgtgaggagccgcagcatgatgttcgagccgggtcttaccaaagggatgctggaggtgtttgtggccccgacccaccacccgcactgctcggccgatgaccagtccaccaaggccatcgacatccagaacgcttatttgaatggagttggcgatttcagcgtgtgggagttctctggaaatcctgtgtatttctgctgttatgactattttgctgcaaatgatcccacgtcaatccatgttgttgtctttagtctagaagagccctatgagatccagctgaaccaagtgattttctggctcagtttcctgaagtcccttgtcccagttgaagaacccatagccttcggtggcaagctgaagaacccactccaagttgtcctggtggccacccacgctgacatcatgaatgttcctcgaccggctggaggcgagtttggatatgacaaagacacatcgttgctgaaagagattaggaacaggtttggaaatgatcttcacatttcaaataagctgtttgttctggatgctggggcttctgggtcaaaggacatgaaggtacttcgaaatcatctgcaagaaatacgaagccagattgtttcggtctgtcctcccatgactcacctgtgtgagaaaatcatctccacgctgccttcctggaggaagctcaatggacccaaccagctgatgtcgctgcagcagtttgtgtacgacgtgcaggaccagctgaaccccctggccagcgaggaggacctcaggcgcattgctcagcagctccacagcacaggcgagatcaacatcatgcaaagtgaaacagttcaggacgtgctgctcctggacccccgctggctctgcacaaacgtcctggggaagttgctgtccgtggagaccccacgggcgctgcaccactaccggggccgctacaccgtggaggacatccagcgcctggtgcccgacagcgacgtggaggagctgctgcagatcctcgatgccatggacatctgcgcccgggacctgagcagcgggaccatggtggacgtcccagccctgatcaagacagacaacctgcaccgctcctgggctgatgaggaggacgaggtgatggtgtatggtggcgtgcgcatcgtgcccgtggaacacctcacccccttcccatgtggcatctttcacaaggtccaggtgaacctgtgccggtggatccaccagcaaagcacagagggcgacgcggacatccgcctgtgggtgaatggctgcaagctggccaaccgtggggccgagctgctggtgctgctggtcaaccacggccagggcattgaggtccaggtccgcggcctggagacggagaagatcaagtgctgcctgctgctggactcggtgtgcagcaccattgagaacgtcatggccaccacgctgccagggctcctgaccgtgaagcattacctgagcccccagcagctgcgggagcaccatgagcccgtcatgatctaccagccacgggacttcttccgggcacagactctgaaggaaacctcactgaccaacaccatgggggggtacaaggaaagcttcagcagcatcatgtgcttcgggtgtcacgacgtctactcacaggccagcctcggcatggacatccatgcatcagacctgaacctcctcactcggaggaaactgagtcgcctgctggacccgcccgaccccctggggaaggactggtgccttctcgccatgaacttaggcctccctgacctcgtggcaaagtacaacaccagtaacggggctcccaaggatttcctccccagccccctccacgccctgctgcgggaatggaccacctaccctgagagcacagtgggcaccctcatgtccaaactgagggagctgggtcgccgggatgccgcagactttttgctgaaggcatcctctgtgttcaaaatcaacctggatggcaatggccaggaggcctatgcctcgagctgcaacagcggcacctcttacaattccattagctctgttgtatcccggtgagggcagcctctggcttgggcagggtctgtttggactgcagaagcaagggggtgatgtagcccatccttccctttggagatgctgagggtgtttcttcctgcacccacagccagggggatgccactcctccctccggcttgacctgtttctctgccgctacctccctccccgtctcattccgttgtctgtggatggtcattgcagtttaagagcagaacagatcttttactttggccgcttgaaaagctagtgtacctcctctcagtgttttggactccatctctcatcctccagtaccttgcttcttactgataattttgctggaattcctaacttttcaatgacattttttttaactactatattgattgtcctttaaaaaagaaaagtgcatatttatccaaaatgtgtatttcttatacgcttttctttgttataccatttcctcagcttatctcttttatatttgtaggagaaactcccatgtatggaatcccactgtatgatttataaacagacaatatgtgagtgccttttgcagaagagggtgtgtttgaaatcatcggagtcagccaggagctgtcaccaaggaaacgctacctctctgtcccttgctgtatgctgatcatcgccagaggtgcttcaccctgagttttgttttgtattgttttctgacagtttttctgttttgtttggcaaggaaaggggagaagggaatcctcctccagggtgattttatgatcagtgttgttgctctaggaagacatttttccgtttgcttttgttccaatgtcaatgtgaacgtccacatgaaacctacacactgtcatgcttcatcattccctctcatctcaggtagaaggttgacacagttgtagggttacagagacctatgtaagaattcagaagacccctgactcatcatttgtggcagtcccttataattggtgcatagcagatggtttccacatttagatcctggtttcataacttcctgtacttgaagtctaaaagcagaaaataaaggaagcaagttttcttccatgattttaaattgtgatcgagttttaaattgataggagggaacatgtcctaattcttctgtcctgagaagcatgtaatgttaatgttatatcatatgtatatatatatatgcactatgtatatacatatatattaatactggtatttttacttaatctataaaatgtcgttaaaaagttgtttgtttttttctttttttataaataaactgttgctcgttgcattaaaaa

SEQ ID NO: 1092 - DNA, 1286 bp, Homo sapiens
gcggcagtgacttcgccgctgctgtagttccccggctggatgcggtgactggtgccagtgctcaggcgcccgctgcccttgacctcccgccccgcgagccctaactcagcgcaggaggaccggctgccgccgccgccgccgccaggctctgatgctggtgtctggtagaagaagattactcacagctctgctgcaggctcagaagtggccctttcaaccctccagagacatgagactagtgcagttccgggcaccccacctggtggggcctcacttgggcctggagacagggaatggtggaggggttatcaacctcaatgcctttgaccccacactcccaaagacgatgacgcagttcctagagcagggagaggccaccctctcagtggcaagaagagccttggctgcccagttgccagtcctaccatggtcggaggtaaccttcctggctccagtcacatggccagataaggtggtgtgtgtgggcatgaattatgtggaccactgcaaagaacagaacgtgcccgtgcccaaggagcccatcatcttcagcaagtttgccagctccatcgtggggccctatgatgaggtggtcctcccaccacagagccaggaggtagattgggaagtggagctggccgtggtcattggaaagaaaggcaagcacatcaaggccacagatgccatggcccacgtggccggcttcactgtggctcatgacgtgagtgctcgtgactggctaacaagacgcaatgggaaacagtggctgctgggaaaaaccttcgacaccttctgccctctgggccctgccttggtgaccaaggacagtgtagcagatccacacaacttaaagatctgctgccgagtgaatggggaagtcgtccagagcagcaacaccaaccagatggtattcaagacagaggacctgatagcctgggtctcccagtttgttaccttttacccaggggatgtcatcctaactgggacccccccaggtgtcggtgtattcaggaaacctcctgtctttctcaagaagggggatgaagtccagtgtgagattgaagaactaggtgtcatcatcaacaaggtggtgtgatggctcctgcacaggcccgacataggatgagggcatctgctcccactcagcctagcccagggaaaggcccagtggcaggtgtgggcaggtgccagccctgcaagccgcctcttctcggtagaagggagaaggacagagctctcttcaataaatgcgtcgggtcaaagcaaaaaaaaaaaaaaaaaaaaaa

SEQ ID NO: 1093 - DNA, 6345 bp, Homo sapiens
gtaaggtctcggaagtacgaggcggaggggacgaaaaacggggggccagactgttgtggctgtggtggagacgagaaaccaggaagaagaggctcgcctcccactcggcgacagtaagcgaagcagccgaaggcgagcgccgacatcagcagctgccccctaaatcccgcccttcgtcttggcggcagcgggagactgagagacgcgcgcagcaggggcgggactggagaggggccccgcgcgcggatctcgcgagagcattagagggcggaagcgctatccgagcaggatgcggttcgtggttgccttggtcctcctgaacgtcgcagcggcgggagccgtgccgctcttggccaccgaaagcgtcaagcaagaagaagctggagtacggccttctgcaggaaacgtctccacccaccccagcttgagccaacggcctggaggctctaccaagtcgcatccggagccgcagactccaaaagacagccctagcaagtcgagtgcggaggcgcagaccccagaagacacccccaacaagtcgggtgcggaggcaaagacccaaaaagacagctccaacaagtcgggtgcggaggcaaagacccaaaaaggcagcactagcaagtcgggttcggaggcgcagaccacaaaagacagcactagtaagtcgcatccggagctgcagactccaaaagacagcactggcaaatcgggtgcggaggcgcagaccccagaagacagccccaacaggtcgggtgcggaggcaaagacccaaaaagacagccctagcaagtcaggttcggaggcgcagaccacaaaagatgtccctaataagtcgggtgcggacggccagaccccaaaagacggctccagcaagtcgggtgcggaggatcagaccccaaaagacgtccctaacaagtcgggtgcggagaagcagactccaaaagacggctctaacaagtccggtgcagaggagcagggcccaatagacgggcccagcaagtcgggtgcggaggagcagacctcaaaagacagccctaacaaggtggttccagagcagccttcccggaaagaccattccaagcccatctccaacccttctgataacaaggagctccccaaggctgacacaaaccagcttgctgacaaagggaagctttctcctcatgctttcaaaaccgaatctggggaggaaactgacctcatttctcccccgcaggaggaagttaagtcttcagagcctactgaggatgtggagcccaaagaggctgaagatgatgatacaggacccgaggagggctcaccgcccaaagaagagaaagaaaagatgtccggttctgcctccagtgagaaccgtgaagggacactttcggattccacgggtagcgagaaggatgacctttatccgaacggttctggaaatggcagcgcggagagcagccacttctttgcatatctggtgactgcagccattcttgtggctgtcctctatatcgctcatcacaacaagcggaagatcattgcttttgtcctggaaggaaaaagatctaaagtcacccggcggccaaaggccagtgactaccaacgtttggaccagaagtcctaacagaatggtatattcctctggaaaaagatgaacgtcaccaatggattgtgctgctctcgtttcagctttgatttttttgtccttgagaaccttgtcctccctgctgatttgtttctaaatcaaaagaaatgaagaaaaaagtactgtgacctgagagacaccctcctctagaatttagtggcgggtctgggctggcagaggtagggggctgctttgggctttgcacctgcactttggtgacattgttcttctgtgttccctttatttatgctggtggcttccatccgttcctcctctgagggtgagtggaggggtatatggaaacacggctatgaccaaagggagatcccagcctgggcaggctgcgctgctgaccaccctccctggggcccgggctctgtaggaaagttggtccttgactgtggcattgcactctgcactgtttctctctgcagacctaggggaaaactgcaggtggaagtgcttttctactaaggcctcttactttgggggggatgtgccctacagaagacatagaagatggggaaatgccaatgggcaaagagctactttgaatacataattctcttcaaagacttcagcagcaaaccaaaacagcaggttaaaaaaaaagatgcttttttgggtgcaagtctaacctgtctagcatgagatcttcttgattttctgattattttatgtagcttgagacaaagtgaatcaacttccacttagttgtaccgagcataaaacagaacttgggcttcctggcagtgaggccactgtcccatcacagatttttaaaataaatatgatttgaagtagtgtgatctttcacacaatcatactcagtaggaactttttgaaatagggcaagtttatgtttcatgcgagaaaacatgaaggagggttttggttttggtctgcagtttttccaaagggcttttatgagatacatttcccacaaagtccattttgcctttgttgcctaaaacagacaaaatagacttagatttattaatagaaactatactctctgccaattttacctcagtgtatttaatggtcctttaatctgatataagatgccaagggtatttgataaaaattcttcttccatgccatgtcaggagttaatacaaatgaagaaattccgtgggttcccctgggataagtgagggtagtgtcttggacaacactattgtttgaaggtttatcttttctaatcatgctctaccgcattgtagagagcctaaagagagttgtttctgagctgatctcagggaaatacaaataacttgggagatgagggaaataagatgaattctgtgctgtcaaggcagtaagtctgaagaaaggaccatgcttcttatattatcttccaccttgcttaaaacagcccatagctttgagttgacattttcattcttggcggatagcctactttatgaaggtaaggaatgaactcctacccttcttgggtcattctctgtactgatgcgttagtcttataatactttgcaccaacctgaggaatcttctaggcttctctagcatcccctaagactgtggctatttcacgtctctctccctgcctgccttccttttcccttcctttcccctcctcatgttttctggttgtgcccatctgtaccagctcctttccatccaccttcgtatgcacccagatttttctgttcccatctgtcctatttgttattcatcccgctgctcaacttctccagtatgttgcttcccttaagttgccattcattctcttcatgacttttactaactcacttcggtctctgtctgtcaactaaacttttctaaaggttaccagttatccaatcaccaaatccatggctttttctcaaagcttagtcttgtccttggcagaactggacactattgaccatccaaatggaaattcccctttcttggtgtctctgacaaatggtcctttgccttatcttgtgctggtggtgaagaggccctcaaagccaggcctctctattcctttgactgtctcctcagccattaacccattcttcatcctcggagtgagtgattcccaagtctttgtcttggcttaatccctaaagaacccagttctgctggtatcgaatagttcagcttggttgtcattgaaaggaatttctctcttctgtccatcagcctgtccctcccaactgtctaggacagtcttcggtcacctaaattcctaactgcagacttttgccctttttctctctcatcaccaaagtcccatccatttttttttaataaaagatcctcagctacagtctttccattttccttgcttctcttattgcacacccccagcccattttgcttctctcttggattttgttttttcagatccacatttattgggtttcctgtccagcttcttggaaaggagctcactcttggaaagactgatctttccaaaatattttccctggtctgaagctttggtgtgaacttctcaaggcttagagaatccagttacagaccttttggggttcaggatgctatagattgacaccctcctgcctgtttttctctgcatcccaacctggccaaggcccctcctgtggggtgcccatctgtgcctttattccggctgtgccctcgactttccagcttcccatgtttctttggttaggtttctctcccttccttctttctccttccccaatccgcctgtttcgtcagggcccagtttgtttcctcatacaccttcctcactaccccaccccacatggttgactctttccctcagctccaccagctcttcatcatgccactcatttcagaacttgagcaaaacagggcagtcaggatctgatgtctttctggtctccctaagaaaactaagctcttgagggacagcccttggcaatgctttcctatctgctgatcatggtgaccttccttaggacttccagagttcagttccttctggcagagaggttttctttctccatgccatatggatgtgactcaaatgaggggtcccacagcttttcctggctaccacttgctgtgaccttatacatgttggggtttgctcttaaagaggagagcaggaagaaaggttggtttcagaaaccaagagggtcggcagtggacgcgtacattttgtcacggagtccacagagctgagcttttgagcagactctgagaagtatcattgcttgtgttgaaagaatacaacaggatttaagtttctctttagaaattgcactgaagaaaggccgggcgcggtggctccccctgtaatcccagcgctttgggaggccgaggcggggggatcacgaggtcaagagatcgagaccatcctggccaacatggtgaaaccccgtctctaataaaaatacaaaaattagccgggcatggtgacgtgcacctgtagtcccagctactagataggctgaggcaggagaattgcttgaatccgggaggcggaggttgcagtgagccgagatcgtgccactgaactccaacctgccaatagagcgagactccgtctcaaaaaaaaaaaaaaaaaagaaagaaatagcattgaagaaaataccgcacatcagaggaaagcttattttctgcatggtgtcttttcaaagatagaatatttgaagcatgttttctagcgattgtgtggatgagggtgagctggctgaggcatcgctcaagctggggggtggtgtgtaagaagcacgtggagccacaagaggcacctcctatagtcagctaagggcttccctttctgcgcccagcttttgggtgaagggtgatttctattagacacatctgtgcttcagtcatagatgttaatagaggaagcagttttcctgctgcagattcctgaatagagttgctgaaagagtctacttctggactcaggggaagttgaaggccagtctgtgtagaaaggctgaggcaacggggaaagacctgacagctagttacatacgctctgacatagtactcccatgatggcttccagtgacacatgtgctgatagaattctaaacctctggaatttccctgctggcgacttctatggccgttgactgtacagggtaacctgatgccagatgctatgggcgtgatgagaactagagcattgcagcatggaggaaactgtgaggcaccagatcctgtgcttctgcaggccattttctgaaaacccctgttaggaaggttggatttggcgtgacttgcttgagcaagagtcctggggagagattttgaggtttaatttaacggtatatccagagctaacagtgactcaactcgtctagttctgcaagtcagatgtacacttagagtctctctgtgaagggtttgggtctgagctgtatagtatgtcaaactgccagtaagccagcccctcaccctctgatagatattcctttaatgcaccagacttcatgtttgataaatgattaatggttgaaattgtttctcttcttttgtgttttcccagttaatagatggtcactgtttccacaatgttttatactttcagctttttgtaacttaactataattacttaattttatttttttaaagcttgttgtggtctaatgagaagtatttttcagtgcataatgtttttctgagcttctgtaaatgccatcccaatgtggtttggttttgttgaacagaaaccaaaataaatttcaaaatgttaaagcaatggaaaaaaaaaaaaaaaaaaaaaaaaaaaaaa

SEQ ID NO: 1094 - DNA, 1732 bp, Homo sapiens
gatgacacatccgaaaaataggaagtggccactacggaagctgttctgggccagaaagacttccagtttggagtcgtttgctgcggggagggaatgaatgggcgctgggaacacgcccgcgaggtggggacgcgccggccgtagcgaggtccttagcgtgtgagtggccggggtcgggtcgcttccccgcagcatggaggacgatgcaccagtgatctacgggctggagttccaggcacgtgccttaacacctcaaactgcagaaacagatgccattcggtttttggttgggacgcagtctcttaaatatgataatcagatccatatcatagattttgacgatgaaaacaacattataaataaaaatgtcctcctccatcaagcgggtgaaatctggcatattagcgctagccctgcagacagaggtgtgctgacgacctgctacaacagaacttcagacagcaaagtcctgacatgtgcagccgtgtggaggatgccgaaggaattggaatcaggcagccacgagtcccctgatgattcatccagcactgcacagaccctggagctgctctgtcaccttgacaacacagcccatggcaacatggcctgtgtcgtgtgggagccaatgggagatgggaagaaaatcatttccttggctgataaccatatcctgctgtgggatttacaggaaagctcgagccaggctgtgctggccagctcagcgtccctggaagggaagggacaactgaagttcacctcaggacggtggagcccacatcataactgcacccaggtggccacagcgaacgacaccaccctccgtggctgggacacccggagcatgagccagatctactgcatagagaatgcccacggacagctggtgcgggaccttgactttaatcccaataagcagtactacttggccagctgcggagacgactgtaaggtgaagttctgggacacccgaaatgtcaccgaacccgtgaagaccctggaggagcactcccactgggtgtggaacgtccgctacaaccactctcatgaccagctggtcctcacgggcagcagtgacagcagagtcatcctttccaacatggtgtccatctcgtcggagcccttcggccacttggtagacgacgatgacatcagtgaccaggaggaccaccgttctgaagagaagagcaaggagcccctgcaggacaacgtgatcgccacctacgaggagcacgaggacagcgtctatgccgtggactggtcctcggctgacccgtggctgtttgcctccctgagctatgacgggaggctcgtgatcaacagggtgcccagggccctgaagtaccacatcctgctatgactcccgggcctgggttatccaggtcccattgagtggttttcctcttggcagattctcaaacagtcgcagctctttggaggtgactcgtgttccaggtggatccctctctgggagagccgctgttcccttcctgtagcagcagcatttatgaatggggtgaatggggctattgtcgacggcacagctaatgcccgaacccagcccctgtcggcagagacagagccccacattattatgtgaataacaatgttttctgttttaagggtgtcaggagtttcgctttttaaaaaaatgtctgttcctgcaatagtaactcttctttctcttgagagtaaaaaatgaaataaaataaatccacgctgcaaaaaaaaaaaa

SEQ ID NO: 1095 - DNA, 1059 bp, Homo sapiens
cgctgctggttgaggctgtgtgggtcggggacgggccgaggcgatggcggagaagtttgaccacctagaggagcacctggagaagttcgtggagaacattcggcagctcggcatcatcgtcagtgacttccagcccagcagccaggccgggctcaaccaaaagctgaattttattgttactggcttacaggatattgacaagtgcagacagcagcttcatgatattactgtaccgttagaagtttttgaatatatagatcaaggtcgaaatccccagctctacaccaaagagtgcctggagagggctctagctaaaaatgagcaagttaaaggcaagatcgacaccatgaagaaatttaaaagcctgttgattcaagaactttctaaagtatttccggaagacatggctaagtatcgaagcatccggggggaggatcacccgccttcttaaccagctcaccctccctgtgtgaagatcccctgggactgcgatgcggcgtgaggctgggactgcgagtgctgacgccaccttcctgctgaggtgggactgggccctggacacacccctcagcccctctgtcctcattgtttggcctcatgggaccgaggggctggaggagaggcggagctgtgccccagctgttccagcagcttgtctggcgtcaactggctttcagagtgctgacccctcatcactgtggggatcattctctctgagggcagatgaggcgcaggaaaatagtcttggaaatgttaaatatgatgggtaaattaaaagttttacaacattctacctaatatttttcttttaacatactctttctgttctattgtattatggtgtccgaaagctaaataacgactaggaaaaatttttttaaaaaaagaaaaatcagtttaatgtgggaagtacttaagtggtattatattttacattttcaagtatagtgcataaagaatgttttaaatgtaactgttttcatggatttcaattagacatgcctataataaactaagtatgtggcttaaaaaaaaaaaaaaaaaaaaaaaaaaaaaaaa

SEQ ID NO: 1096 - DNA, 1983 bp, Homo sapiens
cgagtaaagtttgcaaagaggcgcgggaggcggcagccgcagcgaggaggcggcggggaagaagcgcagtctccgggttgggggcgggggcggggggggcgccaaggagccgggtggggggcggcggccagcatgcggccccgcagcgccctgccccgcctgctgctgccgctgctgctgctgcccgccgccgggccggcccagttccacggggagaagggcatctccatcccggaccacggcttctgccagcccatctccatcccgctgtgcacggacatcgcctacaaccagaccatcatgcccaaccttctgggccacacgaaccaggaggacgcaggcctagaggtgcaccagttctatccgctggtgaaggtgcagtgctcgcccgaactgcgcttcttcctgtgctccatgtacgcacccgtgtgcaccgtgctggaacaggccatcccgccgtgccgctctatctgtgagcgcgcgcgccagggctgcgaagccctcatgaacaagttcggttttcagtggcccgagcgcctgcgctgcgagcacttcccgcgccacggcgccgagcagatctgcgtcggccagaaccactccgaggacggagctcccgcgctactcaccaccgcgccgccgccgggactgcagccgggtgccgggggcaccccgggtggcccgggcggcggcggcgctcccccgcgctacgccacgctggagcaccccttccactgcccgcgcgtcctcaaggtgccatcctatctcagctacaagtttctgggcgagcgtgattgtgctgcgccctgcgaacctgcgcggcccgatggttccatgttcttctcacaggaggagacgcgtttcgcgcgcctctggatcctcacctggtcggtgctgtgctgcgcttccaccttcttcactgtcaccacgtacttggtagacatgcagcgcttccgctacccagagcggcctatcatttttctgtcgggctgctacaccatggtgtcggtggcctacatcgcgggcttcgtgctccaggagcgcgtggtgtgcaacgagcgcttctccgaggacggttaccgcacggtggtgcagggcaccaagaaggagggctgcaccatcctcttcatgatgctctacttcttcagcatggccagctccatctggtgggtcatcctgtcgctcacctggttcctggcagccggcatgaagtggggccacgaggccatcgaggccaactctcagtacttccacctggccgcctgggccgtgccggccgtcaagaccatcaccatcctggccatgggccagatcgacggcgacctgctgagcggcgtgtgcttcgtaggcctcaacagcctggacccgctgcggggcttcgtgctagcgccgctcttcgtgtacctgttcatcggcacgtccttcctcctggccggcttcgtgtcgctcttccgcatccgcaccatcatgaagcacgacggcaccaagaccgaaaagctggagcggctcatggtgcgcatcggcgtcttctccgtgctctacacagtgcccgccaccatcgtcatcgcttgctacttctacgagcaggccttccgcgagcactgggagcgctcgtgggtgagccagcactgcaagagcctggccatcccgtgcccggcgcactacacgccgcgcatgtcgcccgacttcacggtctacatgatcaaatacctcatgacgctcatcgtgggcatcacgtcgggcttctggatctggtcgggcaagacgctgcactcgtggaggaagttctacactcgcctcaccaacagccgacacggtgagaccaccgtgtgagggacgcccccaggccggaaccgcgcggcgctttcctccgcccggggtggggcccctacagactccgtattttatttttttaaataaaaaacgatcgaaaccatttcacttttaggttgctttttaaaagagaactctctgcccaacaccccc

SEQ ID NO: 1097 - DNA, 411 bp, Homo sapiens
gcccggaaacggaagtctcgttctttttcgtccttttccccggttgctgcttgctgtgagtgtctctagggtgatacgtgggtgagaaaggtcctggtccgcgccagagcccagcgcgcctcgtcgccatgcctcggaaaattgaggaaatcaaggacttcctgctcacagcccgacgaaaggatgccaaatctgtcaagatcaagaaaaataaggacaacgtgaagtttaaagttcgatgcagcagatacctttacaccctggtcatcactgacaaagagaaggcagagaaactgaagcagtccctgccccccggtttggcagtgaaggaactgaaatgaaccagacacactgattggaactgtattatattaaaatactaaaaatcctaaaaaaaaaaaaaaaaaaaaa

SEQ ID NO: 1098 - DNA, 2879 bp, Homo sapiens
acgcggaagtcaggtaggagcacccgccgctggcagccactctcctggccgccaaaccccagctggaactccggccacagccagcatgcagggcgaagagagcctccggatcctggtggagcccgaaggggacagcttcccgctgatggagatcagcacctgtgagaccgaggcctccgagcagtgggactatgtcctcgtggcccaacgtcacacccagagagacccccggcaggcgcggcagcaacagttcctggaggagctcaggagaaagggcttccacattaaggtgatccgggaccagaaacaggtcttctttgggatccgtgctgacaacagtgtctttggcctgtaccgcactctcctcctggagcctgaggggcctgccccccacgccgagctggccgcgccgaccaccatcccggtcaccacgagtctcagaatccgaatcgtgaacttcgttgtcatgaacaacaagacctcggctggtgagaccttcgaggatctgatgaaggacggggtctttgaggccaggttccccctgcacaagggggagggacgcctgaagaagacgtgggcgcggtggagacacatgttccgggagcagccagttgatgaaatcaggaactactttggggaaaaggtggccctgtacttcgtctggctgggctggtacacctacatgctggtgccggccgccctgacgggcctcttagtctttctgagcggattctcgctgtttgaggccagccagatcagcaaggagatctgtgaggcccacgacatcctcatgtgtcccctcggcgaccacagccgcaggtaccagcggctctcggaaacctgcacttttgccaagctcacccacctctttgacaatgatggcacggtggtgttcgccatcttcatggctctctgggccacggtgttcctggagatctggaagcggcagcgcgcccgcgtggtcctgcactgggacctgtacgtgtgggacgaggaacaggaggaaatggcacttcagctcattaactgccccgactacaagctccggccataccagcactcctacctacgcagcaccgtcatcctcgtcctgaccctgctcatgatctgcctcatgatcggcatggcccacgtcctggtggtctaccgcgtcctggcctccgcgctcttcagcagctcggccgtgcccttcctggaggagcaggtgaccacggccgtggtggtgaccggggctctggtgcactatgtgaccatcatcatcatgaccaagatcaacaggtgcgtggccctgaagctttgtgacttcgagatgcccaggaccttctcggagcgagagagcaggttcaccatccgcttcttcacactgcagttcttcacccatttctcgtctctcatctacatcgccttcatcctgggcaggatcaacggccaccccgggaagtccacgcgcctggcgggcttgtggaagctggaagagtgccacgccagcggctgcatgatggacctcttcgtgcagatggccatcatcatgggcctgaagcagacgctcagcaactgcgtcgagtacctggtcccgtgggtgacccacaagtgccgctctctgcgggcctccgagtccgggcacctgccccgggaccccgagctcagggactggcggcgcaactaccttctgaacccggtcaacaccttcagcctgttcgacgagttcatggagatgatgatccagtacggcttcaccaccatcttcgtggccgccttcccgctggcgccgctgctcgcgctcttcagcaacctcgtggagatccgcctggacgccatcaagatggtctggttgcagcggcgcctggtgccgcgcaaggccaaggacatcgggacctggctgcaggtgctggagaccatcggtgtgctggcggtcattgccaatgggatggtcattgccttcacatctgagttcatcccccgagtggtctacaagtaccgctatagcccatgcctgaaagaaggcaactctactgtcgactgcctcaagggctacgtcaaccacagcctgtccgtcttccacaccaaggacttccaggaccctgatgggattgagggctcagaaaacgtgactctgtgcagatacagggactaccgcaatccccccgattacaacttctccgagcagttctggttcctcctggccatccgcctggccttcgtcatcctctttgagcacgtggccttgtgcatcaagctcatcgccgcctggttcgtgcccgacatccctcagtcggtgaagaacaaggttctggaggtgaagtaccagaggctgcgtgagaagatgtggcatggaaggcagaggctgggtggggtgggggcaggctctcggcccccaatgcctgcccatcccaccccagcatccatcttcagtgccaggagcacagacgtgtagggccagagcccgtccagaggccaccaggagctgagacagtgccaccaccagcacctcccacaagcccaccgctgtgcgtgttgaggggtgctgtgagaaggctgtgcccatgtggggccgcaggaatcccctgtatgttcagggctgtgagctgccaccctattccgcctgctccgtctttgtgggggctctcaggcttggcacagccctgacttgaactctgggtgaccctgggcacccacagaactgggagtgagggctcctcaggcagccacaaggcaggaaaactggcgcaaatttcctgggcctccctctgacttctgggcgccagatcctgccgtgcccccatcctggctgttgggggtgtcctgagcccacctcgctggcctgttcccttcagccaacccgtttctgcagtaaaattaagcctgtctgtcttgcaaaa

SEQ ID NO: 1099 - DNA, 719 bp, Homo sapiens
gttactagaagggctccaggatggaggccgacctgacttctccgcctcggtgggctgggtcggcggctggagcattacccctactgcgggtcccgctgctggcagcgctggaaactgggtggacggcatgggttggtctcaggatttgttccgcgccttgtggagatcgctgtcaagggaagtgaaggagcacgtgggcacggaccaattcgggaacaaatactactacatcccgcagtacaagaactggagaggacaaactattcgagagaaaagaattgtagaagcagcaaataaaaaagaagtagactatgaagcaggggatattccaacagaatgggaagcttggattagaagaacaagaaagactccacctactatggaggaaatactaaagaatgaaaaacacagagaagaaatcaaaataaaaagccaagatttttatgaaaaagaaaaactccttagtaaagagaccagtgaggaactcctgcctccaccagttcaaactcaaattaaaggccatgcctctgctccatactttggaaaggaagaaccctcagtggctcccagcagcactggtaaaacctttcagccaggatcctggatgccacgagatggcaagagccacaatcaatgaatgcattatggtcaaatcttttcatgtatatggatgtgactattttaacaaataaaagaagtgaaaagttatttaccttgta

SEQ ID NO: 1100 - DNA, 1312 bp, Homo sapiens
ctacaggttgcgggcctttgtgaccccaggctgcggccgcaaggtgcgcagtagtgggctgggccggggcaccagtcgggtttggttttgctccgcccggccgagctgcagggaccgcacggtgcccgggtctcccgccgcagagcagccgctggcccgggccgggggagccggcgctgaccaccgcgcgctgtccccgcaggcagccggcctgccgccatggccgaccacctgatgctcgccgagggctaccgcctggtgcagaggccgccgtccgccgcggccgcccatggccctcatgcgctccggactctgccgccgtacgcgggcccgggcctggacagtgggctgaggccgcggggggctccgctggggccgccgccgccccgccaacccggggccctggcgtacggggccttcgggccgccgtcctccttccagccctttccggccgtgcctccgccggccgcgggcatcgcgcacctgcagcctgtggcgacgccgtaccccggccgcgcggccgcgccccccaacgctccgggaggccccccgggcccgcagccggcgccaagcgccgcagccccgccgccgcccgcgcacgccctgggcggcatggacgccgaactcatcgacgaggaggcgctgacgtcgctggagctggagctcgggctgcaccgcgtgcgcgagctgcccgagctcttcctgggccagagcgagttcgactgcttctcggacttggggtccgcgccgcccgccggctccgtgagctgctgagggcggccggcgcccgcccggcgtgccggagaggagaaagggcccgactgcccgccggaccctgcacccagcgactgggccccgcgcgcgccctccgcgagggtggaggcggcggctgtgtgcgcagggcccggcaccggactgggaccctggcgtccctccaggccttgcctcctgcgggaggacagtttggcttcacttctctgaccccagcctcggccgtaaagtgaaagagaccggaccagcttcagctttcggactctggttcttggatcgtgtcctctccccctcgccgccctcttcccccaatctgagccattgcaggcctctgcctgctgccccctctctcctcgggatcgggtccccagagccaccatctcctgagcctcccaccccgctgcctgggccctgtggttgctgggcctcccacctcaaggaggggaaggttgtacagcccgaacccgtggagcaatgccctgtctggcctccaaaaccaaaataaaactgggtcactttaaaaaaaaaaaaaaaaaaaaaa

SEQ ID NO: 1101 - DNA, 6822 bp, Homo sapiens
gctagccttgcgcggcgcgggagagcgcagtggcgccggcgggaaagggctgcggacctgcggcgccgcgttgtgcgttcgacgacgcggcaccggcttcgacgccctctgcccgctccagaagcagtaagaagacatgttggataacaagaagaggtgtagagtttgcatatatcaactgtggccttaatgagcatgttgacagcatcgatgctagacagacagtctttttactgctggattgtgcaagatatttaaccctattttgtttgaattatgacttaaatgtcaaacatcttaactaagaaaagggaaacattttagttttggaagtcagaatgccaaggagaaggaaaaatcttgggggaaatccttttcggaagactgcaaaccctaaggaagttgtcgtatccagtgttgctagtcgtgaggagccaaccactactctaccttccatgggtgagacaaaagttgatcaggaagaactcttcaccagtatctcagagatattttctgatctggatcctgatgtagtgtatttgatgctttctgaatgtgatttcaaagttgaaaatgctatggattgtctattagaattatctgccactgataccaagatagaagaatcatcttcacaaagtttcgttgcttctgagaaccaagtaggtgcagcagaaagtaaaataatggaaaaacgtcctgaagaagagagtgaagattcaaaaatggattcatttttggacatgcagctaactgaagacctggattccttaatacagaatgcttttgagaaattgaactcttctcctgatgaccaagtatactcatttttgccttcacaagatgttaatagttttaatgactcaagtgagtttataaatcctgattcaagtaatatgactcccattttttctacacaaaatatgaatttgaacggtgaaaatttagagaattctggttctactttaagtttaaacccattaccttcacattcagttttgaacgagtccaagtgttttataaaggataacacattggctttggaaagtaactacccggaagattctcttctcagtagttctttaaatgtagcaagtgactccatcgcaggttgtagcagtctcaatcaaaaacagaaagaacttttagaatctgagtgcgttgaggctcaattctctgaagctcctgtagatttggatgccagtgaacctcaggcttgtttaaaccttccagggcttgatttaccaggtacaggtggggatcagaaatctactcgggtctctgatgtgtttctaccttccgaagggttcaacttcaagccacacaaacatcctgaactgccaactaaggggaaggatgtgagttactgcccggtacttgctcctctcccattgctgttgcctcctccgccacctccaccgatgtggaatccaatgattcctgcttttgacctcttccaaggaaaccatggctttgtagctcctgttgtaaccacagctgcacactggagatctgtcaactacacatttccaccctcagttatttctcacacttccccaacaaaagtatggagaaataaagatggaacaagtgcttatcaagtacaagaaaccccagtttctcaggttgtaagaaagaagacatcttacgttggactagttcttgttcttctcagaggtcttccgggatctggaaaatcttttttggcaaggactttgcaagaggataatccaagtggagtcattcttagtactgatgattatttttatataaatggacagtaccagtttgatgtaaagtacttaggagaagcacatgaatggaaccagaatcgtgcaaaagaagcatttgagaagaagatatctcctataattatagataatacaaacctacaggcatgggaaatgaaaccatatgttgctttgtctcagaaacacaaatataaagtcctttttcgggaaccagacacatggtggaagtttaaaccaaaggaacttgcaaggcgtaacattcatggggtaagcaaagaaaaaataacaagaatgttggaacattatcaacgttttgtttcagtgccaataattatgagttcttcggttccagagaaaattgaacgtattgagttgtgtgcatattcttgtgaggatagaagcactagcccaagagacgatgaagatattatctctgaaaaagaagaaaatattttatctttatctttgaagcatctagagttcactgaagagaagaatcttgatgtaaccaaagaaacaatgttacctgagaatgttgcatatctctctaatgcagatttaaacaaaagaagaaaagaaataagtgatatgaatcctagcattcaaagtgctttaattctggaaactccacacatgtatttttctgactctgaaagcaaactacaggcaacagacaaaagtgaaaacgagcaaatagaaatggtggctgtaaaagggtatagtaaaactgacacagatagttctatggagagagtatcacctagtacttgctgtagtgaaaataatcaagaagactgtgatcttgcaaatagtggaccacttcaaaatgaaaaatcctcacctggtgaaatagtggaagaaagagcaacagtaacgaaaaaagcctttgggaaacaaaaaagcaaatcgactttggaaaagttcccaagacatgagctatcaaattttgttggtgactggccagttgataagactattggtcagaggacaaaaaggaacagaaaaactgaaaaaacttcatccgtacaaagcgacaaaaagtataattaccctcagtcacacaaattagttaacagtgtatctgtgaatacagattgtgtccagcaacgaggatctccacatgaaagtgtagaggatggcagaaagtcacagtgtgatgatgcttcagagccactcaatagctataaatatgatgcttataaaaatattgacaaaaactcattcaacattatgggtgactggccttcatctgattctttagctcagagggaacacagatcaagaatgccaaagactggtttaagtgagcccaacctagaaattggaacaaatgacaaaatgaatgaaatatccttatctacagcacatgaggcctgttggggcacaagctctcaaaaactaaagacattgggtagctccaatctaggaagttctgaaatgctgctcagtgaaatgacctgtgagagtcagacttgtctaagtaaaaagagtcatgggcaacacacatcgttgcctcttacttttaccaatagtgcaccaactgtttctggagtagtagaaccacaaacgttagctgaatgtcaagagcaaatgcctaagagagaccctggaaaagaagtaggcatgtgcacccagactgaaccacaggattttgctcttttatggaaaatagaaaagaataaaattagcatttcagattctatcaaagtattaacaggaagattagatggatttaagccgaaagttttcaatattaacacaaaatcagacgttcaagaagcaattccatatagagtaatgtatgataaaagcacgtttgttgaagaaagtgagcttaccagtgcagatgaatctgaaaatcttaacattctttgtaaactgtttggatccttttcattagaagccctgaaagacttatatgagaggtgcaataaagatattatttgggccacaagccttttgttggattctgaaactaagttatgtgaggatacagagtttgagaatttccaaaaatcgtgtgatggatcacaaattgggcctttttctctggggttgaatttgaaagaaattattagccaaagaggaactttagagaattctaattctcctgtgccagagtttagccatgggattggtattagtaacgctgactcacagtctacttgtgatgcagaaagaggaaactcagagcaggcggaaatgagagctgtcactcctgaaaaccatgaatcgatgacaagtatatttcccagtgctgctgtgggtctaaagaataataatgacatacttcctaacagccaggaagaacttttatatagcagtaagcagtcctttccaggtattctaaaagctactactcctaaagatatgagtgaaacagaaaaaaacctagtagtcacagagactggagacaacatacattctccttcacatttctctgatatttttaactttgtatctagtacttcaaatcttgaattaaatgaagaaatttattttactgattctcttgaaataaagagaaatgaaaattttccaaaggattatgtgaaattttcagatgaagaagaatttatgaatgaagatgagaaggaaatgaaggaaattctaatggcaggaagtagtttatcagctggagttagtggggaagataaaaccgagatattgaatcccactccagcgatggccaaatctctgaccatagactgtctggaattggcattaccccctgaactggcttttcaacttaatgaattatttggtcctgttggtattgattcagggtctctaacagttgaagattgtgtggttcatatagatctgaatctggcgaaagtgattcatgagaaatggaaagaatctgtaatggagcgacaaagacaagaagaggtgtcttgtggcaagtttatgcaagatccttccttggttggacatactgggcttgataatcctgaacaaaaatcatctcagagaacaggcaaaaaattactgaagactttaacagcatctgaaatgctacctttattggatcattggaatactcaaactaaaaaagtatcactcagagaaataatgtcagaagaaattgccttacaggaaaaacataatttgaaaagggagacccttatgtttgaaaaagattgtgccactaaactaaaggagaagcagctctttaagatatttccagccattaaccaaaattttctggtggacattttcaaggaccacaactattcattagaacacacagtgcaatttcttaactgtgttcttgaaggggaccctgtaaaaacagttgtagcccaagagtttgttcaccaaaatgagaatgtcacatctcatactggccagaagtctaaagagaaaaagccaaagaaattaaaagagactgaagaaacaccaagtgaactgtctttccaggactttgagtacccagactatgatgactacagagcagaggctttccttcaccaacagaagaggatggagtgctacagcaaggccaaagaagcttatcggatagggaaaaaaaatgtcgccaccttttatgcccagcagggtactcttcatgagcagaagatgaaagaagccaatcaccttgctgccatagagatctttgagaaagtcaatgcttcgctgctgccacagaatgttttagacctccatgggctgcatgtggatgaagctctagaacatttgatgagagttttagagaagaagactgaagaatttaagcagaacggtgggaagccctatttgtctgtgattacggggagaggaaaccacagccagggaggagttgctcgcatcaaaccagctgtcattaagtacctcataagccatagcttcaggttctctgaaattaaaccagggtgcttgaaagtcatgctaaagtaaaataaacatccttgaattagaagtatgaaggtttgtaggttaaaattacttttatttgcagtaattcagtcaattctaccctaaagatgtgttttattataaataatattcaattatgaaacaaaaaaattatgatgtttttcaaaatgcaagtgaggtttgattttttactgaatcaaatgcaaatgttacctgttaaagatattacagagaaattttattgattacaaaatatgtaagaaaattatcagctacagttttaaagtttaaaatgctctgattgtttctcagaaaaggttacctttgtattaattgttgtatgacatttagtaatgtcctaaaagtcttttgtgagaggtatttaaagtgctttgagacctgattcatgccccccaaagggtggtattaaaagaggaaaaaggacatagtagtggtagtaaagaaaaaaaggagatctaacaaaaacacttgaatattttttattttcaaaactaaacacataaaatgcttttattttgccatatcctacaggaaggaagacatgcttttgccctttcttctgctttgtatatgaccttgatcttttaccttttgttctgttcttctgtgtgcattttatggaaagaaagttgggtctgagattatattgtaattttatactttctatagacagaaaggttttcagagaaaaagaaatggttaaatatcttccagatgttgctgccttatcgaaatgcttctagaactgtctgtataagtcgtatttcagacagtactaaatacttatattttatttttgaggcatgtaattttaaaactgcagtaggttaaaattctattaaacaaatatagaaaatattttgtttataattggcctggtgtggtggcccacgcctgtaatcccagcactttgggaggccgaggtaggtggatcgcctgaggtcagaagttcaagaccagcctggccaacatggtgaatccccgtctctattaaaaatacaaaaattagctgggtgtggtggcgtgtgcctgtaatcccagctacttgggaggctgaggcaggagaaccgcttaaacctgggaggtggaggttgcagtgacccgagatcgagatcacaccactgcactcagcctgggtgacagagcaagactccgtctccaaaaaaaaaaa

SEQ ID NO: 1102 - DNA, 1890 bp, Homo sapiens
cccgcgagcggacgcggcagcgcctctgtctcgctttttcttatttttcccccctttcccctttctttttttttttttcttttcttttctcccctccccccctttcaccatttcccctcggaggcgctttccccgggcaggggcagagccggtctcaccccccgcctctccccggcccccgccgccctatggcgagagggagccccctcccaacccgggctcgagcggcggcggcctcaggccgggggtcatcatggaactaattcgctgaccgacccagcggccgcagccgtgcgtcccgctcgagcgccagcgcccgcgcccgcgccccccgatccgcttcccctttctccctcctcagttggccgagtcgtcccgcgcgcaccgcctccgcgcgcctatgagaatgaggtggtaacgggcccccggatgaccccgcgtcaccactgtgaggcctacagctctgccggggaggaggaggaggaggaagaggaggagaaggtagctacagcaagctgggtagcaggcagatccaaaggatatcatgaagtttccagggcctttggaaaaccagagattgtctttcctgttggaaaaggcaatcactagggaagcacagatgtggaaagtgaatgtgcggaaaatgccttcaaatcagaatgtttctccatcccagagagatgaagtaattcaatggctggccaaactcaagtaccaattcaacctttacccagaaacatttgctctggctagcagtcttttggataggtttttagctaccgtaaaggctcatccaaaatacttgagttgtattgcaatcagctgttttttcctagctgccaagactgttgaggaagatgagagaattccagtactaaaggtattggcaagagacagtttctgtggatgttcctcatctgaaattttgagaatggagagaattattctggataagttgaattgggatcttcacacagccacaccattggattttcttcatattttccatgccattgcagtgtcaactaggcctcagttacttttcagtttgcccaaattgagcccatctcaacatttggcagtccttaccaagcaactacttcactgtatggcctgcaaccaacttctgcaattcagaggatccatgcttgctctggccatggttagtctggaaatggagaaactcattcctgattggctttctcttacaattgaactgcttcagaaagcacagatggatagctcccagttgatccattgtcgggagcttgtggcacatcacctttctactctgcagtcttccctgcctctgaattccgtttatgtctaccgtcccctcaagcacaccctggtgacctgtgacaaaggagtgttcagattacatccctcctctgtcccaggcccagacttctccaaggacaacagcaagccagaagtgccagtcagaggtacagcagccttttaccatcatctcccagctgccagtgggtgcaagcagacctctactaaacgcaaagtagaggaaatggaagtggatgacttctatgatggaatcaaacggctctataatgaagataatgtctcagaaaatgtgggttctgtgtgtggcactgatttatcaagacaagagggacatgcttccccttgtccacctttgcagcctgtttctgtcatgtagtttcaacaagtgctacctttgagtgtaaactaaggtagactactttgggaatgagaacatgcaaaatcaggaaaggctgtagaaggaaatataccttaacaggctgatttggagtgagccagaaaaaaaaaataaaactctcattatttgtgtggctaattataattcagcgttatttaagcacataaagaccaaaaaaaaaaaaaaaaaaa

SEQ ID NO: 1103 - DNA, 3740 bp, Homo sapiens
gggacggcggcggcgcagctcggaacccgccagggtccagggtccaggttccagcgcccggcggcccaggcaccccccgagcccagctccacacaccgttcctggatctcctctccccaggcggagcgtgcccctgcccagtccagtgaccttcgcctgttggagccctggttaatttttgcccagtctgcctgttgtggggctcctcccctttggggatataagcccggcctggggctgctccgttctctgcctggcctgaggctccctgagccgcctccccaccatcaccatggccaagggcttctatatttccaagtccctgggcatcctggggatcctcctgggcgtggcagccgtgtgcacaatcatcgcactgtcagtggtgtactcccaggagaagaacaagaacgccaacagctcccccgtggcctccaccaccccgtccgcctcagccaccaccaaccccgcctcggccaccaccttggaccaaagtaaagcgtggaatcgttaccgcctccccaacacgctgaaacccgattcctaccgggtgacgctgagaccgtacctcacccccaatgacaggggcctgtacgtttttaagggctccagcaccgtccgtttcacctgcaaggaggccactgacgtcatcatcatccacagcaagaagctcaactacaccctcagccaggggcacagggtggtcctgcgtggtgtgggaggctcccagccccccgacattgacaagactgagctggtggagcccaccgagtacctggtggtgcacctcaagggctccctggtgaaggacagccagtatgagatggacagcgagttcgagggggagttggcagatgacctggcgggcttctaccgcagcgagtacatggagggcaatgtcagaaaggtggtggccactacacagatgcaggctgcagatgcccggaagtccttcccatgcttcgatgagccggccatgaaggccgagttcaacatcacgcttatccaccccaaggacctgacagccctgtccaacatgcttcccaaaggtcccagcaccccacttccagaagaccccaactggaatgtcactgagttccacaccacgcccaagatgtccacgtacttgctggccttcattgtcagtgagttcgactacgtggagaagcaggcatccaatggtgtcttgatccggatctgggcccggcccagtgccattgcggcgggccacggcgattatgccctgaacgtgacgggccccatccttaacttctttgctggtcattatgacacaccctacccactcccaaaatcagaccagattggcctgccagacttcaacgccggcgccatggagaactggggactggtgacctaccgggagaactccctgctgttcgaccccctgtcctcctccagcagcaacaaggagcgggtggtcactgtgattgctcatgagctggcccaccagtggttcgggaacctggtgaccatagagtggtggaatgacctgtggctgaacgagggcttcgcctcctacgtggagtacctgggtgctgactatgcggagcccacctggaacttgaaagacctcatggtgctgaatgatgtgtaccgcgtgatggcagtggatgcactggcctcctcccacccgctgtccacacccgcctcggagatcaacacgccggcccagatcagtgagctgtttgacgccatctcctacagcaagggcgcctcagtcctcaggatgctctccagcttcctgtccgaggacgtattcaagcagggcctggcgtcctacctccacacctttgcctaccagaacaccatctacctgaacctgtgggaccacctgcaggaggctgtgaacaaccggtccatccaactccccaccaccgtgcgggacatcatgaaccgctggaccctgcagatgggcttcccggtcatcacggtggataccagcacggggaccctttcccaggagcacttcctccttgaccccgattccaatgttacccgcccctcagaattcaactacgtgtggattgtgcccatcacatccatcagagatggcagacagcagcaggactactggctgatagatgtaagagcccagaacgatctcttcagcacatcaggcaatgagtgggtcctgctgaacctcaatgtgacgggctattaccgggtgaactacgacgaagagaactggaggaagattcagactcagctgcagagagaccactcggccatccctgtcatcaatcgggcacagatcattaatgacgccttcaacctggccagtgcccataaggtccctgtcactctggcgctgaacaacaccctcttcctgattgaagagagacagtacatgccctgggaggccgccctgagcagcctgagctacttcaagctcatgtttgaccgctccgaggtctatggccccatgaagaactacctgaagaagcaggtcacacccctcttcattcacttcagaaataataccaacaactggagggagatcccagaaaacctgatggaccagtacagcgaggttaatgccatcagcaccgcctgctccaacggagttccagagtgtgaggagatggtctctggccttttcaagcagtggatggagaaccccaataataacccgatccaccccaacctgcggtccaccgtctactgcaacgctatcgcccagggcggggaggaggagtgggacttcgcctgggagcagttccgaaatgccacactggtcaatgaggctgacaagctccgggcagccctggcctgcagcaaagagttgtggatcctgaacaggtacctgagctacaccctgaacccggacttaatccggaagcaggacgccacctctaccatcatcagcattaccaacaacgtcattgggcaaggtctggtctgggactttgtccagagcaactggaagaagctttttaacgattatggtggtggctcgttctccttctccaacctcatccaggcagtgacacgacgattctccaccgagtatgagctgcagcagctggagcagttcaagaaggacaacgaggaaacaggcttcggctcaggcacccgggccctggagcaagccctggagaagacgaaagccaacatcaagtgggtgaaggagaacaaggaggtggtgctccagtggttcacagaaaacagcaaatagtccccagcccttgaagtcacccggcccccatgcaaggtgcccacatgtgtccatcccagcggctggtgcagggcctccattcctggagcccgaggcaccagtgtcctcccctcaaggacaaagtctccagcccacgttctctctgcctgtgagccagtctagttcctgatgacccaggctgcctgagcacctcccagcccctgcccctcatgccaaccccgccctaggcctggcatggcacctgtcgcccagtgccctggggctgatctcagggaagcccagctccagggccagatgagcagaagctctcgatggacaatgaacggccttgctgggggccgccctgtaccctctttcacctttccctaaagaccctaaatctgaggaatcaacagggcagcagatctgtatatttttttctaagagaaaatgtaaataaaggatttctagatgaaaaaaaaaaaaaaaaaaaaaaaaaaaaaaaaaaaaaaaaaaaaaaaaaaaaaaaaaaaaaaaaaaaaaaaaaaaaaaaaaaaaaaaaaaa

SEQ ID NO: 1104 - DNA, 1878 bp, Homo sapiens
cctcgctccgcctccggcctcctccgagagctccagacctcccggctactcagaagccctcggactgcccggaccgcgcgatggagtcgaccggcagcgtcggggaggccccgggcggaccccgggtgctggtggtgggcggcggcatcgcggggctgggcgcggcgcagaggctctgcggccactccgccttcccgcacctgcgggtcctggaggccacggcccgcgccgggggccgcatccgctcggagcgctgcttcggtggcgtggtggaggtgggcgcgcactggatccatgggccctcccggggtaaccccgtcttccagctggctgctgagtacgggctgctgggggagaaggagctgtcccaggagaaccagctggtggagaccgggggtcacgtgggcctgccctccgtgagctacgccagctccggggccagcgtgagcctccagctggtggcggagatggcgactctgttctacggcctgatagaccagacccgggagttcctgcacgctgcagagaccccggtgcccagcgtcggggagtacctcaagaaggagattggccagcacgtggccggctggacagaggatgaggagaccaggaagctgaagctggccgtcctgaactccttcttcaacctggaatgctgtgtgagcggcacccacagcatggacctggtggccctggcaccctttggggagtataccgtgctgccggggctggactgcaccttttctaagggctatcaaggactcacaaactgcatgatggccgccctgccggaggacactgtagtttttgagaagcctgtgaagaccatccactggaacgggtccttccaggaggcagcctttcccggggagacctttccagtgtcggtagagtgtgaggatggagaccggttcccggcgcaccatgtcatcgtcaccgtgcccttaggttttcttagggaacatttggacaccttctttgaccctcccctgccggctgagaaggcagaagcaatcaggaagataggctttgggaccaacaacaaaatcttcctggagtttgaggagcccttctgggagccagactgccagctgatccagctggtgtgggaggacacgtcgcccctggaggatgctgcccctgagctacaggacgcctggttccggaagctcattggctttgtggtcctgcctgcctttgcgtctgtccacgttctctgtgggttcattgccggacttgagtctgagttcatggagactctgtcggatgaagaagtacttctgtgtctcacccaagtgctccggagagtgacaggaaacccacggctccccgcgcccaagagcgtcctgcggtctcgctggcacagcgccccgtacactagggggtcctacagctacgtggccgtgggcagtactgggggcgacctggacctgctggctcagcccctccctgcagacggcgccggcgcccagctccagatcctgtttgcgggggaagccacacatcgcacgttttactccacgacgcacggggctctgctgtcgggatggagggaggccgaccgcctcctcagtctgtgggccccgcaggtgcagcagcccaggcccaggctctagctgggcccagcctactctgttccacccgtgtcgggggtaggctgggaccctcatttcttctgacagatttcagtctggcttgaaatttggggatgttaatgagggtcctctggtttttggtaaccagggccaccttctcagttcttgtgtctgttattggagtctggccagggttgacttgagctgagacaccagatgctcacggagatgctggacacataaagcaagttacagccacaaaaaaaaaaaaaaaaaaaaaaaa

SEQ ID NO: 1105 - DNA, 2952 bp, Homo sapiens; identical to SEQ ID NO: 782

SEQ ID NO: 1106 - DNA, 5370 bp, Homo sapiens
cgcatgcgctggcggcctgcgccgccttaagtgccgcgccagcccggggcggcccagtcggcctgtcagccggcttcgagataagtcccggcgcttgcgcggcggcggctatggcggcggaggaggaggaggtggactctgccgacaccggagagaggtcaggatggctaactggttggctccccacatggtgccctacgtctatatcacaccttaaagaagctgaagagaagatgttaaaatgtgtgccttgcacatacaaaaaagaacctgttcgtatatctaatggaaataaaatatggacactgaagttctctcataatatttcaaataagactccacttgtccttctccatggttttggaggaggtcttgggctctgggcactgaattttggagatctttgcaccaacagacctgtctatgcttttgacctattgggttttggacgaagtagtagacccaggtttgacagtgatgcagaagaagtggagaatcagtttgtggaatccattgaagagtggagatgtgccctaggattggacaaaatgatcttgcttgggcacaacctaggtggattcttggctgctgcttactcgctgaagtacccatcaagggttaatcatctcattttagtggagccttggggtttccctgaacgaccagaccttgctgatcaagacagaccaattccagtttggatcagagccttgggagcagcattgactccctttaaccctttagctggcctaaggattgcaggaccctttggtttaagtctagtgcagcgtttaaggcctgatttcaaacgaaagtattcttcaatgttcgaagacgatactgtgacagaatacatctaccactgtaatgtgcagactccaagtggtgagacagctttcaagaatatgactattccttatggatgggcaaaaaggccaatgctccagcgaattggtaaaatgcaccctgacattccagtttcagtgatctttggcgcccgatcctgcatagatggcaattctggcaccagcatccagtccttacgaccacattcatatgtgaagacaatagctattcttggggcaggacattatgtatatgcagatcaaccagaagaattcaaccagaaagtaaaggagatctgcgacactgtggactgaacacactgaagctctgatgggaaaacctggtgactgatatagttgttcagcaataattcatagtctgtgatgaagagtagtgaatacaacacacaaccaggcagccttcttgactatactttgcacatgttttctttaggaattcactcacacatttaaaccagttagtgccttctagaagaatggctttcctttctcctacacaaaattgaaatatacaagtctctaaatataatacctttaaataaaaggttatttgtccctctgatgtactgaaaaactgtaatttttcagctgaaaattttttaatctaactttgctagttatttttatattgcaatctatattaccaatttaggaagtgatttctgagtctcttacactgtaaaggtgcactttattttctttgtcttccccatcatgtatttattgtgtcttgataactgatattaatctaaattcaatgtgtttttatgtaaaaatttgtcagttgtttagaatatttcactttgtttttgaaacggagtgacaaggcagatttttggttagaggacgggagttgatcactatcattactttttctagtttacctgttttttatatttaaggctgctaagccatgttcagcattttaaatgtggtctatcctgacatacagtgtataacaacataactccttggaacctcctatgtgtggtataattctactcttccaaggaacatgacttcaatactttcagtgattcaggtactgaaaagccttacctaaaaggctgttctttgtttccccctttcatactattcttttccatgacccaggatgcagcaaatgaaacagatttcttctcttaaggggatattaagactgttacttcctagtaagccaagtaataccatatttttattaacatctaacttttgtagatgggtgctaaaattgcatacattttaaccactaaaatagaaaaacaagtggtgctattatgtctcatggcaccagaaatgagctagcacttgggtttgttgttgctgttgtttattaagagtattgtgttaattaaatcattacatacttgaagttatattacaaaaattctagaaggttgattgaactatttttttaggaactaccatcaagtgtagcattttcttgcagttttaaaatgaggaaaacttctttgaaactgtgaaatgctccatgtggtaactggctgctgagaaaacccttcaccaaaaaaataaataaaaattgaataggattgtcatcaagaaggcatctttcgctaacgttgcttgtctaggagaaaggtagctatgtaaataaaaacagtgaactagagcaaatagtggtttaatggttttgttattgcatttttaaaatggttaattagggaatttgtagttgttaggaaatgtaaggttgtgtcactgttgattaactgccagaaagactgaatgttctattttcaacatttctcccctataaaagaatagacaaattatactgaagcatgatataaacatcttcccaatgaacaatttgtctcacttgtcagattaactaggttagtgcaggaagcaacatgagcgccaagatgtgttgtctgatttctctaccttaagaacaataatagtctttttagttagtattttggatggccaggtttcaaacctgtatgtggtacaaataatttgggtaatatttttgtatttttgttttacacactctctaatctcaattatcctttgctgggagaatgacaggtttcacttatacaggaaggtttttgcacaggaaatttggtcccagcccttggaaggaagaagttccttcgtttacttagtgaatggagtttctggccgcagatgtgccaagtgattgaagaaagatataccccaatatcaagtgataatttattttcctacagactgaatttgctttatttgaaagatgttgtaactctttttaaagttagattttaccctgaggtatagtatatgtaattttgtgaagattgagctggaagggaagttcacaatcctcacatttaaaaaaatatagtgggtgctaaatgttttcttaaaaatctagtacagcatttgatctttgttatgcacagcatacttttattttacagaataaattttcctgtgatagtcacaacaagacagctgtatagtttcttgagtcttttgtatggaccagtctctgtataatagttaactacaggactgtggatccagcaaatgttcagtaaatgctgctgttgttcttagggaaggctactctgggtgttgtggccgccatacatggctttacctgggtccatgcattcccttaagatgacttctgttttcttcttttttcttctgattttccaaaaaaaaaaaagccttgcctaaggttggttttagaatatgatttgcagaacacttttgaaatgtcttcattcatatatgtaatatatatttatacttaaagggccatacgcgatttcaataaaacaagaagtactggaaagaataaacaaaaatagccagaagatgcctagaaaagaacaatgtggaaggagggataaccctattaaatattataacataatgtttacaatatgagaaagtctaggaatttagtacatgataaagcatctcattcagagaaaaaggctttaaaaatggtgttgagagaagtgtggttaaccatttggaaaaaaaaataaaattgaatcgatttctcacaggatacacaggataaaatctgaatagaacaaagacccaatttttaaaatgaaaccctctttctaactagaagaaaacatagatgaattattgtataatctgacagtgagaaaaactttcctaggactgaaaattcagaagcaataaaaagagaagtctatagaagaattttcagccagatggaatggctcatggctgtaatcccagcattttgggaggctgaggcagaaggactgcttgagaccaggaattcaaaaccaacctgggcaacctagtaggactggctctaccaaaaaaaaaaaaaaaaaaaaattaagtacctggcctgggttccacctacttgggaggctgaggtaggaggactgtgagcccaggagtttgaggatgcagtaagccactgcactccagcctgggtgacagagaagaaaaaagatttttttggatagctgaaaatatttgcagcatttatcacagagggctaattgtagccctatatatgaagaattttaaactatgagaagaacccgaagaataggcaaaaggatgtgaacagacagttaacagaaaatagaatgcaaatggtctttaaacatacaaggatatgcataaaaagacaaatgcaaaataaaataaaataatggaaatacctttcttacctgtgagattggggaaaatccaagttaggcaatgcactctgttgagacaatagggaaacaggcactccaaaaattacaaatccctgtggatggtatttgttaactagcaaagttaaatgagtatatccttcaacctggcagacccagttctaagaatccatatgagatgcacttgcaagaatatgaaatagtatatgcacaaagatcttgattacagcactgtttctaatagctacagactggaagccagccaaatctccattgatagggaattgatggaaggaactagggtatatctatacaatgggatactacacagctgtagaaaggactgcgaactatttttgtagttctggtctggagaaatctccagaatataggaaatgaaaaatgtaaagcacagaagagaatgtatggtgtgctgtctgttgtataacgaagagacaaatggaaaaaatatgtatttgctttttttgtaaagcaatagaagaattagttataccaataactaataaaatgatctccttgttagtggtggtagggagctagacaaggatggcaactatttctgtatcttacataccttttattttgaggccctgtcaatgttttatataataaacattttttgaaaaggcaactcttaaaactaaaacaaacttaacagtctgtcaagttggtgatataaccccacagaagacttacttcaagtgacttgaaaacttagtattttgtctgtactttgctaatggaatatatcctacagaccaaacaaccacaaataaatcttaaactgcaaaaaaaaaaaaaaaaaa

SEQ ID NO: 1107 - DNA, 5564 bp, Homo sapiens
ggcggcgcgctgtccgcactgcggcacagagccgcggcttgctttcaggacacgggtcgctggcgggttaggtggctgcgtggccgcctcacttcgcgcacgcgccgctaggctgggggagttgatttgcactgctccgggtgtcggctccggcgggacgggcggttctgcgtacccctctccagtgtcaacctggggctgaatcttcaacctgtcaaagccttcttaattatgtctgagaaaaggatcctgattgagtcaatgctttgcattctcagtcctctgcataaagctgagagatgcctacagctgagagtgaagcaaaagtaaaaaccaaagttcgctttgaagaattgcttaagacccacagtgatctaatgcgtgaaaagaaaaaactgaagaaaaaacttgtcaggtctgaagaaaacatctcacctgacactattagaagcaatcttcactatatgaaagaaactacaagtgatgatcccgacactattagaagcaatcttccccatattaaagaaactacaagtgatgatgtaagtgctgctaacactaacaacctgaagaagagcacgagagtcactaaaaacaaattgaggaacacacagttagcaactgaaaatcctaatggtgatgctagtgtagaggaagacaaacaaggaaagccaaataaaaaggtgataaagacggtgccccagttgactacacaagacctgaaaccggaaactcctgagaataaggttgattctacacaccagaaaacacatacaaagccacagccaggcgttgatcatcagaaaagtgagaaggcaaatgagggaagagaagagactgatttagaagaggatgaagaattgatgcaagcatatcagtgccatgtaactgaagaaatggcaaaggagattaagaggaaaataagaaagaaactgaaagaacagttgacttactttccctcagatactttattccatgatgacaaactaagcagtgaaaaaaggaaaaagaaaaaggaagttccagtcttctctaaagctgaaacaagtacattgaccatctctggtgacacagttgaaggtgaacaaaagaaagaatcttcagttagatcagtttcttcagattctcatcaagatgatgaaataagctcaatggaacaaagcacagaagacagcatgcaagatgatacaaaacctaaaccaaaaaaaacaaaaaagaagactaaagcagttgcagataataatgaagatgttgatggtgatggtgttcatgaaataacaagccgagatagcccggtttatcccaaatgtttgcttgatgatgaccttgtcttgggagtttacattcaccgaactgatagacttaagtcagattttatgatttctcacccaatggtaaaaattcatgtggttgatgagcatactggtcaatatgtcaagaaagatgatagtggacggcctgtttcatcttactatgaaaaagagaatgtggattatattcttcctattatgacccagccatatgattttaaacagttaaaatcaagacttccagagtgggaagaacaaattgtatttaatgaaaattttccctatttgcttcgaggctctgatgagagtcctaaagtcatcctgttctttgagattcttgatttcttaagcgtggatgaaattaagaataattctgaggttcaaaaccaagaatgtggctttcggaaaattgcctgggcatttcttaagcttctgggagccaatggaaatgcaaacatcaactcaaaacttcgcttgcagctatattacccacctactaagcctcgatccccattaagtgttgttgaggcatttgaatggtggtcaaaatgtccaagaaatcattacccatcaacactgtacgtaactgtaagaggactgaaagttccagactgtataaagccatcttaccgctctatgatggctcttcaggaggaaaaaggtaaaccagtgcattgtgaacgtcaccatgagtcaagctcagtagacacagaacctggattagaagagtcaaaggaagtaataaagtggaaacgactccctgggcaggcttgccgtatcccaaacaaacacctcttctcactaaatgcaggagaacgaggatgtttttgtcttgatttctcccacaatggaagaatattagcagcagcttgtgccagccgggatggatatccaattattttatatgaaattccttctggacgtttcatgagagaattgtgtggccacctcaatatcatttatgatctttcctggtcaaaagatgatcactacatccttacttcatcatctgatggcactgccaggatatggaaaaatgaaataaacaatacaaatactttcagagttttacctcatccttcttttgtttacacggctaaattccatccagctgtaagagagctagtagttacaggatgctatgattccatgatacggatatggaaagttgagatgagagaagattctgccatattggtccgacagtttgatgttcacaaaagttttatcaactcactttgttttgatactgaaggtcatcatatgtattcaggagattgtacaggggtgattgttgtttggaatacctatgtcaagattaatgatttggaacattcagtgcaccactggactataaataaggaaattaaagaaactgagtttaagggaattccaataagttatttggagattcatcccaatggaaaacgtttgttaatccataccaaagacagtactttgagaattatggatctccggatattagtagcaaggaagtttgtaggagcagcaaattatcgggagaagattcatagtactttgactccatgtgggacttttctgtttgctggaagtgaggatggtatagtgtatgtttggaacccagaaacaggagaacaagtagccatgtattctgacttgccattcaagtcacccattcgagacatttcttatcatccatttgaaaatatggttgcattctgtgcatttgggcaaaatgagccaattcttctgtatatttacgatttccatgttgcccagcaggaggctgaaatgttcaaacgctacaatggaacatttccattacctggaatacaccaaagtcaagatgccctatgtacctgtccaaaactaccccatcaaggctcttttcagattgatgaatttgtccacactgaaagttcttcaacgaagatgcagctagtaaaacagaggcttgaaactgtcacagaggtgatacgttcctgtgctgcaaaagtcaacaaaaatctctcatttacttcaccaccagcagtttcctcacaacagtctaagttaaagcagtcaaacatgctgaccgctcaagagattctacatcagtttggtttcactcagaccgggattatcagcatagaaagaaagccttgtaaccatcaggtagatacagcaccaacggtagtggctctttatgactacacagcgaatcgatcagatgaactaaccatccatcgcggagacattatccgagtgtttttcaaagataatgaagactggtggtatggcagcataggaaagggacaggaaggttattttccagctaatcatgtggctagtgaaacactgtatcaagaactgcctcctgagataaaggagcgatcccctcctttaagccctgaggaaaaaactaaaatagaaaaatctccagctcctcaaaagcaatcaatcaataagaacaagtcccaggacttcagactaggctcagaatctatgacacattctgaaatgagaaaagaacagagccatgaggaccaaggacacataatggatacacggatgaggaagaacaagcaagcaggcagaaaagtcactctaatagagtaaagaattgaagaaaagttaagagctgccgaaatgcacagaggtgaaaatgacaaaccaaatggaatttctcttcagagttcagaattttcagatactaaggaggaagaaaggatccactacttcttgttcttatgaatgactctagaaaaatcagaatcaagttgtgggtggaaaaatcaacgtggcctttgagttcagttgttataaaccattgtgactattgttggtcaaagtattggtacttatattgttagtaattgcatcataattacattaccagtgttggaaaactaatgaagaaaacactgtaattgctactcagcaaatgtgaataaaaggtgtttgcgttattaggatgtctgttaagtaatcatttaatattattatattggtaatggttgtatgtgtgatgctatgcccagaatatgaagtatctgtttttgaaattcactttatttaaaagataagcagctgactgggcacggtgcctcatgcctgtaatcctagcaccttgggaggctgaggcaggtggatcacctaaggtcaggagttcaacaacaccagcctgaccaacatggtgaaaccccatctctactaaaaatacaaaaatcagccgggtctcatggcaggcacctgtaatcccatctactgaggcaggagaattgcttgacccaggaggcagaggttgcagtgagccaagatcacgccattgcactccagcctgggggacagagcaagactctatctccaaaaaacaaaaaagataagcagctttagaatatggcgcattcaaaacagtctcagtaacaaagacattaaaagaaaacaatttactttctaattaaaattttgtgtttcttaagatcaaatcatataggtaacttcatagacctaaattaaaagtgatttttggctggactggcaacaatgttcccaatgtctttactttttaaaaaaggcttttcatatttaagcacatacctattttgtagacttacattgtttaatatttattttaatcttaatatttttacattattatattgcattatttattttttctaagttccagaataatagtgtcattattatagactatatgttttgaagtttgatattataatgggatattcattttttgttcttttcttgactcctttctcaagtgtgtgataaggtctgctgataaaatatttaaccccaagaaagtgaaaactaatataaaattagaaagacctatccaaattagacagtcaattccattaaaataagaagtgagaaaaacaatgttgggcattgaggtgtaaattttgcccagatgtatacccagtgtgaaatatcttctaataaaaatatatttggctcttatccctgcacatgtagaggcataaaaattggtaaacatgtcccgctgtgtagaactttaaaaaaaaggcatttttgaaagtgttgagtggcactgataactggtgaagcctacagccatccgcccaaaagtctgttctgatggcactgagttttcattgttctggatgtataagtctgtgtgtcaggtacagctgggcccagccagcttgagtcactcttgtacaagcttgtttttttctgtcttgtgaatgcacttgataatttaaaaataaaaatatctgtttctctgcagtttcagctaataaa

SEQ ID NO: 1108 - DNA, 3228 bp, Homo sapiens
ctttcaggaaatcacacacacactggaaactcctgcatactcctcttactataatctgtcaccaaagactggatattcctgtgctggggctcgtgccagcgcctcgggctgccaggtgctgctttccaactcccacatgggctgccctccccctactgctacccacagggcccccactccacctgctcccagacgaggccaactcctggccaagcttaggggcacagcggaggcgctctgtttctgatttttctcgccttccttggagatgcctgtgcttggaagggaaggcagaacattgcatcttggaacaaatctgcttttgatcatgcaaatgaatgcctggataatgtaggcagactgtcaatttcaccagttagaaagaaagagaaaagggggagaaattccccatgacagcgactgatgaagaatttcaatagaaagctgctacttcagaaaataagatcatttgctgcgaatggagaacatctcaggcagccctgatgctccaccggctctgggcatcaccagcggccccagggaaaaagaaagaaatgggaaacagcatgaaatccacccctgcgcctgccgagaggcccctgcccaacccggagggactggatagcgacttccttgccgtgctaagtgactacccgtctcctgacatcagccccccgatattccgccgaggggagaaactgcgtgtgatttctgatgaagggggctggtggaaagctatttctcttagcactggtcgagagagttacatccctggaatatgtgtggccagagtttaccatggctggctgtttgagggcctgggcagagacaaggccgaggagctgctgcagctgccagacacaaaggtcggctccttcatgatcagagagagtgagaccaagaaagggttttactcactgtcggtgagacacaggcaggtaaagcattaccgcattttccgtctgcccaacaactggtactacatttccccgaggctcaccttccagtgcctggaggacctggtgaaccactattctgaggtggctgatggcctgtgctgtgtgctcaccacgccctgcctgacacaaagcacggctgccccagcagtgagggcctccagctcacctgtcaccttgcgtcagaagactgtggactggaggagagtgtccagactgcaggaggaccccgagggaacagagaacccgcttggggtagacgagtcccttttcagctatggccttcgagagagcattgcctcttacctgtccctgaccagtgaggacaacacctcctttgatcgaaagaagaaaagcatctccctgatgtatggtggcagcaagagaaagagctcattcttctcatcaccaccttactttgaggactagccaagaacagacacaatggttcatgcccaaaaggaacagaagttccaactattgcctgggatcttgcgaaaagcgaggttccctgatccctgggagcctcacgtattttagaagccaagagaagccacatggagactcaaattcgcatcttctctatccacatcatgaccaaaggaacccctccctggtgtctgatcagggctgtggcatcacgaaacattggatcatgacatgtcgggcgatgcttggaagagcccagcatgtatgtatgcacacattgtgtgtgtgggaaggacaaagccactctcacaagaaagggcaccaggactgctctccaaggaactggacctgtccagacagttacactccaaggtcattggagagaacttctgtatgggcaagcctgagagggagaggaaacaaaagctgtgtcctggcagaaggtctgggtttgcagatgggtgccctgaatggaactactttaactaatccatagggacttctggtatgctttcctctctttttaaaggaacttcgtgacactaaacattagcccaaaggacttcttagccttcaattgggagatacctttggtctgctcctgcaccaaagccatatgggtggaagtcagttggcctccctggttctgcagagggccagaagaatgagagagaggaagactgctggcagggaaatcgaggaggcgagactagaactgcaccagcttccctgatgtctgcagccatggctttgcagcgcagacagagcttctctgggatgctgggattcttgcctgtatgaatgcatcaagtattcatttattgcccgaataggcattgcattaagtcctctgtaaggtgtcaggcaagccaaaaaaaaaaaaaagatgcgtaagtcctaacccccaacagaggtgttcacagtgtagacagggaaaaaatgtataaacaaatgtgtaaaaagagaaatcagctcatggcttaggatggaattagagacaggtgagggacactcaggagctcattttccagctgctcttcagagtggaagggctggctggatcgggtaggtaagaatagctggattttttagaaaagaaatggatacagtctaaagaattaactcacccggtactttattctaagaagggtctggcatccatatgaggaaaaatgctcagctccaggaaagatggggagtccaagtggattaatgatgtcatgcataattttaagagacaagggagaaaacacaatgtatagccagagaaggagaagctcccatccaaatcctactaggaagagagtgggctgcagatgaatctgtgactcatgtttccctgtttcaaagggatcctggggaaggaggggaacatgcttgcagtatctctccctgtctgtctgctcacataagcattccgtccatctgagctcatcgtgctactggtatgtgtatgtgcagttacacagttttctgtatcatagattctagtgtgtttatacaaggagacatctgtggtttccccaaccgttccaaaaggctatttcaaaggaaccagccaacgtatgagaaatgaatgtaacactgtggacattgacttcccgcataaggcagggtgaccccctgaactccagatgtctgcacagtatcttatgtgttgttttccgttgtgacgaatgtgattggaacatttggggagcacccagagggatttctcagtgggaagcattacactttgctaaatcatgtatttattcctgattaaaacaaacctaataaatatttaacccttggcaaaaaaaaaaaaaaaaaaaaaaaaaaaaaaaaaaaaaaaaaaaaaaaa

SEQ ID NO: 1109 - DNA, 3725 bp, Homo sapiens
gtcaaatagcagccgcggggaggctcgttcccatcggcatctgtgactggctgcgatcgagggcccgggcggccggccagccgtctcgccgagtgcggactggccggatctgctgtcagtcagcgggaacagacttctccctctccatctggtcaactgcgggagaaaaattttcgagaatttccagcaggcaaggcagtggccgctttgactgcttgcttcggagatccgagacgacggagaaggcactcttatttaccgaccaagaaagctcctcccccgtcctccgttagctaattaaaacatttttcagggacgtagccatccagagacattccattattgttccattgacctttccctcatcactgagtcctttggagctgagttatgtcaacagctgccttaattactttggtcagaagtggtgggaaccaggtgagaaggagagtgctgctaagctcccgcctgctgcaggacgacaggcgggtgacacccacgtgccacagctccacttcagagcctaggtgttctcggtttgacccagatggtagtgggagtccagctacctgggacaattttgggatctgggataaccgcattgatgagccaattctgctgccacccagcattaagtatggcaagccaattcccaaaatcagcttggaaaatgtggggtgcgcctcacagattggcaaacggaaagagaatgaagatcggtttgacttcgctcagctgacagatgaggtcctgtactttgcagtgtatgatggacacggtggacctgcagcagctgatttctgtcatacccacatggagaaatgtattatggatttgcttcctaaggagaagaacttggaaactctgttgaccttggcttttctagaaatagataaagccttttcgagtcatgcccgcctgtctgctgatgcaactcttctgacctctgggactactgcaacagtagccctattgcgagatggtattgaactggttgtagccagtgttggggacagccgggctattttgtgtagaaaaggaaaacccatgaagctgaccattgaccatactccagaaagaaaagatgaaaaagaaaggatcaagaaatgtggtggttttgtagcttggaatagtttggggcagcctcacgtaaatggcaggcttgcaatgacaagaagtattggagatttggaccttaagaccagtggtgtcatagcagaacctgaaactaagaggattaagttacatcatgctgatgacagcttcctggtcctcaccacagatggaattaacttcatggtgaatagtcaagagatttgtgactttgtcaatcagtgccatgatcccaacgaagcagcccatgcggtgactgaacaggcaatacagtacggtactgaggataacagtactgcagtagtagtgccttttggtgcctggggaaaatataagaactctgaaatcaacttctcattcagcagaagctttgcctccagtggacgatgggcctgattaccagctgggacttagagtttctgtgcaacagtttttcactgagcatgtcaagaaactgataagatcaaaaaggtctcctaactcactagatcagcgcacaagtcagtgtaaaccacttagatagtagttttttcataaatgctcatcatatttatgttccgctgtacatgttcagtataaatatatgtgtagtgaagctactgtgagtctttaaatggaaagagcaaatgagaagtggtttggatacacttgatgagagatgagagtgtcacattaataatttttaagactcttaggcagctatgggtttcttttgatcatttttgttctttattcatttgaacacgtttttgaagttcttcaaaactagtcagtttgaattttgacagctattcaatatgtgatctccaagtttaaaaaaatttttttccagacttccctaatcctaaaatgcgagtttttatttttaataactgtaccaaggaataagtatgaaaacagttctctgttaccatattttgtattctggaccacttactggtgaaagcaaccatgcaaaagaaattaatttggccaggcacagtggctcatgcctgtaatcccagcactttgagaggccaaggtgggtagatcatctgaggtcaggaattcaagaccagcctggccaacatggtgaaaccctgtctctagtaaaaatccaaaaaaaaaaaaaaaaaaaaaaaaaaaattggctgggcgtggtggcagacacctgtaatcccagctactcgggaggctgaggaaagaggaatcacttgaacccaggagatgggggttgcagtgagctgagatcatgccattgcactccagcctgggcagcaagagcgaaaaactccatctcaaaaaaaaaaaaaaaaagaaagaaaagaaattaattcagatgatgtgacattactaaattgtatacatatttataaatgtgtatttcagctgtctcatcagccctcccctccatttattcctatttttctgtagttaagaatactgtaaaaatgtgactattccttaatatcagaaaagaatgcacaggctgagtcttccggtcaaaagttaaatactgatggaatcaagtattttgtatgaagttctcatttgttatctctaacgctattttgtgttttgcatatagtattatagtatgtgtatatcactttttgtatagagtaagcaattgaataatttgttaataaaaataataccacattgactgatactgctatagacatagcttgagttttatgtctcctttttgctcattttctaagacttaggagaaagaataaatctaaaatgaccattaaaacattctccatttcagcttgctgtgtaacttaggaagtataaaactatacttctctttatctgcatgtaagtttgctgttaaaatgtgaatttctaaatgtgtatttggaattatttccgtagtttatttctgcaaactatgtaaatttgttatatgtgtgagtatgtgtacatatgtatattttagagtaatataaaattaaagggaacaatcttgcatagctctttcaccagttttaaattattgatacgttatttttaaggactcttgacaaactaggggcaattttcttatagtggagacccagtgattatcagcagatgaggaaataggttaaaaattgctatatggcaatttgtatataaagtaataggatgtgagaaaaatactgaatcttaagaatgacatggaattctgtggcagaaacaaaagaaaaagttgatgtagtatataccttcaactgtgttttgagttgacttttttttttttctttaagctttgggtaaaaatgtatgaggagggagagggcccaatataaatatttacatcttcttacctttttggaaatggaagaagataaatcttgagtttttctgcctatattaatcaggaattgccctttgaaaaaagtgctaaataaatattttgattttttttttcaagggaagttaggtgaaagaaggaaaaacatcacaggaaagactgttaacattctgtttgttgtctgagaggtgaggaaccaaagggaggcaactaaagcgggaaaccatcttgctttttctaatcagttcttggaacagaaatgtggaagctacctttaggaacatggagaatttccaaaccaacaggcaaaggaaaactaacgcacaaa

SEQ ID NO: 1110 - DNA, 1598 bp, Homo sapiens
ggcgaccgcggctgaggtacaggtgcctcgcggtgcagccgggtcgccttccagcccgtccgcctcccgaccagggcccgcgccccgtcccgcctctctcccgcccagccaaatgcaggccgccgccctccctgaggagatccgttggctcctggaagatgctgaagagtttctggcagaaggtttgcggaatgagaacctcagcgctgttgcaagggatcacagagaccatattctacggggctttcagcaaatcaaagccaggtactattgggattttcagccccaagggggagacattggacaggacagctctgatgataatcacagcgggactcttggcctgtccctcacatccgatgcaccctttttgtcagattatcaggatgagggaatggaagacatcgtaaaaggagctcaagaacttgataacgtaatcaagcaaggatacttggagaagaaaagcaaagatcatagtttctttggatcggagtggcagaagcgatggtgtgttgtcagcagaggtctcttctactactatgctaatgagaagagcaagcagcccaaagggaccttcctcattaagggctacggtgtacggatggccccccacctgcgaagagattccaagaaagaatcctgctttgaactgacctcccaggataggcgcagctatgagtttacagctactagtccagcagaagccagagactgggtggatcaaataagtttcttgttaaaggatctgagctccttaaccattccatatgaagaggatgaggaggaagaagaaaaagaagagacatatgatgatattgatggttttgactccccaagttgtggttcccagtgcagacccactatcttgcctgggagtgtggggataaaagagcctacagaggagaaagaagaagaagatatttatgaagtcttgccagatgaagagcatgatctagaagaggatgagagtggcactcgacgaaaaggagactatgccagttactaccagggcctatgggattgccatggtgaccagccagatgaactgtccttccaacggggtgacctcatccgtattctgagcaaggagtataacatgtatggctggtgggtgggagaactgaacagcctcgttgggattgttccaaaggagtatctcaccactgcctttgaagtggaagaaagatgaaacccaggaaatatattcttccctctctcctgcctttatgaggaaactgatcatcaaaagttcccactccctacttctgccaccccaccaacgccttggactcctctctttgctgaagagacccaagtctcttgacacctcagagtgactgtaagctaccagtaagacaagtgggaagaggcacgttcatcaaacctgttactaaaccagcctagtcatagctcatccccatctctaaatgtgtccacacaaccacatctgccttttccacaagcttttcacaaagaaggtgagagagaaggaaaccttgggaggaggacattactggttgttctggctggtttgaaaagcacaaataaacttgggatgtggttccttgccatgaaaaaaaaaaaaaaaaaaaaaaaaa

SEQ ID NO: 1111 - DNA, 2145 bp, Homo sapiens
ggcggttcaggcgccagagctggccgatcggcgttggccgccgacatgacgcccgaggacccagaggaaacccagccgcttctggggcctcctggcggcagcgcgccccgcggccgccgcgtcttcctcgccgccttcgccgctgccctgggcccactcagcttcggcttcgcgctcggctacagctccccggccatccctagcctgcagcgcgccgcgcccccggccccgcgcctggacgacgccgccgcctcctggttcggggctgtcgtgaccctgggtgccgcggcggggggagtgctgggcggctggctggtggaccgcgccgggcgcaagctgagcctcttgctgtgctccgtgcccttcgtggccggctttgccgtcatcaccgcggcccaggacgtgtggatgctgctggggggccgcctcctcaccggcctggcctgcggtgttgcctccctagtggccccggtctacatctccgaaatcgcctacccagcagtccgggggttgctcggctcctgtgtgcagctaatggtcgtcgtcggcatcctcctggcctacctggcaggctgggtgctggagtggcgctggctggctgtgctgggctgcgtgcccccctccctcatgctgcttctcatgtgcttcatgcccgagaccccgcgcttcctgctgactcagcacaggcgccaggaggccatggccgccctgcggttcctgtggggctccgagcagggctgggaagacccccccatcggggctgagcagagctttcacctggccctgctgcggcagcccggcatctacaagcccttcatcatcggcgtctccctgatggccttccagcagctgtcgggggtcaacgccgtcatgttctatgcagagaccatctttgaagaggccaagttcaaggacagcagcctggcctcggtcgtcgtgggtgtcatccaggtgctgttcacagctgtggcggctctcatcatggacagagcagggcggaggctgctcctggtcttgtcaggtgtggtcatggtgttcagcacgagtgccttcggcgcctacttcaagctgacccagggtggccctggcaactcctcgcacgtggccatctcggcgcctgtctctgcacagcctgttgatgccagcgtggggctggcctggctggccgtgggcagcatgtgcctcttcatcgccggctttgcggtgggctgggggcccatcccctggctcctcatgtcagagatcttccctctgcatgtcaagggcgtggcgacaggcatctgcgtcctcaccaactggctcatggcctttctcgtgaccaaggagttcagcagcctcatggaggtcctcaggccctatggagccttctggcttgcctccgctttctgcatcttcagtgtccttttcactttgttctgtgtccctgaaactaaaggaaagactctggaacaaatcacagcccattttgaggggcgatgacagccactcactaggggatggagcaagcctgtgactccaagctgggcccaagcccagagcccctgcctgccccaggggagccagaatccagccccttggagccttggtctgcagggtccctccttcctgtcatgctccctccagcccatgacccggggctaggaggctcactgcctcctgttccagctcctgctgctgctctgaggactcaggaacaccttcgagctttgcagacctgcggtcagccctccatgcgcaagactaaagcagcggaagaggaggtgggcctctaggatctttgtcttctggctggaggtgcttttggaggttgggtgctgggcattcagtcgctcctctcacgcggctgccttatcgggaaggaaatttgtttgccaaataaagactgacacagaaaatcaggtcagtgtctctgggctttgtgcaagctcagtttgaaaagggtttattcccatcactgcccaggacaccctgtggctttacttgctcatggtcagccaagcttacccttcacactgagaagtcatttctggctacttccttgggctcagttccctgggtcatcagccatcaaatcttgttgagtttaaaaaataaacagcaaaaaaaaacaaaccaaaaaaaaaaaaaaaaaaaaaaaaaaaaaaa

SEQ ID NO: 1112 - DNA, 3324 bp, Homo sapiens
acttcctgccgggctgcgggcgcctgagcggctcttcagcgtttgcgccggcggctgccgcgtctctctcggctcccgcttcctttgaccgcctcccccccccggcccggcggcgcccgcctcctccacggccactccgcctcttccctcccttcgtcccttcttcctctcccttttttccttcttccttcccctcctcgccgccaccgcccaggaccgccggccgggggacgagctcggagcagcagccagaaagcataacccctactgtagaactaaatgcactgtgcatgaaacttggaaaaaaaccaatgtataagcctgttgacccttactctcggatgcagtccacctataactacaacatgagaggaggtgcttatcccccgaggtacttttacccatttccagttccacctttactttatcaagtggaactttctgtgggaggacagcaatttaatggcaaaggaaagacaagacaggctgcgaaacacgatgctgctgccaaagcgttgaggatcctgcagaatgagcccctgccagagaggctggaggtgaatggaagagaatccgaagaagaaaatctcaataaatctgaaataagtcaagtgtttgagattgcacttaaacggaacttgcctgtgaatttcgaggtggcccgggagagtggcccaccccacatgaagaactttgtgaccaaggtttcggttggggagtttgtgggggaaggtgaagggaaaagcaagaagatttcaaagaaaaatgccgccatagctgttcttgaggagctgaagaagttaccgcccctgcctgcagttgaacgagtaaagcctagaatcaaaaagaaaacaaaacccatagtcaagccacagacaagcccagaatatggccaggggatcaatccgattagccgactggcccagatccagcaggcaaaaaaggagaaggagccagagtacacgctcctcacagagcgaggcctcccgcgccgcagggagtttgtgatgcaggtgaaggttggaaaccacactgcagaaggaacgggcaccaacaagaaggtggccaagcgcaatgcagccgagaacatgctggagatccttggtttcaaagtcccgcaggcgcagcccaccaaacccgcactcaagtcagaggagaagacacccataaagaaaccaggggatggaagaaaagtaaccttttttgaacctggctctggggatgaaaatgggactagtaataaagaggatgagttcaggatgccttatctaagtcatcagcagctgcctgctggaattcttcccatggtgcccgaggtcgcccaggctgtaggagttagtcaaggacatcacaccaaagattttaccagggcagctccgaatcctgccaaggccacggtaactgccatgatagcccgagagttgttgtatgggggcacctcgcccacagccgagaccattttaaagaataacatctcttcaggccacgtaccccatggacctctcacgagaccctctgagcaactggactatctttccagagtccagggattccaggttgaatacaaagacttccccaaaaacaacaagaacgaatttgtatctcttatcaattgctcctctcagccacctctgatcagccatggtatcggcaaggatgtggagtcctgccatgatatggctgcgctgaacatcttaaagttgctgtctgagttggaccaacaaagtacagagatgccaagaacaggaaacggaccaatgtctgtgtgtgggaggtgctgaaccttttctggccatgaaccattataaaatcccaacatatatactgaaaatactgaaactgctttgaaaatttggaatttctgatacctccagtgggccgagagacacggtgggtaaaggatgtgggcagcagcagggaagacaacagaaacacaaggaggcggctgtggccgggctggactgtgctggggtttgttgtgatggccactcggtgacctggcggtccctacgcaatagcagctgcctgtggggaagaagggctgcccagccagctggttctcccgggacaccagcagatccacaccctgggcacctccgtgtttggtcttttttttcccctgtgtgaaagaagaaacggcacgaccccttctcaagctggctcactcagacacattgggacaaaccctggacagccatgccagagagaggcctttgaccggccccagagctaaaagcaccagagaaaatcaaatgcttcctactcagcgtgacccaacttttctagtgtgccacggccccaccacctcctgcagtacccacaccatcaccactgctttctcttccaacagtgatctgtattcttagtttcattattttcttttgattgatatgacactatataaaattttcatttgagaatttctcaattgtatctagttaaatagcacagtttggaaacttgtctgagactgactttatcaataatctaaccgacaaagatcatatccatgtgtatgtggttagacatttttatttcattgactaacccaggacagtttcagtgatgcaaattgtgtgccctctggttcagctgaaacagtcctggactttcaaaaaccttgaataagtctcccacagttgtataaattggacaatttaggaattttaaactttagatgatcatttggttccatttttatttcatttttatttttgttaatgcaaacaggacttaaatgaactttgatctctgttttaaagattattaaaaaacattgtgtatctatacatatggctcttgaggacttagctttcactacactacaggatatgatctccatgtagtccatataaacctgcagagtgattttccagagtgctcgatactgttaattacatctccattagggctgaaaagaatgacctacgtttctgtatacagctgtgttgcttttgatgttgtgttactgtacacagaagtgtgtgcactgaggctctgcgtgtggtccgtatggaaagcctggtagccctgcgagttaagtactgcttccattcattgtttacgctggaatttttctccccatggaatgtaagtaaaacttaagtgtttgtcatcaataaatggtaatactaaatttttttgttaatttattctcaaatgccactactgctaggttggtcccctcccaacttgcccctatcctttttttatttttaagaaaaaaactttgtaatgcttgtgattccatctgggcaaaagtctgaagatctgaaataactttatatcaaaccattgatcaataaacagctactaatgaaaaaa

SEQ ID NO: 1113 - DNA, 4876 bp, Homo sapiens
ccgcagttcttgagttccacatgcagagcagatgcgacagctagaagtgagtagggcccagaccctggcccaggaagatccactaaaggaggccatccttccgccttcttctgcaggagtcaggatggaaaggcagatgtaaagtccctcatggcgaaatataacacggggggcaacccgacagaggatgtctcagtcaatagccgacccttcagagtcacagggccaaactcatcttcaggaatacaagcaagaaagaacttattcaacaaccaaggaaatgccagccctcctgcaggacccagcaatgtacctaagtttgggtccccaaagccacctgtggcagtcaaaccttcttctgaggaaaagcctgacaaggaacccaagcccccgtttctaaagcccactggagcaggccaaagattcggaacaccagccagcttgaccaccagagaccccgaggcgaaagtgggatttctgaaacctgtaggccccaagcccatcaacttgcccaaagaagattccaaacctacatttccctggcctcctggaaacaagccatctcttcacagtgtaaaccaagaccatgacttaaagccactaggcccgaaatctgggcctactcctccaacctcagaaaatgaacagaagcaagcgtttcccaaattgactggggttaaagggaaatttatgtcagcatcacaagatcttgaacccaagcccctcttccccaaacccgcctttggccagaagccgcccctaagtaccgagaactcccatgaagacgaaagccccatgaagaatgtgtcttcatcaaaagggtccccagctcccctgggagtcaggtccaaaagcggccctttaaaaccagcaagggaagactcagaaaataaagaccatgcaggggagatttcaagtttgccctttcctggagtggttttgaaacctgctgcgagcaggggaggcccaggtctctccaaaaatggtgaagaaaaaaaggaagataggaagatagatgctgctaagaacaccttccagagcaaaataaatcaggaagagttggcctcagggactcctcctgccaggttccctaaggccccttctaagctgacagtgggggggccatggggccaaagtcaggaaaaggaaaagggagacaagaattcagccaccccgaaacagaagccattgcctcccttgtttaccttgggtccacctccaccaaaacccaacagaccaccaaatgttgacctgacgaaattccacaaaacctcttctggaaacagtactagcaaaggccagacgtcttactcaacaacttccctgccaccacctccaccatcccatccggccagccaaccaccattgccagcatctcacccatcacaaccaccagtcccaagcctacctcccagaaacattaaacctccgtttgacctaaaaagccctgtcaatgaagacaatcaagatggtgtcacgcactctgatggtgctggaaatctagatgaggaacaagacagtgaaggagaaacatatgaagacatagaagcatccaaagaaagagagaagaaaagggaaaaggaagaaaagaagaggttagagctggagaaaaaggaacagaaagagaaagaaaagaaagaacaagaaataaagaagaaatttaaactaacaggccctattcaagtcatccatcttgcaaaagcttgttgtgatgtcaaaggaggaaagaatgaactgagcttcaagcaaggagagcaaattgaaatcatccgcatcacagacaacccagaaggaaaatggttgggcagaacagcaaggggttcatatggctatattaaaacaactgctgtagagattgactatgattctttgaaactgaaaaaagactctcttggtgccccttcaagacctattgaagatgaccaagaagtatatgatgatgttgcagagcaggatgatattagcagccacagtcagagtggaagtggagggatattccctccaccaccagatgatgacatttatgatgggattgaagaggaagatgctgatgatggctccacactacaggttcaagagaagagtaatacgtggtcctgggggattttgaagatgttaaagggaaaagatgacagaaagaaaagtatacgagagaaacctaaagtctctgactcagacaataatgaaggttcatctttccctgctcctcctaaacaattggacatgggagatgaagtttacgatgatgtggatacctctgatttccctgtttcatcagcagagatgagtcaaggaactaatgttggaaaagctaagacagaagaaaaggaccttaagaagctaaaaaagcaggaaaaagaagaaaaagacttcaggaaaaaatttaaatatgatggtgaaattagagtcctatattcaactaaagttacaacttccataacttctaaaaagtggggaaccagagatctacaggtaaaacctggtgaatctctagaagttatacaaaccacagatgacacaaaagttctctgcagaaatgaagaagggaaatatggttatgtccttcggagttacctagcggacaatgatggagagatctatgatgatattgctgatggctgcatctatgacaatgactagcactcaactttggtcattctgctgtgttcattaggtgccaatgtgaagtctggattttaattggcatgttattgggtatcaagaaaattaatgcacaaaaccacttattatcatttgttatgaaatcccaattatctttacaaagtgtttaaagtttgaacatagaaaataatctctctgcttaattgttaactcagaagactacattagtgagatgtaagaattattaaatattccatttccgctttggctacaattatgaagaagttgaaggtacttcttttagaccaccagtaaataatcctccttcaaaaaataaaaataaaagaaaaaggaaaatcattcaggaagaaatgacctgtctaaaaaaacctaaggaagaataataatataagaaaggaaatttaaaaacattccacaagaagaaaaattattgtttatacttctacttatggttatatcttatattctctattcaagtgacctgtcttttaaaaaggcagtgctgtcttacctcttgctagtgggttaaatgttttcaaaaattatagcagtagtagaagttttgtataaaatttgtccttatttgttaattgtatataaatgttaattatttgatacgaatgttatgcatttagtatgcacattgaagtctaaactgtagaagagtctaaaacaagttctctttttgcagattcacatactaatggtttaattctgtgctctgtttaaagtactattataactagagtagatctgaatgaggataaccctaaaatcatgaggaatggaagaatggaccttgaaactacctaggcttttatgcatggcacctctttataatgaagacactttttaaagtttttgtttttgtttcaattaccgctagatttttttttctctttttttaaaatccattttactggaaagttggccagcagagggagtagaaattattaaaattctagtgtttggattgggcccttctctaacagtacatactcattcccaaagcaatccaaaaacaaaatgtgaaccatttgggtttcaaatgttaagaacactaaatagcatgatttaaaaaatgaaaaatgctaacacccaagaaaagaagatattaagtgctttttaacaactcctagagtacaaaatgagtacatcataatgctggctcttctactaatgaaccatcgagtgatattgaataaattatttatcttctcagtttccttatctgtaaattacaatattagactaagtaagtttttccaactcttcactaccaattaccttaggcttttataatgctccgcctacttcagtcccatgtttcagaagcttttgtctattttttaaactcattgattaaataatgattaatgcattctccacattttaatattgcaaaggcccattggagtttctgaagtggctccacagaattgaaataatttcaaataactgtaaaggaactgaaaatcttcacagagatgaagtggggtttccattaggtgctttgaaatttgataacaaatcatcaacttccactggtcaatatatagattttgggtgtctgaggccccaagattagatgccactaatctccaaagattccctccaattatgaaatattttaatgtctacttttagagagcactagccagtatatgaccatgtgattaatttcttttcacactagataaaattacctggttcaaaagtggtttttgtttattaaatttggtaataaatatatataatacacagacaggatagtttttatgctgaagtttttggccagctttagtttgaggactccttgataagcttgctaaactttcagagtgccctgagacacttccagccatccctcctcctgccttcattggggcagacttgcattgcagtctgacagtaattttttttctgattgagaattatgtaaattcaatacaatgtcagtttttaaaagtcaaagttagatcaagagaatatttcagagttttggtttacacatcaagaaacagacacacatacctaggaaagatttacacaatagataatcatcttaatgtgaaagatatttgaagtattaattttaatatattaaatatgatttctgttatagtcttctgtatggaattttgtcacttaagatgagctgcaaataaataataccttcaatggaaaaaaaaaaaaaaaaaaaaaaaaaaaaaaaaaaaaaaaaaaaaaaaaa

SEQ ID NO: 1114 - DNA, 2240 bp, Homo sapiens; identical to SEQ ID NO: 198

SEQ ID NO: 1115 - DNA, 8850 bp, Homo sapiens
gcgatgctcggggaaagcaggaccccaaagccccgtaaacaccgcgcgaccacccgggccaagatcttcaagaggttcttttcagaaggatcggagagcaattcccgattggtagaagaacttgctgtaatacacacgtactctgacgaccccgccccaacgactagcccctcctctgtgcaaccccgagagtttggggtcatgcagggggcgccacgagctcgtttcggaagccggaccccgcccgcagccgcagaagcctcgagtccacatctgggtctctaaagtctcgccgtagccagatcccggatccccaccttcttcaccagttcccgggcgtcctccaggcattggcgaggcagcctgtcaatcaggagctcgggcggcagccccccgcgcgggggctcggcgatgccagcctcagcgacaggcggcggcggcggcggccacggcacagacacacaccctcccacacgcgcgcaccagggcagacccggcgggcaggcggcggaggcaccctcggagcccggcgcccggcggggaggggacgtgctccgagggaccggccccgaggcgccggatggaggaagagatgcagccggcagaggaggggcccagcgtccccaaaatctacaagcagcgcagcccctacagcgtcctcaagacgttccccagcaagagaccggcgctggccaagcgctacgagcgacccaccctggtggagctgccgcacgtgcgggcgcccccgccgcccccgccgcccttcgcgccgcacgccgccgtctccatcagcagcagcgagccgccgccgcagcagttccaggcgcagagctcctacccccccgggcccggccgggccgccgccgccgcttcgtcgtcgtcgccgtcctgcacgcccgccacatcccagggccacttgaggactccggcgcagccgccgcccgcgtcccccgccgcctcctcgtcgtcttcgttcgccgctgtcgtcaggtatggcccaggcgcggcggcggccgccggcaccggcggcacgggtagcgacagcgccagcctggagctcagcgcagagagtcgaatgatcttggatgcctttgcccagcagtgcagtcgagttcttagcctcttaaattgtggaggaaaactcctggactccaaccattctcagtccatgatttcttgcgtaaagcaggaaggctcaagttacaacgaaagacaggagcactgtcacattgggaaaggggtccacagtcagacctcagacaatgtagacatagagatgcagtatatgcaaaggaaacaacaaacttctgcctttttgagggttttcactgactctctacaaaattacctgctctcgggaagctttccaactccaaacccctcgtcagccagtgaatatggccatctggccgacgtggatcctctgtcaacctctcctgtgcatacattaggtggctggacttccccagcaacgtccgaatcccatggccacccatcttcatctacactgccagaagaggaggaggaggaggacgaggaaggctattgtcctcgatgccaagagctggagcaggaggttatttcactgcaacaagaaaatgaagagctcagaaggaaattagagagcatcccagtgccctgccagaccgttttagattacttgaagatggttctgcagcaccacaaccaactcctgataccacagccagctgaccagccgacagagggaagcaagcagctgttgaacaactatcctgtctacataacgagcaaacagtgggatgaggctgtaaattcttcaaagaaagatgggagacggctccttcgatacctcatcagatttgttttcacaaccgatgagcttaagtactcatgcggccttgggaaaaggaaaaggtcagtgcagtcaggagagacaggtcccgaaagacgccctctggatccagttaaagtaacatgcctccgagaattcattaggatgcattgtacctccaaccccgattggtggatgccctcggaagagcagataaacaaagtgttcagcgacgctgtcggtcacgcccgacaggggcgggcggtggggactttcctgcacaacggtggctcattttatgaagggatcgatcaccaggcttctcaggatgaagtcttcaataaaagttcccaggatggatctggggattagtggacagaatcttcctgttgtagcagctggtcctctcaagagttccaattgtgaatgtcctgttcctgtcacctgagagtccaaagcctgtcattctgccatagtctacacattctcagctgccacagtacccaaatagaaatccattttagggttgtttgggaagtctgtggcacctacaacagacttttggaatattatattataaaaagaaaaaactacatctgatttttaaatgattactagctagatcatgagggtgaaaaaataggtgagctcctagttacctttctgaaatcttcaaactctgctacctgggcagagatagtccccaaggtaggctggggtagtgtttctgcccatgggagaaggtggagacatggagttgtgttaagggacaagaagcaaacattctcttaattcaaataagttgtctttatgttttccaaagacttgacttcatatttctcggcaaagacataggatagatgacatcatataccattttgacattaataatgtctattactaaaaggaaaccagagaacagaggcaacatctgcagacagtgattaattacaggtcaactgtttttctgttgtttaaaaaccactgtgttgatcaagaaggcactatttgatctctggagtttacaaacagtagtcatttttcattgttagtcaagaaacatccaaagatccaaaaccattttcaaatgctcagttttgtaggttaataaatccgcagtttccatagccttaaatcaggctttgttgacacaatgccaaagtgatgggtagaacaatgaaaatttaaagcaattagttgtttggtgcactgaagaccaaacaagtggtgtgactgatggtattcgctgaattgactagatgttctggcattgtatacacacagcttcaaggcgattctgacaactatgcaatgggcttgtcagtaattgctctgaaatttgagggtctttctctgctgagctgatctttagaatttgtatgaaacttgtttcccattgtccttgatgaaaacatttcatcccctccgtgcctcctttaccccaatgtaccccttagctatggctaagtcagcactgtgccgctatcccctggttaatttgttgagttccatatgtgaaattagtggtatctttggaaactttccatattggcaaatgctatagaggtgctagagtcatcatttctgagggcttcctgtttggactcaggagaggctttctttaccaaactagtccagattactacattctttgtagagcaaagggctaaatggacagcgtttattgaaggctactaatgtcatctacagacatgaccaagggtttttgaaaattggttggagattcaggttaatgagcatccattgataaagggtttttgggctatttttgtcaacataaactcataaattgtcctttagatttaatatttagtttgtattcactatatacaaagtcctagaaacaggtctttctgtagcttttgtttattagcttttttgtattactagaattcatccattgaaaagtttaatgtttatggaggtggtcatctgtcagatctgctcaatgatgtagtgggcactaatatttcaatcctgttttgagaaaattaactaaaatttgtcatatcattcaatggaatagggagaaccaatattcaattctatttggggcaaattagctaaaatttggaagtaaaagaaatgatatgggcaaatgccatgttcttacggcagccatgagaccagtctctttggctctccaaggaagaaagatacctcttaaagcattttttagaggtccgagaagtcagtgtctgtcttataagattctttgacaacatgacatcttcgctagaagaaaaacaccaccatagcctcatctgtttttccatcttaccttaatttttcattggccttaagttgtccttactgctgaatacatcgttctgtttttctaaagcaacaatatttgatcactgcttttaagaaaaacagactagcccttcttgtttttctggaagtttgagagtcctgaatatttcttcatatccaaatatcatcttggagccctatcgtgctggtcttcgctgaggctgatgagagcactttctgcacccctgctccatggccgtacatgacaacgcacctgcaccactgctgcaagggcggggggcagcagcctgtgttttggctgtcactgttacctcctgagaaggctgctgtcccaggtttgcacaccacttttgttccaaagttacacatggtctcttcctccctcgcacccattccaggttaatcatttctctatcagctgtttctccatccacagattctgaatgttgagactaattgttgggcatctcttttgcacaaggctgacagactccatactcagcatcgcacagccagttctaactcctctgctgggtctcggacctacagcttttgcctgagtgaaatgttcctacgacttttgctcctgagtgagatattccattgtacttctactgtttgtgtatctgctgggttcctttagccaagcctagcgtctgacgcaggcactagccgccactgaggccgtgatacagcatcactgtggacactgctggctcctctccttgggacatatccacactgccccttgagcttcacctttaaggctggtatgtacgtaagttcacggtggtcgtctgcatggtctcctcttgtttaaatcaggaccaacaaaggatgttcatttgtattttggcaaggcccattgggcctctgtgtagccaggttaaaagctcactcactaggatcggatgctgtcattgctctgtgagcctttcagttgaaatccttggagacttgaaggtgttgcttattattttgatttgattttctgcatctttatctggcaaatggacagattgctctcacaagaaacttagtcatgtcagcttttagagtccttcttgagtcatgttagcattggtagtgtaaaatagattgagttaaaacagctcaggatgcagctgtgcccccacttaattggtgagaggaggaggtcacggggctggcttgacaacaaagactaaatgtggcttttttgtcggtgactaggtgtggtccataagcagaagagccatacctacaaaaagtgacaactgtcctgtgttttccaaattaaaatcttgttacaaagatcatgccggcttttcgcagtgagttgaagccccaagctcagttccagccaggctcaggatgaccctcaaatgatatgtattggatagtgtaggtcaggagcctgtggaggggaccagtattttgcaagcagttactaaagtcacatttctcactgactcttgacggtgcattgttcaaaatctcatggcttaaccttagtgttaaatgctttcaagaaaaactgtaaccatttcaattttacaagtactttctcattttacttgaacattttacaagtactttctgtatttacttgtaaatatttcctctagcccttgaacccgcgcatcacttttttggttttcctcattccaccacagcatttaggtgaccgttaccatttatgtttcattaagcttcactaggaatgtaaggataatattagagcatttgcagaaaattgttatctccttttgtaggggattcgagacatatttgtagctacttcacggctgtagagttagtgggtgatcgggtattctgcattgttccttatccctttgtcagtgacagacacattgacataagagattcctacaggattataaggagagataaattattaaccatttttttacttgatccaactactccatgtcccatcaactagtggtaactgatgttgataggattttttttaagtccagtaactattcttgcagtatcagatgtttaccccaaattaggcaataacccagacttcgaatctgtaggtttatgattcctacattcccctgccgctctcaatggcttgttgcctcccttctgttgctctcagaaaacagatggagatcaggtaaagatgaaacgtgcactatatgttcagaaaagcaaacatccattgtcctcatttagattccatccttcaatttatgctctagaacctaaacctaatacccattgactacctcctgagtttcttaggtttcaattatttttttgaaatgtcatccatggataatagcttcaattttaggaaagatttaaatgtataactttcctcattcagtgctgtgtcatttcacagtacagatctgcgttaatttttgacagctcatatatacagatttttagaaatgtaatagaaaatgattttgcacatatggtgcaagtcttgctggtgtatgtttaatgtggcaacacgtgccagaactgtttggcaaaacatgtcaaatggagtgcttgagtcagaactctaatgtaaatgtgtctaaacagcagtatgtatcattatgatgtatttttgtaaacatagtgatggctgctttcagtcatgtaagtgctggataaaaataaccacttcagttggagtaatgtaggaaaacgtcacccagcagatgggtagtcctctgcaaagttacactgtcagccagtggcactggttcttttatttatgttgggtttttgttttttttttagaggagagtgaagaattgacatcagacaacatggagtgcaaaaataataacccatcaatatttgccttctaaatgtaaaatgtaaaagtttaactgatctgtgtacacattagagaccactttcacacgccacaatatgttcagttgcaggttaacactgagaggttgagacttccctcatctgatgaccagcttggttaatttgacttctgaaggcactaaattaccaagtatttgcagtaatggggaccggattaattttcctcacaattctctatagctgtctgatataagggctgtgtttttattgaatcacagatcctcaaattacagtgaaagcatgtcttgctagtaagactcatttgaaaacctctttattcttggaataattgggccagtacaagtggccagatgtatcctggccacattggaaaactatttgggcccgttcagaaccacttaactgcaacaacagtagtaactatagttaatatctatctattgagttattgtgtgacagttacttggataagtactttaatgcattctcattttaatcctcacagctaccctatgaggctgttactgttcttatccccattgtattgataaggaaactgcccagggtactcagctaagaagaggattgctttgggcataggaagcagaatgacgagttcagtcttcctcagtagttggagcacagttctcaaagcccatcaacactttggaatggatttgttgttttatttatgccatcaagggagagttgatatttgtgtattgctaaaaactactaaagtatgtcgatgcttaggtaggaacatacaaaccatatatcctctgggatctgcccaggtttctgtataaggcttgacctacgtaagatcctatgatgaagaccagaaaactttttttaaaagtaggtaaattaaaattaaaatcacgagtttgttcacatttgtcccataggttcctagtgcaaaaatgcagggagataaaagcaaacatttgaactcagtgaagtgagagtctttgggaactcctagatgttagaaatagcaccggggcatcaggtagccaacgttcaattcacttttcacgtttgtgtctttgtagctttagagctgatgagtctgattggtttggaagagagagttttaatttatgatgtcactgtgagaactgttgtgaaaattttgtaagaaaatacagtaatctgttgattttttcctgtagttttggctttcacatccctttggctgtgtttaagttcaagagcatgccaaggccatgagggtcctggcttgcacttcttgggaacagggcatgctagaggtgggtcatgaagctttcaaggtcactgttccagcccgaccctgcgcaatttaggcattgcctttatgtctctcctctctggaacttcatgtagcagcctaacaccggggccgagttgcctttactctattttctatgatgaatacttgtggagaaactgtgacaaatccattgatcctgatatttttattgttggagtcttgttgattctctatgaataatttctatttgattgtactgtgtagagttaatacccactagggatatgttaataaagctacaaatgcatagtgtaatatagaatagcaagatttttttgtgaacaatttatatagaagagtaagttgttttttaagtgttaggctcatttcttttagaaacttaaaatgttataaaagttttttaaacattcaatatttttaattataagagacatttgttactagagccaattatttcaggtgttctaattggagtgttgattttattacctcatatacctctagaatgccacgtgttctgttggggataaaattgcacaataaatgtcaagtctctgttaagtgttttaacttggtttttgcatctttctaattcattgtaaatacttttctgtttctttgaatacataacttttctctccctgaa

SEQ ID NO: 1116 - DNA, 3126 bp, Homo sapiens
agcgcgcgcaggggctgcggagcggcaggatgcaggaggagctggcgtgggagaccgacggcctgcttcctctggagaggcagctccacgaggccgcccgccagaacaatgtcggcaggatgcaggagctgattgggaggagggttaacaccagggccagaaaccacgtgggcagggtggccctgcactgggctgcaggtgcagggcacgagcaggctgtgcgtctgcttctggagcacgaggctgctgtggacgaggaggatgcggtaggggccctcacagaggcacgtctgtgttttgggatgaatgcgcttctcctgtctgcctggttcggccacttacgaatcctccagatcttggtaaactcaggggccaagatccactgtgagagcaaggatggcctgaccttactgcactgcgcagcccaaaaaggccatgtgcctgtgctggcgttcataatggaggacctggaggatgtggccctggaccacgtagacaagctggggaggacggcgtttcacagggcagctgagcacgggcagctggatgctctggacttcctcgtgggctctggctgtgaccacaatgtcaaagacaaggaggggaacactgcccttcatctggctgctggtcggggccatatggctgtgctgcagcgacttgtggacatcgggctggacctggaggagcagaatgcggaaggtctgactgccctgcattcggctgctggaggatcccaccctgactgtgtgcagctcctcctcagggctgggagcaccgtgaatgccctcacccagaaaaacctaagctgccttcactatgcagccctcagtggctcggaggatgtgtctcgggtcctcatccacgcaggaggctgcgccaacgtggttgatcatcagggtgcctctcctctgcacctcgctgtgaggcacaacttccctgccttggtccggctcctcatcaactccgacagtgacgtgaatgccgtggacaataggcagcagacgccccttcacctggctgcagagcacgcctggcaggacatagcagatatgctcctcattgctggggttgacttaaacctgagagataagcagggaaaaaccgccctggcagtggctgtccgcagcaaccatgtcagcctggtggacatgatcataaaagctgatcgtttctacagatgggagaaggaccaccccagtgatccctctgggaagagcttgtcctttaagcaggaccatcggcaggaaacacagcagctccgttctgtgctgtggcggctggcctccaggtatctgcagccccgtgagtggaagaagctggcatattcctgggagttcacggaggcacatgtcgacgccatcgagcaacagtggacaggcaccaggagctatcaggagcacggccaccgaatgctgctcatttggctgcatggcgtggccacggctggtgagaaccccagcaaagcgctgttcgagggcctcgtggccattggcaggagggacctggctggctggagtacaatggcgagatctcagctcacggcaacctccgcctcccgggttcaaatgattctcgtgcctcagcctcccgagtagctgggattacaggtgcatgccatcacagctggctaatttttgtatttttagtagagatggggtttggccatgatggccaggctggaaaattgaaacataatttcacaattattcctttttccaccttaaataataagagtagaatactttctgtgtttttatcttatacacatgaataaatgctatggcttatcacagttacaatgtgttttctgaaagtaaagattattttaccttgaaattacaaaaattattttcagttttccaaaattctatcatctttaaacctaaataattcaatttcatggatgcacaaatgtttattgagagtctcatattcatgcttttcttcacagcactataaagttggacttggaaaatttggacagccatttgccattgtaatttttattcttttttctcctgattatttgacaaaacttgtatccacattgtagctgttcatgtgtctgcttctattgcatattgtaaaattattaactacttcccaaaatagtatttctctcagcagatatttctttggtactaccatgtattgtgtaacttttgggaaagtaaggtggcttccctgctctcagtgaagcattttattaaaagaataattataattaaaaaaacacgatacagatcagtgcatatagtatattactaatagtatgctgttaattgtgtaagaaagaaaggaaattagaaaacatatttgcataaataaaagctagacaaaggctaagaaactaatcaggtggtttccctggggtagtaggataatggggaacagtggggctgggaccgggtgggagaaagagttctcagtggttcctttctatacagttttaacttttgaaatgtgtgagagtgttacttactgaaaactgaaaggatatgacatgctggaacaggcaaaactacaaagacagtaaaaagatcagtgatttccaggagctgcaagggcagtgagaggaagggagggatgaggaggtggagtgcaggggatgttagggcagtgaaaggttctgtatgacactgtgatggtgggtacatgacattgggcattggtcaaaacccatagcatgtacagcacaaagcgtttgctctaatgtgagctatggactttagttaatagtaacgtgtcaatattggttcatcagttgtatcaaatgtaccacactgatgccagatgttaataatcggggaaactgtgtgtgctgaagagtacgtgggagctctctgtgctatctgctcaatttttctctaaacctaaaactgttctaaaatagaaagtctgtgaaaaaaaacaaaagtaaagttataaaaggaaaagaaaacagaggctttaaattaaatcatctattccttgggaaaggtattttgtaccatatgggactgaaatcatttctctggatgaattttataaaatgaattttgtaatttttttctgagaaaaaaaagttcttaaatacaataaaattgaaatgttgaaatatatctctcaaaaaaaaaaaaaaaa

SEQ ID NO: 1117 - DNA, 1943 bp, Homo sapiens
agtgcgctgtgctcgaggggtgccggccaggcctgagcgagcgagctagccagcaggcatcgagggggcgcggctgccgtccggacgagacaggcgaacccgacgcagaagagtccaccaccggacagccaggtagccgccgcgtccctcgcacacgcagagtcgggcggcgcggggtctcccttgcgcccggcctccgccctctcctcctctcctttccccttcttctcgctgtcctctcctctctcgctgcccgcgtttgcgcagccccgggccatgtccgacgcgtccctccgcagcacatccacgatggagcgtcttgtcgcccgtgggaccttcccagtactagtgcgcaccagcgcctgccgcagcctcttcgggccggtggaccacgaggagctgagccgcgagctgcaggcccgcctggccgagctgaacgccgaggaccagaaccgctgggattacgacttccagcaggacatgccgctgcggggccctggacgcctgcagtggaccgaagtggacagcgactcggtgcccgcgttctaccgcgagacggtgcaggtggggcgctgccgcctgctgctggcgccgcggcccgtcgcggtcgcggtggctgtcagcccgcccctcgagccggccgctgagtccctcgacggcctcgaggaggcgccggagcagctgcctagtgtcccggtcccggccccggcgtccaccccgcccccagtcccggtcctggctccagccccggccccggctccggctccggtcgcggctccggtcgcggctccggtcgcggtcgcggtcctggccccggccccggccccggctccggctccggctccggccccggctccagtcgcggccccggccccagccccggccccggccccggccccggcccccgccccggccccggccccggacgcggcgcctcaagagagcgccgagcagggcgcgaaccaggggcagcgcggccaggagcctctcgctgaccagctgcactcggggatttcgggacgtcccgcggccggcaccgcggccgccagcgccaacggcgcggcgatcaagaagctgtccgggcctctgatctccgatttcttcgccaagcgcaagagatcagcgcctgagaagtcgtcgggcgatgtccccgcgccgtgtccctctccaagcgccgcccctggcgtgggctcggtggagcagaccccgcgcaagaggctgcggtgagccaatttagagcccaaagagccccgagggaacctgccggggcagcggacgttggaagggcgctgggcctcggctgggaccgttcatgtagcagcaaccggcggcggctgccgcagagcagcgttcggttttgtttttaaattttgaaaactgtgcaatgtattaataacgtctttttatatctaaatgtattctgcacgagaaggtacactggtcccaaggtgtaaagctttaagagtcatttatataaaatgtttaatctctgctgaaactcagtgcaaaaaaaagaaaaaagaaaaaaaaaaggaaaaaataaaaaaaccatgtatatttgtacaaaaagtttttaaagttatactaacttatattttctatttatgtccaggcgtggaccgctctgccacgcactagctcggttattggttatgccaaaggcactctccatctcccacatctggttattgacaagtgtaactttattttcatcgcggactctggggaagggggtcactcacaagctgtagctgccatacatgcccatctagcttgcagtctcttcgcgctttcgctgtctctcttattatgactgtgtttatctgaaacttgaagacaagtctgttaaaatggttcctgagccgtctgtaccactgccccggcccctcgtccgccgggttctaaataaagaggccgaaaaatgctgcaaaaaaaaaaaaaaa

SEQ ID NO: 1118 - DNA, 502 bp, Homo sapiens
gggatatagggccctgcctggcacccactctctctccggtccgtgcctccaagatgacaaagaaaagaaggaacaatggtcgtgccaaaaagggccgcggccacgtgcagcctattcgctgcactaactgtgcccgatgcgtgcccaaggacaacgccattaagaaattcgtcattcgaaacatagtggaggccgcagcagtcagggacatttctgaagcgagcgtcttcgatgcctatgtgcttcccaagctgtatgtgaagctacattactgtgtgagttgtgcaattcacagcaaagtagtcaggaatcgatctcgtgaagcccgcaaggaccgaacacccccacctcgatttagaccttgcgggtgctgccccacgtcccccaccaaagcccatgtaaggagctgagttcttaaagactgaagacaggctattctctggagaaaaataaaatggaaattgtacttaaaaaaaaaaaaaaaaaagcccaggaccagatg

SEQ ID NO: 1119 - DNA, 1126 bp, Homo sapiens
ccagcctaggccgaacttccggctctcactgctaggggcttaagcggagggagtcgagccagcgtcgccgcgatggtgttgttggagagcgagcagttcctgacggagctgaccagacttttccagaagtgccggacgtcgggcagcgtctatatcaccttgaagaagtatgacggtcgaaccaaacccattccaaagaagggtactgtggagggctttgagcccgcagacaacaagtgtctgttaagagctaccgatgggaagaagaagatcagcactgtggtgagctccaaggaagtgaataagtttcagatggcttattcaaacctccttagagctaacatggatgggctgaagaagagagacaaaaagaacaaaactaagaagaccaaagcagcagcagcagcagcagcagcagcacctgccgcagcagcaacagcaccaacaacagcagcaacaacagcagcaacagcagcacagtaaagggcatacatttcctgctttcaccaattaaccactgaattgctattttttccttttggccagatagctaggtttctggttcccccacagtaggtgttttcacataagattagggtccttttggaaagaatagttgcagtgtttataggatagttgtggtaagaatctagtttattttgcatttggctaattggtctgtgctgcatggttatatactcctggattatagattaaaagtctctgtagacatctctgtgaagagcaagctatcattaaacatgtctgtttatcagcactgtctctttattcctttcccaacccattttaatagttctggcaataactactaaatctagaatgatgtgattaatgaataggctttagctctataatatcttctaggttattagaattgaaacctgacagttttataaaaagtcatgttatctcatgagctgcttcccacctggctgtataattttatcatcatggttccccagtttcgatgagttctcacagtcaaatgagagtttgtttaaccaccttaggagaaacatactacaaagtcatcaagaataaaggttccaaagtaattatgatttttggtttctttatgccctttggtttggatattttcatgtgc

SEQ ID NO: 1120 - DNA, 8980 bp, Homo sapiens
ggaggttgtggggccgccgccgcggagcaccgtccccgccgccgcccgagcccgagcccgagcccgcgcacccgcccgcgccgccgccgccgccgcccgaacagcctcccagcctgggcccccggcggcgccgtggccgcgtcccggctgtcgccgcccgagcccgagcccgcgcgccggcgggtggcggcgcaggctgaggagatgcggcgcggagcgccggagcagggctagagccggccgccgccgcccgccgcggtaagcgcagccccggcccggcgcccgcgggccattgtccgccgcccgccccgcgccccgcgcagcctgcaggccttggagcccgcggcaggtggacgccgccggtccacacccgccccgcgcgcggccgtgggaggcgggggccagcgctggccgcgcgccgtgggacccgccggtccccagggccgcccggccccttctggacctttccacccgcgccgcgaggcggcttcgcccgccggggcgggggcgcgggggtgggcacggcaggcagcggcgccgtctcccggtgcggggcccgcgccccccgagcaggttcatctgcagaagccagcggacgcctctgttcaacttgtgggttacctggctcatgagaccttgccggcgaggctcggcgcttgaacgtctgtgacccagccctcaccgtcccggtacttgtatgtgttggtgggagtttggagctcgttggagctatcgtttccgtggaaattttgagccatttcgaatcacttaaaggagtggacattgctagcaatgagctcccaaagccatccagatggactttctggccgagaccagccagtggagctgctgaatcctgcccgcgtgaaccacatgcccagcacggtggatgtggccacggcgctgcctctgcaagtggccccctcggcagtgcccatggacctgcgcctggaccaccagttctcactgcctgtggcagagccggccctgcgggagcagcagctgcagcaggagctcctggcgctcaagcagaagcagcagatccagaggcagatcctcatcgctgagttccagaggcagcacgagcagctctcccggcagcacgaggcgcagctccacgagcacatcaagcaacaacaggagatgctggccatgaagcaccagcaggagctgctggaacaccagcggaagctggagaggcaccgccaggagcaggagctggagaagcagcaccgggagcagaagctgcagcagctcaagaacaaggagaagggcaaagagagtgccgtggccagcacagaagtgaagatgaagttacaagaatttgtcctcaataaaaagaaggcgctggcccaccggaatctgaaccactgcatttccagcgaccctcgctactggtacgggaaaacgcagcacagttcccttgaccagagttctccaccccagagcggagtgtcgacctcctataaccacccggtcctgggaatgtacgacgccaaagatgacttccctcttaggaaaacagcttctgaaccgaatctgaaattacggtccaggctaaagcagaaagtggccgaaagacggagcagccccctgttacgcaggaaagacgggccagtggtcactgctctaaaaaagcgtccgttggatgtcacagactccgcgtgcagcagcgccccaggctccggacccagctcacccaacaacagctccgggagcgtcagcgcggagaacggtatcgcgcccgccgtccccagcatcccggcggagacgagtttggcgcacagacttgtggcacgagaaggctcggccgctccacttcccctctacacatcgccatccttgcccaacatcacgctgggcctgcctgccaccggcccctctgcgggcacggcgggccagcaggacgccgagagactcacccttcccgccctccagcagaggctctcccttttccccggcacccacctcactccctacctgagcacctcgcccttggagcgggacggaggggcagcgcacagccctcttctgcagcacatggtcttactggagcagccgccggcacaagcacccctcgtcacaggcctgggagcactgcccctccacgcacagtccttggttggtgcagaccgggtgtccccctccatccacaagctgcggcagcaccgcccactggggcggacccagtcggccccgctgccccagaacgcccaggctctgcagcacctggtcatccagcagcagcatcagcagtttctggagaaacacaagcagcagttccagcagcagcaactgcagatgaacaagatcatccccaagccaagcgagccagcccggcagccggagagccacccggaggagacggaggaggagctccgtgagcaccaggctctgctggacgagccctacctggaccggctgccggggcagaaggaggcgcacgcacaggccggcgtgcaggtgaagcaggagcccattgagagcgatgaggaagaggcagagcccccacgggaggtggagccgggccagcgccagcccagtgagcaggagctgctcttcagacagcaagccctcctgctggagcagcagcggatccaccagctgaggaactaccaggcgtccatggaggccgccggcatccccgtgtccttcggcggccacaggcctctgtcccgggcgcagtcctcacccgcgtctgccaccttccccgtgtctgtgcaggagccccccaccaagccgaggttcacgacaggcctcgtgtatgacacgctgatgctgaagcaccagtgcacctgcgggagtagcagcagccaccccgagcacgccgggaggatccagagcatctggtcccgcctgcaggagacgggcctccggggcaaatgcgagtgcatccgcggacgcaaggccaccctggaggagctacagacggtgcactcggaagcccacaccctcctgtatggcacgaaccccctcaaccggcagaaactggacagtaagaaacttctaggctcgctcgcctccgtgttcgtccggctcccttgcggtggtgttggggtggacagtgacaccatatggaacgaggtgcactcggcgggggcagcccgcctggctgtgggctgcgtggtagagctggtcttcaaggtggccacaggggagctgaagaatggctttgctgtggtccgcccccctggacaccatgcggaggagagcacgcccatgggcttttgctacttcaactccgtggccgtggcagccaagcttctgcagcagaggttgagcgtgagcaagatcctcatcgtggactgggacgtgcaccatggaaacgggacccagcaggctttctacagcgaccccagcgtcctgtacatgtccctccaccgctacgacgatgggaacttcttcccaggcagcggggctcctgatgaggtgggcacagggcccggcgtgggtttcaacgtcaacatggctttcaccggcggcctggacccccccatgggagacgctgagtacttggcggccttcagaacggtggtcatgccgatcgccagcgagtttgccccggatgtggtgctggtgtcatcaggcttcgatgccgtggagggccaccccacccctcttgggggctacaacctctccgccagatgcttcgggtacctgacgaagcagctgatgggcctggctggcggccggattgtcctggccctcgagggaggccacgacctgaccgccatttgcgacgcctcggaagcatgtgtttctgccttgctgggaaacgagcttgatcctctcccagaaaaggttttacagcaaagacccaatgcaaacgctgtccgttccatggagaaagtcatggagatccacagcaagtactggcgctgcctgcagcgcacaacctccacagcggggcgttctctgatcgaggctcagacttgcgagaacgaagaagccgagacggtcaccgccatggcctcgctgtccgtgggcgtgaagcccgccgaaaagagaccagatgaggagcccatggaagaggagccgcccctgtagcactccctcgaagctgctgttctcttgtctgtctgtctctgtcttgaagctcagccaagaaactttcccgtgtcacgcctgcgtcccaccgtggggctctcttggagcacccagggacacccagcgtgcaacagccacgggaagcctttctgccgcccaggcccacaggtctcgagacgcacatgcacgcctgggcgtggcagcctcacagggaacacgggacagacgccggcgacgcgcagacacacggacacgcggaagccaagcacactctggcgggtcccgcaagggacgccgtggaagaaaggagcctgtggcaacaggcggccgagctgccgaattcagttgacacgaggcacagaaaacaaatatcaaagatctaataatacaaaacaaacttgattaaaactggtgcttaaagtttattacccacaactccacagtctctgtgtaaaccactcgactcatcttgtagcttatttttttttaaagaggacgttttctacggctgtggcccgcctctgtgaaccatagcggtgtgcggcggggggtctgcacccgggtgggggacagagggacctttaaagaaaacaaaactggacagaaacaggaatgtgagctgggggagctggcttgagtttctcaaaagccatcggaagatgcgagtttgtgcctttttttttattgctctggtggatttttgtggctgggttttctgaagtctgaggaacaatgccttaagaaaaaacaaacagcaggaatcggtgggacagtttcctgtggccagccgagcctggcagtgctggcaccgcgagctggcctgacgcctcaagcacgggcaccagccgtcatctccggggccaggggctgcagcccggcggtccctgttttgctttattgctgtttaagaaaaatggaggtagttccaaaaaagtggcaaatcccgttggaggttttgaagtccaacaaattttaaacgaatccaaagtgttctcacacgtcacatacgattgagcatctccatctggtcgtgaagcatgtggtaggcacacttgcagtgttacgatcggaatgctttttattaaaagcaagtagcatgaagtattgcttaaattttaggtataaataaatatatatatgtataatatatattccaatgtattccaagctaagaaacttacttgattcttatgaaatcttgataaaatatttataatgcatttatagaaaaagtatatatatatatataaaatgaatgcagattgcgaaggtccctgcaaatggatggcttgtgaatttgctctcaaggtgcttatggaaagggatcctgattgattgaaattcatgttttctcaagctccagattggctagatttcagatcgccaacacattcgccactgggcaactaccctacaagtttgtactttcattttaattattttctaacagaaccgctcccgtctccaagccttcatgcacatatgtacctaatgagtttttatagcaaagaatataaatttgctgttgatttttgtatgaattttttcacaaaaagatcctgaataagcattgttttatgaattttacatttttcctcaccatttagcaattttctgaatggtaataatgtctaaatctttttcctttctgaattcttgcttgtacatttttttttacctttcaaaggtttttaattatttttgtttttatttttgtacgatgagttttctgcagcgtacagaattgttgctgtcagattctattttcagaaagtgagaggagggaccgtaggtcttttcggagtgacaccaacgattgtgtctttcctggtctgtcctaggagctgtataaagaagcccaggggctctttttaactttcaacactagtagtattacgaggggtggtgtgtttttcccctccgtggcaagggcagggagggttgcttaggatgcccggccaccctgggaggcttgccagatgccgggggcagtcagcattaatgaaactcatgtttaaacttctctgaccacatcgtcaggatagaattctaacttgagttttccaaagaccttttgagcatgtcagcaatgcatggggcacacgtggggctctttacccacttgggtttttccactgcagccacgtggccagccctggattttggagcctgtggctgcaaggaacccagggacccttgttgcctggtgaacctgcagggagggtatgattgcctgaccaggacagccagtctttactctttttctcttcaacagtaactgacagtcacgttttactggtaacttattttccagcacatgaagccaccagtttcattccaaagtgtatattgggttcagacttgggggcagaagttcagacacaccgtgctcaggagggacccagagccgagtttcggagtttggtaaagtttacagggtagcttctgaaattaactcaaacttttgaccaaatgagtgcagattcttggattcacttggtcactgggctgctgatggtcagctctgagacagtggtttgagagcaggcagaacggtcttgggacttgtttgactttcccctccctggtggccactctttgctctgaagcccagattggcaagaggagctggtccattccccattcatggcacagagcagtggcagggcccagctagcaggctcttctggcctccttggcctcattctctgcatagccctctggggatcctgccacctgccctcttaccccgccgtggcttatggggaggaatgcatcatctcactttttttttttaagcagatgatgggataacatggactgctcagtggccaggttatcagtggggggacttaattctaatctcattcaaatggagacgccctctgcaaaggcctggcagggggaggcacgtttcatctgtcagctcactccagcttcacaaatgtgctgagagcattactgtgtagccttttctttgaagacacactcggctcttctccacagcaagcgtccagggcagatggcagaggatctgcctcggcgtctgcaggcgggaccacgtcagggagggttccttcatgtgttctccctgtgggtccttggacctttagcctttttcttcctttgcaaaggccttgggggcactggctgggagtcagcaagcgagcactttatatccctttgagggaaaccctgatgacgccactgggcctcttggcgtctgccctgccctcgcggcttcccgccgtgccgcagcgtgcccacgtgcccacgccccaccagcaggcggctgtcccggaggccgtggcccgctgggactggccgcccctccccagcgtcccagggctctggttctggagggccactttgtcaaggtgtttcagtttttctttacttcttttgaaaatctgtttgcaaggggaaggaccatttcgtaatggtctgacacaaaagcaagtttgatttttgcagcactagcaatggactttgttgtttttctttttgatcagaacattccttctttactggtcacagccacgtgctcattccattcttctttttgtagactttgggcccacgtgttttatgggcattgatacatatataaatatatagatataaatatatatgaatatatttttttaagtttcctacacctggaggttgcatggactgtacgaccggcatgactttatattgtatacagattttgcacgccaaactcggcagctttggggaagaagaaaaatgcctttctgttcccctctcatgacatttgcagatacaaaagatggaaatttttctgtaaaacaaaaccttgaaggagaggagggcggggaagtttgcgtcttattgaacttattcttaagaaattgtactttttattgtaagaaaaataaaaaggactacttaaacatttgtcatattaagaaaaaaagtttatctagcacttgtgacataccaataatagagtttattgtatttatgtggaaacagtgttttagggaaactactcagaattcacagtgaactgcctgtctctctcgagttgatttggaggaattttgttttgttttgttttgtttgtttccttttatctccttccacgggccaggcgagcgccgcccgccctcactggccttgtgacggtttattctgattgagaactgggcggactcgaaagagtccccttttccgcacagctgtgttgactttttaattacttttaggtgatgtatggctaagatttcactttaagcagtcgtgaactgtgcgagcactgtggtttacaattatactttgcatcgaaaggaaaccatttcttcattgtaacgaagctgagcgtgttcttagctcggcctcactttgtctctggcattgattaaaagtctgctattgaaagaaaaagaaagcgaacagtttttgtttgttttttttgccgtgtgtgctccatagtggaggcgctattttccaattgatgagaatgacaaacatatataatctatctatctatctatctatctatctatctatacagggggcttgaaccttactcacccaagagcttcttacggaatgtggtagaaaaccaagttgtaacgacactgtaacctacctgatgcctgttcgcgcccgccgtgagctgcgcactggccgtggccaccattcacctctgtaatttaatccgtttctcttggattgtctggacgtgcccgatggttctttcttttgctcagtggagttggaggttttgtgtttggttttctcattcttgtcttgttttgtgtgggtggattttcaccgaccaatgatatcctcttctgacggtcaccttctttccacttcactggagtccagtattctgtaccacatcacgcaacgtgttatcttgtggtgtaaataaagactgcgttacttgccctcccaaaaa

SEQ ID NO: 1121 - DNA, 2937 bp, Homo sapiens
gggttgcgccagggagccggaaagccgactcccgaagttggggtcctgggaaaacttgggtcctgggttgactgagaagcggcggggaaaggaggcgggccaggaggagggggcctggcggacgccggccggggggcggggcgcggcggggctgtcggtcacgcccctcagtccgccccgccccgccccgcctgccggggaagggccacgttgcccgcccggccgtccggccccggcgcgccgcagaaagggctggcgagtcgaaaggcgaggcggccgcggcagcgcttgggacgcgcctgggcaccgggctcgctccctgcgccccggagcaggccaagttcggggccaggacgtcgggaggacctggtgcatggctgcctcctaatcccatagtccagaggaggcatccctaggactgcgggcaagggagccgggcaagcccagggcagccttgaaccgtcccctggcctgccctccccggtgggggccaggatgctgaagaagcagtctgcagggcttgtgctgtggggcgctatcctctttgtggcctggaatgccctgctgctcctcttcttctggacgcgcccagcacctggcaggccaccctcagtcagcgctctcgatggcgaccccgccagcctcacccgggaagtgattcgcctggcccaagacgccgaggtggagctggagcggcagcgtgggctgctgcagcagatcggggatgccctgtcgagccagcgggggagggtgcccaccgcggcccctcccgcccagccgcgtgtgcctgtgacccccgcgccggcggtgattcccatcctggtcatcgcctgtgaccgcagcactgttcggcgctgcctggacaagctgctgcattatcggccctcggctgagctcttccccatcatcgttagccaggactgcgggcacgaggagacggcccaggccatcgcctcctacggcagcgcggtcacgcacatccggcagcccgacctgagcagcattgcggtgccgccggaccaccgcaagttccagggctactacaagatcgcgcgccactaccgctgggcgctgggccaggtcttccggcagtttcgcttccccgcggccgtggtggtggaggatgacctggaggtggccccggacttcttcgagtactttcgggccacctatccgctgctgaaggccgacccctccctgtggtgcgtctcggcctggaatgacaacggcaaggagcagatggtggacgccagcaggcctgagctgctctaccgcaccgactttttccctggcctgggctggctgctgttggccgagctctgggctgagctggagcccaagtggccaaaggccttctgggacgactggatgcggcggccggagcagcggcaggggcgggcctgcatacgccctgagatctcaagaacgatgacctttggccgcaagggtgtgagccacgggcagttctttgaccagcacctcaagtttatcaagctgaaccagcagtttgtgcacttcacccagctggacctgtcttacctgcagcgggaggcctatgaccgagatttcctcgcccgcgtctacggtgctccccagctgcaggtggagaaagtgaggaccaatgaccggaaggagctgggggaggtgcgggtgcagtatacgggcagggacagcttcaaggctttcgccaaggctctgggtgtcatggatgaccttaagtcgggggttccgagagctggctaccggggtattgtcaccttccagttccggggccgccgtgtccacctggcgcccccactgacgtgggagggctatgatcctagctggaattagcacctgcctgtccttcctgggcccctccttgccacatcatgagctgaggtgggaccacagtccccaggctgcatcggcctgcctgtgtttccctcttaggtgcatttatctttttgatttttccgagtggcatttaagtgcacaaatgataacaagaggattattctcccgttctcaagggagtcagatcaggggaactattctagggtatgttgcggggtattaagcaggaaaccactgtgtggtggggggcactgggcttgttggggccagaaatgtccacgtcctgagctttctcctggagcatgtgcagagagtttggcaacgttcgctctcttgaccagaccccttctccctgacctggctcttccagccagggcacgagccctccttctatacctgctccccttcccccagtggggactgagttatgggagaaggggacatatttgtggccaaaatgatactaaccaaaggggcttccttgtcagggcctggtggagttggtgggtcatcggggctcactgcctcctgcccttctctcctgtctgacccccacttagcccttctctccttgcagcctagcagtttatagttctgagatggaaagttgaagggggcaagcaagacctctcctcagcccatgcccagctgtcaggagagaggtgcagggaggaaggccttgtgctgggacaacctctctcttgccttacctcagagagggactatgccctgacccctcctttctgaaaatcagtgccctccctgttgctctaggaggctcctgctggcttggtagaagacagaattcgatctgcctgtccctttttcccctggggtttgacacacaggctcctctcagcatgaggtggagcagtgaccaggtggagcagtgaccaggacgcctctggcccagtgctgcccagcctccccgcccgctcccaggcgccccatgtcctcacaggccaggacgccatggcaggatggagaggacttggtggatttttgtttcttgcctgacctcagtttcatgaaagaaagtggaagctacagaattattttctaaaataaaggctgaattgtctgaaaaataaaaaaaaaaaa

SEQ ID NO: 1122 - DNA, 1058 bp, Homo sapiens
ccaggcaggcccagaagctgggcagcctctgccgggttccgggaaaaggagctcctgctgccactgctcttccggagcctgcagcatggggcccctgccgcgcaccgtggagctcttctatgacgtgctgtccccctactcctggctgggcttcgagatcctgtgccggtatcagaatatctggaacatcaacctgcagttgcggcccagcctcataacagggatcatgaaagacagtggaaacaagcctccaggtctgcttccccgcaaaggactatacatggcaaatgacttaaagctcctgagacaccatctccagattcccatccacttccccaaggatttcttgtctgtgatgcttgaaaaaggaagtttgtctgccatgcgtttcctcaccgccgtgaacttggagcatccagagatgctggagaaagcgtcccgggagctgtggatgcgcgtctggtcaaggaatgaagacatcaccgagccgcagagcatcctggcggctgcagagaaggctggtatgtctgcagaacaagcccagggacttctggaaaagatcgcaacgccaaaggtgaagaaccagctcaaggagaccactgaggcagcctgcagatacggagcctttgggctgcccatcaccgtggcccatgtggatggccaaacccacatgttatttggctctgaccggatggagctgctggcgcacctgctgggagagaagtggatgggccctatacctccagccgtgaatgccagactttaagattgcccggaggaagcaaactcttcgtataaaaaaagcaggccatctgcttaacccttggctccaccataaggcactgggactcggatttctctatctgatagaggtattttctgtggccctgggagctgtctgtctttcccctacccccaaggatgccaggaagacgtccaccattagccatgtggcaacctttacttctatgcctcacaagtgcctttcagagagccccaattctgctttcccacaaaataaacctaatgccatcaggcaaaacatttctgtgtctgta

SEQ ID NO: 1123 - DNA, 5913 bp, Homo sapiens
gtggacgcagcgggctttggaaaggccccaagttaatgaggcgtgcgccggctgccgagcgcctcttggagctgggctttcccccgcggtgcgggcgccaggagccgccttttccgctgggtgtcactcgggggtggggaagatggcccattcaaaagcgccgcgagggggcccggccagtgcccttcagtgagcgctcgcaagaggacggcagaggcccggcagctcggagctccgggaccttgtggcgcatcaggacgcggctgtccctctgccgggacccagagccgccgccgccgctctgcctcctgcgtgttagcctcctctgcgcgctccgggcaggcggccgtgggagccgctggggcgaggacggcgcgaggctgctgctgctgcccccggcccgcgcggctggaaacggagaggccgagccaagcggcggcccctcttatgctgggaggatgctggagagtagcggctgcaaagcgctgaaggagggcgtgctggagaagcgcagcgacgggttgttgcagctctggaagaaaaagtgttgcatcctcaccgaggaagggctgctgcttatcccgcccaagcagctgcaacaccagcagcagcagcagcaacagcagcagcagcagcagcaacaacagcccgggcaggggccggccgagccgtcccaacccagtggccccgctgtcgccagcctcgagccgccggtcaagctcaaggaactgcacttctccaacatgaagaccgtggactgtgtggagcgcaagggcaagtacatgtacttcactgtggtgatggcagagggcaaggagatcgactttcggtgcccgcaagaccagggctggaacgccgagatcacgctgcagatggtgcagtacaagaatcgtcaggccatcctggcggtcaaatccacgcggcagaagcagcagcacctggtccagcagcagcccccctcgcagccgcagccgcagccgcagctccagccccaaccccagcctcagcctcagccgcaaccccagccccaatcacaaccccagcctcagccccaacccaagcctcagccccagcagctccacccgtatccgcatccacatccacatccacactctcatcctcactcgcacccacaccctcacccgcacccgcatccgcaccaaataccgcacccacacccacagccgcactcgcagccgcacgggcaccggcttctccgcagcacctccaactctgcctgaaaggggcagctcccgggcaagacaaggttttgaggacttgaggaagtgggacgagcacatttctattgtcttcacttggatcaaaagcaaaacagtctctccgccccgcaccagatcaagtagtttggacatcaccctactgaaaacttgcgattcttcttagttttctgcatacttttcatcacgatgcaggaaacgatttcgagtcaagaagacttttatttatgaacctttgaaaggatcgtcttgtatggtgaattttctaggagcgatgatgtactgtaattttattttaatgtattttgatttatgattatttattagtttttttttaaatgcttgttctaagacatttctgaatgtagaccattttccaaaaaggaaactttattttcaaaaacctaatccgtagtaattcctaatcttggagaataaaaaagggcggtggaggggaaaacattaagaatttattcattatttctcgagtactttcagaaagtctgacactttcattgttgtgccagctggttgaaattaaaactctgatattactttttttgaggatttttatttttgtttttgcttaaacatatagtttgtctagaagtttaaaaagctaaaagttaaaaatggtgtaattatgaaaatctaacactcaagatagtttctaaaaggaaatcagtagttaaggatacctgatttcaaaatatttaaagcataacctaactgatggtaggatgattgtatcttgaatatgtggtagggccacatctattgtaggaaaaccttgcttttatcatctgtgtgtaaagggcttaataaggagaagaggccttttgactgatttgtgagtataaatgcatttgctgtttcatttcaaaaatgttgtggaggaaaagagtacatttaacttgtataagagaatatttgtactcctgtccaggctgcaggacctttcttcgagagctttgcacacttgacttgaaccacattttctgatccctttactttgttttagaagcacactgaaaaatctcgttgtttaaagtacaatttgtaaatatttcaaaggtctaggagtcataacttttgttttcatactgaaaatgatgttgatcagagaaaccaactgttttgcttttcattgctctgtgagaaatttgaggattctgttttgctgttaggtaagctaaactcagaaattgaaaaggaaaagactggataaacacaggattttcagtaagaaaacaaccccagtcttgtcttagaagccacttgttgaggagtctgttgggggaaaaaagaggatatgcttttaaaggtagaacaaaccttcttctgtgttaaatcaaaaggatgttcaaaatccaccaggacagatgctacttgggtttaaatggagccatagatgatacaaagtcctcttggggctgaaaatcacttcctatttgcatggctttactaactggtttctgttttccattatctttttcacagaaagtcttggtcagtatttttccagcatttaaattgaaacggtcagtattagaccactgctaggttatgtagtcaagaaataaaaatagaattacatgctacagatgtctttattctccttccatctagaaaggagttccaaggtcaaattactttttagtgcaatagttaaatgacattttgagatcataactcatatccaaaaagttgcagggaaaattaaaatagctttcccctattaagctaatggcaaacaaaacttaagtggacccccacttccagtggttgtttaggttgcagttgtgaaaatatgctgccaacatttaaaaacttgtttcatatgtatatatgtatacacatatatgaatatgtatgtatatatacatatatgagaacatgtgtgtacacatatatgaatatgtatatatgtgtatgtatgtatatatgtatatgaaatgagagccacatctaaagatttcttaaatcaagtttggttcagcttccttagaactgtggctgtactttttgaggagtacctcatagtactatatttttaatgcatgcaaatcataatagctccaaatgaaccacagttttttcccaatggaggatttttttttaattcttgtactaaaaaaaaaaaatccataccaaatatttttacaaattaagattgatgtaggttttaaaaaaggcatttgtatgttgttagcttacatatggggctaggtaatttcattgcttaaaaagatgcgcctaggctccctcttggtggctggatttctttttcttcgcccgtggtggccatggttcttaatagggccaccggaatcatggtttctttttttttttttttttttgagatggagtctcgccctgtgacccaggctggagtgcagtggcacgatctcggctcactgcaacctctgcctcctgggttcacgccattctcctgtctcagcctcctgagtagctgggactacaggtgaatgccaccacgcccggctgatttttgtatttttagtagagatggggtttcaccatagtggtcaggctgttctcgaactcctgacctcaggtgatccacctgccttggcctcccaaagtgctaggattacaggtgtgagccaccacacccggccccagaataatggtttcttgactttctgtagcccttgttccttagtctgctgtgatatttatgttgacctttatcattttctattctgaacccctcttagcatttaatgtgaaatctaagaaattagaagtagaatggcttttattgttttgacacctttgaaattattattaataatttttccagagcaaaaaagcaaacacgctcaataagactaaacaaaacaaaatataaatgtacatcatttaatgtcccagtggctctattctacctgtaagaaaatgatacaaaaccacctaagatattttgaagcctgacaaatcagcttcatggaaaaaggtaaaaaatgcatttttcaaccgaaagggcagatccaatagaagacccgctccttaaataaacataaaatgtaaaaagttggaaaattaagagtaatgttccatctggaaactgaacttttgtccttgaacttgtgttggcaccaagcctcatacacagtgagctcaataactgttgggacaaaggaaggaaggacaaaatgtgtaacttcccagcatctgggagatgctgtctcttgcctcactgagtgttccttttctttgctctcatgtcattccctgagaacaatgaattctgggacaggctaaacatcatgatgaagtttcttaaacagactttcttagtggaaatccatttagatctgggtgtgctctatggggagtgctgacgtcaaagagcaaatgtctataaggggcccttttaaaatgaacattttcctcattgagcaagctgggattctctaatgtagaaatcaagccatctttataatttcacttcagatgtttatgtttttgttttttttgtctccaatgatggtaaaaataaaaactacgcattacttaaaggagtttccctcacatgtaaacactgttaggaagtctggattaagttgaaagtcctgttttaactttttttctctcatataccaaacactctgtatttctcttaaagaagccctttaagagaaagccctaattttatatctgacagtaaagtttgctgcaagtgtatgagttcaaacacatcccttgttttctgtccctaggggaaaagtcatgtagttttagcttggctccagtgttaatattatattcagtagcagccttagaagagtggtctaagacttgaacctggagcaattttatagcacagaatcctacgaagataggactgtgaacatttgttttctttttcgtgtgtgtcaaactaactggtttttgctttaccaataaaatgtcctcggcagagtaaattttaaacgtgaaaattatagatcttgatattgaatccatcagtgattcaagagatacacctatttgcctaaaacaacctaagatgtattggttatggaatcatgtgttggataggttcttaagacctgtttcctcaaatcttgacacagttttcaagggtggcttattgacttgcacggttgggcagataatccagatttacctaagattgggtaaaaaagtcatctgtgactttgctggcagggcatttgctaagtggagtacaggatctaaaagggttttcttagaaagggcaatattgtccaatgaagtaagcagaaggactctgggttagaagcatctgcacaaaaactggtgagacctactctccactgctctgcagctggatggctgatggcaggctgagcagtggggaagcaggttttaacaacagggagtccttccaggtcactgtatattgagaagaaacataaaactattgtctgttacattccgaggtcagccttcttcttaacgttttataatatgcaaatgccagcttctggaaagcaagtatcatcatgtaccaaatgctttatacaccatcacattcatgaattttttagcatggtcagaacttgtgtaaatatgtctcttagatgattttggggagatgtgatttatttttcatattttcaaaatgcatttcatttcaaataaagttatctattgagacaaccga

SEQ ID NO: 1124 - DNA, 1825 bp, Homo sapiens
gccgtcagggccccagggagcgcggggcgccgctgctgctgttcttcggctcggttctgtctaccgggcagcgccggggccggcggctgcggcggcagaggaacaggagccgggagccgcgttccgccgagagttgggcagaggagcgcccgcgccccggcggcgtcatgggccccctccccgcgcttcagagggcaccagccgcgggaacccccgggcctcctcgcgcccgagcctgagcgaccctcgggttctccggcgccccctccctcgccctattttttttcctactctcgctgccgttaccgcttctgctctccgttatggcaacagagccaccatcccccctccgggtcgaggcgccgggccccccagaaatgcggacctcaccggcgatcgagtccacccctgagggcaccccgcagccggcgggcggcagactccgcttcctcaacggctgcgtgcccctctcgcatcaggtggccgggcacatgtacgggaaggacaaagtgggtatactgcaacatccagatggcacagttttgaaacagttacaaccacctccaaggggcccaagagagctggaattctataatatggtttatgctgctgactgttttgatggtgttcttctagagctacgaaaatatttgccaaaatattatggcatctggtcacctcccactgcaccaaacgatttatacctaaaactggaagatgtgacccataaatttaataagccctgtataatggatgtaaagatagggcaaaaaagctatgatccttttgcctcatctgagaagattcagcaacaggtcagcaagtacccattaatggaagagattgggttcttggtgcttggcatgagggtttatcatgttcattccgatagctatgagacagaaaaccagcattacggaagaagcttaacaaaagaaactataaaggatggagtctccagattttttcataatgggtactgcttaagaaaagatgctgttgctgccagtattcagaagattgagaaaattctgcagtggtttgaaaaccagaagcagcttaatttttacgcaagttcattactctttgtttatgaaggttcatctcagccaaccactacaaaattgaatgacagaactttggcagaaaagtttttgtccaaaggacaactgtcagacacagaagtactagagtacaataataactttcatgtgttaagttccacagctaatggaaaaatagagtcttcagtgggcaaaagcttgtccaagatgtatgcgcgtcacaggaaaatatatacaaaaaagcatcacagtcagacttcattgaaagttgaaaatctggagcaagacaatgggtggaaaagcatgtcacaggaacatttaaatggaaatgtactttcccaactggaaaaagttttctaccatcttcccactggttgccaagagattgctgaagtagaagtgcgaatgatagattttgctcatgtgttccctagcaacacaatagatgagggatatgtttatgggctaaagcatttaatttctgtacttcgaagtattttagacaattgaatcctctgttgcagtctttttaaggggtgggccaatcataatgaagaggggcagtcaatatctgcacctttaatgctatgtaaaaaatttgtattatgagtcgacattttatttgtctttatacttttggaagaatggttaacttttttataatcttactcaggaaaactaactatttgttcattagaaaactatgaagaataaagaaacttaggaatggtaaaaaaaaaaaaaaaaaaaaaaaaaaaaaa

SEQ ID NO: 1125 - DNA, 880 bp, Homo sapiens
gccttggctccttgaacttttggccgccatgtgcttcccgaaggtcctctctgatgacatgaagaagctgaaggcccgaatgcaccaggccatagaaagattttatgataaaatgcaaaatgcagaatcaggacgtggacaggacgacttcaaagagggctacctggagacagtggcggcttattatgaggagcagcacccagagctcactcctctacttgaaaaagaaagagatggattacggtgccgaggcaacagatcccctgtcccggatgttgaggatcccgcaaccgaggagcctggggagagcttttgtgacaaggtcatgagatggttccaggccatgctgcagcggctgcagacctggtggcacggggttctggcctgggtgaaggagaaggtggtggccctggtccatgcagtgcaggccctctggaaacagttccagagtttctgctgctctctgtcagagctcttcatgtcctctttccagtcctacggagccccacggggggacaaggaggagctgacaccccagaagtgctctgaaccccaatcctcaaaatgaagatactgacaccacctttgccctccccgtcaccgcgcacccaccctgacccctccctcagctgtcctgtgccccgccctctcccgcacactcagtccccctgcctggcgttcctgccgcagctctgacctggtgctgtcgccctggcatcttaataaaacctgcttatacttccctggcaggggagataccatgatcgcggaggtgggtttcccagggcaaggctgatctgttgccgtattagtccgttttcacacagctataaagaatgcctgagactgggtgatgtataaagaaaagaagtttaactga

SEQ ID NO: 1126 - DNA, 5415 bp, Homo sapiens; identical to SEQ ID NO: 246

SEQ ID NO: 1127 - DNA, 1728 bp, Homo sapiens
gccgggccgagccgagcgccgagcagggagcgggcggccgcgctccgggccggggtcccgggggagcagatcctcagaatggcccttggtgctgcaggcgcggtgggctccgggcccaggcaccgagggggcactggatgactctccaggtgcaggaccctgccatctatgactccaggtcttcagcacccacccaccgtggtacagcgccccgggatgccgtctggagcccggatgccccaccagggggcgcccatgggccccccgggctccccgtacatgggcagccccgccgtgcgacccggcctggcccccgcgggcatggagcccgcccgcaagcgagcagcgcccccgcccgggcagagccaggcacagagccagggccagccggtgcccaccgcccccgcgcggagccgcagtgccaagaggaggaagatggctgacaaaatcctccctcaaaggattcgggagctggtccccgagtcccaggcttacatggacctcttggcatttgagaggaaactggatcaaaccatcatgcggaagcgggtggacatccaggaggctctgaagaggcccatgaagcaaaagcggaagctgcgactctatatctccaacacttttaaccctgcgaagcctgatgctgaggattccgacggcagcattgcctcctgggagctacgggtggaggggaagctcctggatgatcccagcaaacagaagcggaagttctcttctttcttcaagagtttggtcatcgagctggacaaagatctttatggccctgacaaccacctcgttgagtggcatcggacacccacgacccaggagacggacggcttccaggtgaaacggcctggggacctgagtgtgcgctgcacgctgctcctcatgctggactaccagcctccccagttcaaactggatccccgcctagcccggctgctggggctgcacacacagagccgctcagccattgtccaggccctgtggcagtatgtgaagaccaacaggctgcaggactcccatgacaaggaatacatcaatggggacaagtatttccagcagatttttgattgtccccggctgaagttttctgagattccccagcgcctcacagccctgctattgccccctgacccaattgtcatcaaccatgtcatcagcgtggacccttcagaccagaagaagacggcgtgctatgacattgacgtggaggtggaggagccattaaaggggcagatgagcagcttcctcctatccacggccaaccagcaggagatcagtgctctggacagtaagatccatgagacgattgagtccataaaccagctcaagatccagagggacttcatgctaagcttctccagagaccccaaaggctatgtccaagacctgctccgctcccagagccgggacctcaaggtgatgacagatgtagccggcaaccctgaagaggagcgccgggctgagttctaccaccagccctggtcccaggaggccgtcagtcgctacttctactgcaagatccagcagcgcaggcaggagctggagcagtcgctggttgtgcgcaacacctaggagcccaaaaataagcagcacgacggaactttcagccgtgtcccgggccccagcattttgccccgggctccagcatcactcctctgccaccttggggtgtggggctggattaaaagtcattcatctgacaaaaaaaaaaaaaaaaaa

SEQ ID NO: 1128 - DNA, 2775 bp, Homo sapiens
ggaaggggcgtggcctcggtccggggtggcggccgttgccgccaccagggcctcttcctgcgggcggtgctgccgaggccggcctgcgcggggcagtcatggtacccccttgagcgggctgtggcggagagcggggcggggactggctggagggtggcggcccggcggggcgggggcggggccggcctctggctccttcttcctctgcatgtggctggcggccgcagagcagttcagttcgctcactcctcgccggccgcctctccttcgggctctcctcgcgtcactggagccatggcgttcgccgagacctacccggcggcatcctccctgcccaacggcgattgcggccgccccagggcgcggcccggaggaaaccgggtgacggtggtgctcggtgcgcagtggggcgacgaaggcaaagggaaggtggtggacctgctggcgcaggacgccgacatcgtgtgccgctgccagggaggaaataatgctggccatacagttgttgtggattctgtggaatatgattttcatctcttacccagtggaataattaatccaaatgtcactgcattcattggaaatggtgtggtaattcatctacctggattgtttgaagaagcagagaaaaatgttcaaaaaggaaaaggactagaaggctgggaaaaaaggcttattatatctgacagagctcatattgtatttgattttcatcaagcagctgatggtatccaggaacaacagagacaagaacaagcaggaaaaaatttgggtacaacaaaaaagggcattggcccagtttattcgtccaaagctgctcggagtggactcaggatgtgcgaccttgtttctgactttgatggcttctctgagaggtttaaagttctagctaaccaatacaaatctatataccccactttggaaatagacattgaaggtgaattacaaaaactcaagggttatatggaaaagattaaaccaatggtgagagatggagtttattttctatatgaggccctacatggaccaccaaagaaaatcttggtagaaggtgcaaatgcagcactattagatattgattttgggacttacccttttgtaacctcttcaaattgtactgttggaggtgtttgtactggtttgggtatgccacctcaaaatgttggagaagtgtatggagttgtgaaagcttatacaactagagttggtattggtgcctttcctacagagcaagacaatgaaattggagaattattacaaacaaggggtagagagtttggtgtaactactggaaggaaaagaagatgtggctggttggacctcgttttgctcaaatatgctcatatgatcaatggatttactgcgttggcacttaccaagttggatattttggacatgtttacggaaatcaaagttggagttgcttacaagttagatggtgaaatcatacctcatatcccagcaaaccaagaagtcttaaataaagttgaagttcaatataagactctcccaggatggaacacagacatatcaaatgcaagggcgtttaaagaactacctgttaatgcacaaaactatgttcgatttattgaagatgagcttcaaattccagttaagtggattggtgttggtaaatccagagaatctatgattcaactcttttaatgattgccagtaatgcaagaaacactccttgagagggaggggaaaagactttcttaaatatttcatttatgacctgcaaattcaagaataaagacactgaagtaagtttgaagccctacagttgtttccagtcttttcagatggatgcctactgtggagattaactttggcatattccagtgtcagctttctttagctggaattgccaaatcatttgttgctcctgctgctctcatggtgccacgttttttttttcaatgtttagtaatagtataatccatgttgtttgatatcaaaagtagaattacttttaatgtagtttttcttcattattgtcattgcgtgttcttaagttttacccctattagatggtaagaacaattaatgcagttttgcacaaatatttttacattctgatcattcagttctgtcattgtaatctttgttgttagaaacaaatgatgaaaacataggggttctgtaaacttttgtaatgctatgaattctgtttaaattttgggctgtctattttctgctgaaaccatgcaaaattgagctttggtggggctgggagggggttatgtattcatgggacctttaatttgtacagaacacagaacttatttctgtcagttatttaatacattgaaaatttagtgaaatgttcaaagagaatagatgtttcccaaaacaacaatctttatgttaaaaatagtcattaaaagatctgttgtaatatatggtggatatttttctttaatttcaaacattacctctgaaatgtgtatcttttcttttttatcttaccattaattttaaatctagtggattggttttcaacatcgtgcctgccgatatgcctacagaatcatctgtaagtgtcaaaatgaacccacgttgttagccataattttgattatgcctttatttctcctttcttgaaaaaaaaaaggtgttattttgacaattaggcataacattgttttgtagattatcttttaatgaactattttaaatgttaaattaggtgccacttaaatttattttattacaccatgaatagctgattaaaagaaccaaatatttctagtaaaaaaaaaaaaaaaaaaa

SEQ ID NO: 1129 - DNA, 7507 bp, Homo sapiens
tgctcacctctgacagccagacaagggctgtgctcaggggcagctcggctgggcacacagtaggtgctttagcggacagcactgaggcccccagcaagaagcccatgagctcctccccctcccgcagtgccgccgacatctacatccgggagtatttccacagccacgtcagcggcggccaccccgaggccactcctctccgtgtgatgtacacggaccggccgctgagccagacggacccagtcacgctgcagtactgttgcctgaccgacgaccgccaggctttccgcccgcccacacgggcagagctggcgcggcaccgcgtggtggtcaccaccacctcccaggcccgtgagctcagggtgccggtcggcttcttctcccacattctcatcgatgaggcggcccagatgctggagtgcgaggccctcaccccgctggcctatgcctcgcacggcacccgcctcgtgctggcgggcgaccacatgcaggtcacaccccggctgttcagtgtggccagggcccgggcggccgagcacacgctgctgcaccgcctcttcctgtgctaccagcaggagactcacgaggtggcgcggcagagccgcctggtcttccacgagaactaccgctgcacggacgccattgtcagcttcatctcgcggcacttctacgtggccaagggcaaccccatccacgccaggggcaaggttccgccccacccccggcactacccgctcatgttctgccacgtggcgggcagcccagaccgggacatgtccatggcgtcctggctgaatctggctgagattgcgcaggtcgtcgagaaggtgcaggaggcctacaacacctggcccagctgctggggcggccgcgagcagaggtgcatctgtgtcgtttcccacggtgcccaggtcagtgcactgaggcaggagctgaggaggcgggacctaggccaggtgtctgtcggcagttttgagatcctgccagggcggcagttccgggtcgtggtgctcagcactgtgcacacctgccagagcctgctcagccctggggcactggcccctgagttcttcaccgacgcccgcgtgctcaacaccgtcctgacccgcgcccagtcccagctggtggtagtgggggacgccgtggccctctgctccttcggggcctgcggcaagctctgggagagcttcatccgtgagtgcgtggagcggcacagtgtctgccccgagggcctgtccatggagcaggtcgagcagggtgtggcgcagagacggcgctggcctccccgaggcacacaggctggggcagcggggaactgggaggctgccccagagccagtaggggacctggccgaggagcaggcggctgtggtgacggccatggtgaaggcagagccgggagatgaggctctgagcccagcatcccgtgacatcacggcaaccacagcgcagacggaggctgcggcagcaccagcaggagacgcagtgaaggaagacgtggtgcccggggcctgtgcggcaggagcggctgctgcagcgggcgtggagtccacggaggctgaggatgcagaggctgacttctggccgtgggacggggagctcaacgctgacgacgccatcctacgggagcttctggacgagagccagaaggtgatggtgaccgtcggggaggacgggctgctggacactgtcgccaggcccgagtccctgcagcaggcccggctgtacgagaacctgcccccggctgcgctacggaagctgctgcacgcggagcccgagcggtaccgccactgctctttcgtgccagagaccttcgagcgggcgtcagccatcccgctggacgatgcctcctcgggccccatccaggtcaggggccgcctggactgtgggatggccttcgccggggatgaggtgctggtgcagctcctttcgggagacaaggcgcccgaggggcggcttcggggccgcgtgctgggcgtgctgaagaggaagaggcacgagctggcgtttgtgtgccgcatggacacgtgggacccgcgcatcatggtccccatcaatggctccgtgaccaagatcttcgtggccgagctgaaggacccatcgcaggtccccatctacagcctccggaagggccggctgcagcgtgtggggcttgagaggctcaccgccgaggcccggcacagccggctcttctgggtccaaattgtcctgtggcggcaaggcttctactacccgctgggcatcgtccgggaggtgctgcctgaggccagcacctgggagcagggcctccgcatcctcggcctggagtacagcttgagggtgcccccgtcggaccaggccaccatcaccaaggtgctgcagaaataccacacggagcttggccgggttgccggccgccgagaggactgccgcgccttcttgaccttcactgtggacccccagggcgcctgcaacctcgatgatgccctcagtgtccgagacctgggtcccaggtgcgaggtggctgtgcacatcactgatgtggccagcttcgtgcccagggacggggtgctggacgtggaggcgcgaaggcagggcgctgcgttctatgcccccggcagggagccagtgcccatgctgccggccagcctctgccaggacgtcctcagcctcctgcctggccgggaccgcctggccatctccctgttcctcaccatggagaaggccagtggccagctgaagagcctgcgctttgcaccctccgtggtccagtctgaccgccagctgtcctacgaggaggcggaggaggtgatcaggcagcacccgggtgccggccgtgagctgccggcccgcctggactccgtggacgcctgcgtcgtggccgcgtgctacttctctcggctgctgcgccggcaccgcctgcggtccgactgcttctatgagcagccggacgaggacggcaccctgggcttccgcgcggcccacatcatggtgaaggagtacatgattcagtttaataggctcgtggctgagttcctggtgggcagcgagtgcacgcggacggtcacgcctctgcggtggcagccagcaccccgcagccagcagctcaaggccctgtgtgagaagcatggggaccgggtgcccctgtcactgcacctcggccaccacctgcacggcggcgggggcagtccccccgacacgcggctgcacctcctggcctccctctggaagcaggtccagtttgctgcccgcacccaggactacgaacagatggtggacttggtcaccacggacgacatgcacccattcctggctcctgcaggccgcgacctccgcaaggccctggagcgctcggcgttcggccgctgcgcccggggccaccagcagcagggcggccactactcgctgcaggtggactggtacacgtgggccacctcgcccatccgcaggtacctggacgtggtgttgcagcggcagatcctgctggcgctgggccatgggggctctgcctactctgccagggacatcgatgggctctgccaggccttcagcctccagcacgcacttgcccagagctatcagcggcgggcgcgcagcctgcacctggccgtgcagctcaaggcccagcctctggacaagctgggcttcgtggtggacgtggaggcgggctcccgctgcttccggctgctcttccccagcaaccgggagacgctgcctgacccctgccccgtcccctacggctccctgcagctggccgagcacccccacgccctggcaggccggccgggcctgcggctcctgtggcggcgccgtgtctactcagcgcagggatccagcccgcccctgccactgcctggcactgtgccggacccacacaccctggccgtggagacggccctgtggaagcagctgctggagctggtggagctgcagcgctggccggaggcggctgctctcatccaggagaagggcgaggcgtcccagcggcgggagctggtgcaggtgcagcggagccactgtggccatttcctggaggtggcccgggagctgggcagtggggacaccctgcaggtgcagctcggcaccagcctgcagcacggcttcctggtaccgagccctcagctctggacggtggcaccgggcttcagcctctgcctggagcacgtggagcggcccggagactgcttctcaggccgtgtgtaccgggccccgagggaccggtaccgcgacgtggatgagtacgcctgcgtgtgggaaccattctgcgccctggagtcggccaccggcgcggttgccgagaatgactccgtcacacttcagcacctgagtgtctcctgggaggcgtcacggacgccgcaggggcagctgcagggcgccttccgcctggaggccgccttcctcgaggagaactgtgccgacatcaacttcagctgctgctacctctgcatccggctcgaggggctgccggctcccacggccagcccacgccctgggcccagcagcctcggccctggcctgaatgttgaccccggcacgtatacctgggtggcccacgggcagacgcaggactgggaccaggagcgccgggcagaccggcaggaggctcccagacgggtgcacctcttcgtccaccacatgggcatggagaaggttccggaagaggtgctgaggccgggcaccctgttcaccgttgagctgctgcccaagcagcttcctgatctccgcaaggaggaagccgtgcgtggactagaggaggcgtccccgctggtcaccagcatcgcactgggccggcctgtcccgcagcccctctgcagagtgatccccagcaggttcctggagcggcagacctacaacatccccggaggccgccacaagctgaaccccagccagaacgtggcggtcagggaggctctggagaagcctttcacggtcattcagggcccaccaggtacagggaagacgatcgtgggcctccacatcgtattctggtttcataaatcaaaccaggagcaggtgcagcccggaggccccccccgtggggagaagcggctggggggtccctgcatcttgtactgcggcccctccaacaagtcggtggatgtcctggcaggactgctcctgagaaggatggagctgaagcccctccgtgtgtacagtgagcaggctgaggccagcgagttcccagtgccgcgtgtgggcagcaggaagctgctcaggaagagcccccgggaggggaggccgaaccagagcctcaggagcatcaccctgcaccaccggatccggcaggcccccaacccttactcgtcggaaatcaaggcctttgacacccggctgcagagaggggagctcttctccagggaggacctggtctggtacaagaaggtcttgtgggaggctcggaagttcgagctggaccggcatgaggtcatcctctgcacctgctcctgtgcagcctctgccagcctcaaaatcctggacgtgaggcagatccttgttgacgaggcaggcatggccacggaacctgaaaccctcatccccctggtgcagttcccacaggccgagaaggtggttcttctcggagaccacaagcagctgcggcctgtggtcaagaatgagcggctgcaaaacctgggtctggaccggtctctgttcgagcggtaccacgaggacgcacatatgctggacactcagtaccgcatgcatgagggcatctgtgccttcccctctgtggcgttctacaagagcaagctgaagacgtggcagggcctgaggaggccgcccagtgtcctgggccacgctggcaaggagagctgccctgtcatctttggccacgtgcagggccacgagcggagcctgctggtgtccacggacgaagggaatgagaactccaaggccaacctggaggaggtggctgaggtggtccgtatcaccaagcagctgaccctggggaggaccgtagagccccaggacatcgccgtcctcacgccctacaacgcgcaggcctctgagatcagcaaggcccttcggcgagagggcatcgccggggtggccgtgtcctccatcaccaagagccaggggagcgagtggcgctatgtgctggtgagcaccgtccgcacctgtgccaagagcgacctggaccagcggcccaccaagagctggctcaagaagtttctgggcttcgttgtggaccccaaccaagtgaatgtggctgtcacgcgggcccaggaggggctctgcctgatcggagaccacctccttctgcgctgctgccccctctggcgtagcctcctggacttctgcgaggctcagcagaccctcgtgcctgccggccaggtgcgcgtctgcaggaggccaactatgccttcctgaagagccctctccacctgcaaggtgccaggactgggagggaaagtccagggcccccccaccctccccaccaccctccgccatcagcctgcctgggccagcctgcctcctggcctcaggatctccctggggcaggaagtgggtggacttggaggaggaacggcaagggccggtccccacactcttgctcctcctgggcatctggggacaggaacacctctcagggtggccaagaggggcttccttgggaccagtgcaaggaagttctgctgtccctgggaagtctcagaaccaggaaggaaaccctgtggaggctgccctttgacctttggacgccacctgtaatcactctggatggtgtctgtggagttcaggtttattttctatttaaatgaactaaaagccagcatcctgccgggcgtggtggctcacgcccataatccagcactttgggaagccgaggcgggcagatcacctgaggtcaggagttcgagaccatcctggccaacatggtgaaaccccgtctccactaaaaatacaaaattagctgggcgtggtggcgggcgcctgtaatcccagctacttgggaggctgaggcaggagaatcgcttgactccaggaggcgcaggctgcagtgagctctgatggtaccactgcactccagcctgggtgacagagcgagaccctgtcttaaaaaaaaaaacaaaacaaaaccagcatctgttactggaacagagacctcagcccaagctcaggacaaggaggcctccctgggagagggggcctttctcccaccatcaccgcctgtgtccttcaggggctgctggagggcagcccaaagccaggggcccaccccgccccaccccaccccaccccaccctctgaaatgtgaaaagcctgcactcttcctgtgggctgcgcagtgggctcgggggttggggggtgccggggcgatgcttccaccctggactgagtgttcggggcagcctgctcggctgtatgtttctcgcacgctcacccgcttcagtgcggctctgtccctgctgccgcctccagtcctgagggaggggcttgccccaccttctacattccaatttttatatctttgaattatgtgattagatattaatttaatgataaaaccactctgaaagctcttctca

SEQ ID NO: 1130 - DNA, 1795 bp, Homo sapiens
cgatgccggcggtcagtggtccaggtcccttattctgccttctcctcctgctcctggacccccacagccctgagacggggtgtcctcctctacgcaggtttgagtacaagctcagcttcaaaggcccaaggctggcattgcctggggctggaatacccttctggagccatcatggagacgccatcctgggcctggaggaagtgcggctgacgccatccatgaggaaccggagtggcgccgtgtggagcagggcctctgtccccttctctgcctgggaagtagaggtgcagatgagggtgacgggactggggcgccggggagcccagggcatggccgtgtggtacacccggggcaggggccatgtaggctctgtccttggggggctggcttcgtgggacggcatcgggatcttctttgactctccggcagaggatactcaggacagtcctgccatccgtgtgctggccagcgacgggcacatcccctctgagcagcctggggatggagctagccaagggctgggctcctgtcattgggacttccggaaccggccacaccccttcagagcacggatcacctactgggggcagaggctgcgcatgtccttgaacagtggcctcactcccagtgatccaggtgagttctgtgtggatgtggggcccctgcttttggtccctggaggtttctttggggtctcagcagccaccggcaccctggcagatgatcatgatgtcctgtccttcctgaccttcagcctgagtgagcccagcccagaggttccccctcagcccttcctggagatgcagcagctccgcctggcgaggcagctggaagggctgtgggcaaggctgggcttgggcaccagggaggatgtaactccaaaatcagactctgaagctcaaggagaaggggaaaggctctttgacctggaggagacgctgggcagacaccgccggatcctgcaggctctgcggggtctctccaagcagctggcccaggctgagagacaatggaagaagcagctggggcccccaggccaagccaggcctgacggaggctgggccctggatgcttcctgccagattccatccaccccagggaggggtggccacctctccatgtcactcaataaggactctgccaaggtcggtgccctgctccatggacagtggactctgctccaggccctgcaagagatgagggatgcagctgtccgcatggctgcagaagcccaggtctcctacctgcctgtgggcattgagcatcatttcttagagctggaccacatcctgggcctcctgcaggaggagcttcggggcccggcgaaggcagcagccaaggccccccgcccacctggccagcccccaagggcctcctcgtgcctgcagcctggcatcttcctgttctacctcctcattcagactgtaggcttcttcggctacgtgcacttcaggcaggagctgaacaagagccttcaggagtgtctgtccacaggcagccttcctctgggtcctgcaccacacacccccagggccctggggattctgaggaggcagcctctccctgccagcatgcctgcctgacccacctcagagcctgctttgcatcactgggaagcaggcagtgtcttgggtgggggcttggtcagtatcctctccgtctgggtgcccagctcccacgcacacctgagctttcggcatgctcccacctcgttaaaggtgatttccctctccccaaaaaaaaaaaaaaaaaaaaaaaaaaaaaaaaaaaaaaaaaaaaaaaaaaaaaaaaaaaa

SEQ ID NO: 1131 - DNA, 1956 bp, Homo sapiens
aggaagggcgggtcagcgcgccggcgcagtgcggcggtcacaggctgagtgctgcggcgcgatccttgcttccctgagcgttggcccgggaggaaagaagatggtgctggatctggatttgtttcgggtggataaaggaggggacccagccctcatccgagagacgcaggagaagcgcttcaaggacccgggactagtggaccagctggtgaaggcagacagcgagtggcgacgatgtagatttcgggcagacaacttgaacaagctgaagaacctatgcagcaagacaatcggagagaaaatgaagaaaaaagagccagtgggagatgatgagtctgtcccagagaatgtgctgagtttcgatgaccttactgcagacgctttagctaacctgaaagtctcacaaatcaaaaaagtccgactcctcattgatgaagccatcctgaagtgtgacgcggagcggataaagttggaagcagagcggtttgagaacctccgagagattgggaaccttctgcacccttctgtacccatcagtaacgatgaggatgtggacaacaaagtagagaggatttggggtgattgtacagtcaggaagaagtactctcatgtggacctggtggtgatggtagatggctttgaaggcgaaaagggggccgtggtggctgggagtcgagggtacttcttgaagggggtcctggtgttcctggaacaggctctcatccagtatgcccttcgcaccttgggaagtcggggctacattcccatttataccccctttttcatgaggaaggaggtcatgcaggaggtggcacagctcagccagtttgatgaagaactttataaggtgattggcaaaggcagtgaaaagtctgatgacaactcctatgatgagaagtacctgattgccacctcagagcagcccattgctgccctgcaccgggatgagtggctccggccggaggacctgcccatcaagtatgctggcctgtctacctgcttccgtcaggaggtgggctcccatggccgtgacacccgtggcatcttccgagtccatcagtttgagaagattgaacagtttgtgtactcatcaccccatgacaacaagtcatgggagatgtttgaagagatgattaccaccgcagaggagttctaccagtccctggggattccttaccacattgtgaatattgtctcaggttctttgaatcatgctgccagtaagaagcttgacctggaggcctggtttccgggctcaggagccttccgtgagttggtctcctgttctaattgcacggattaccaggctcgccggcttcgaatccgatatgggcaaaccaagaagatgatggacaaggtggagtttgtccatatgctcaatgctaccatgtgcgccactacccgtaccatctgcgccatcctggagaactaccagacagagaagggcatcactgtgcctgagaaattgaaggagttcatgccgccaggactgcaagaactgatcccctttgtgaagcctgcgcccattgagcaggagccatcaaagaagcagaagaagcaacatgagggcagcaaaaagaaagcagcagcaagagacgtcaccctagaaaacaggctgcagaacatggaggtcaccgatgcttgaacattcctgcctccctatttgccaggctttcatttctgtctgctgagatctcagagcctgcccaacagcagggaagccaagcacccattcatccccctgcccccatctgactgcgtagctgagaggggaacagtgccatgtaccacacagatgttcctgtctcctcgcatgggcatagggacccatcattgatgactgatgaaaccatgtaataaagcatctctggggagggcttaggactcttcctcagtcttcttccccgggcttgaaccccgcctctgaggttctccctgaaaaaaaaaaaaaaaaaa

SEQ ID NO: 1132 - DNA, 1250 bp, Homo sapiens
acgtgtgcgtaggagcgcaccggaagcgcccggctggaggcgcggcggcagggctgggcggcggcggcggcggcggtcatggaacgccaagaggagtctctgtccgcgcggccggccctggagaccgaggggctgcgcttcctgcacaccacggtgggctccctgctggccacctatggctggtacatcgtcttcagctgcatccttctctacgtggtctttcagaagctttccgcccggctaagagccttgaggcagaggcagctggaccgagctgcggctgctgtggaacctgatgttgttgttaaacgacaagaagctttagcagctgctcgactgaaaatgcaagaagaactaaatgcgcaagttgaaaagcataaggaaaaactgaaacaacttgaagaagaaaaaaggagacagaagattgaaatgtgggacagcatgcaagaaggaaaaagttacaaaggaaatgcaaagaagccccaggaggaagacagtcctgggccttccacttcatctgtcctgaaacggaaatcggacagaaagcctttgcggggaggaggttataacccgttgtctggtgaaggaggcggagcttgctcctggagacctggacgcagaggcccgtcatctggcggatgaggctaagaatcttgttagtgtcacttttgacattagcaagatgaacccttaaccctcgattcaattgccttacgcacgcttttcacagtgactagccaaggggaggtggggttgatttctgttcctaactacacctgcatatgtcagggctccagtcagcaaaaggtatagatgttgcctctaggcatgaggtcattggtcacattctacttggagacagtgattgcattcattgatttcatggttaattgctagttggtaggtaaaggcctctagatgattagcaatcttgataaaagaggcctagtaatgttcttttgaggttagaaatccttgctgctaggacagtctctgtgacaggttgcgttgaatgatgtcttccttatcaatggtgagcccaccagtgaggattactgatgtggacagttgatggggtttgtttctgtatatttatttttatgtacagaactttgtaaaaacgaaactatttaaaaaacaagaataacatttttagcatctttattcaaggagatttatggacttcaatttgtctatcaaacattaaatagctttttattacaacctctaactaaaaaaaaaaaaaaaaa

SEQ ID NO: 1133 - DNA, 1592 bp, Homo sapiens
tagacttgtcggcgctcgattgaggagcgtggctacgttgcttccggtgcctggctccgtttcctgcttttggttcttacagtagtcggcgtaggccttagattttttactgtctcctgaagaatttaacacaaacatggatatcagaccaaatcatacaatttatatcaacaatatgaatgacaaaattaaaaaggaagaattgaagagatccctatatgccctgttttctcagtttggtcatgtggtggacattgtggctttaaagaccatgaagatgagggggcaggcctttgtcatatttaaggaactgggctcatccacaaatgccttgagacagctacaaggatttccattttatggtaaaccaatgcgaatacagtatgcaaaaacagattcggatataatatcaaaaatgcgtggaacttttgctgacaaagaaaagaaaaaagaaaagaaaaaagccaaaactgtggaacagactgcaacaaccacaaacaaaaagcctggccagggaactccaaattcagctaatacccaaggaaattcaacaccaaatcctcaggtccctgattaccctccaaactatattttattccttaataacttaccagaagagactaatgagatgatgttatccatgctgtttaatcagttccctggcttcaaggaagtacgtctggtaccagggaggcatgacattgcttttgttgaatttgaaaatgatgggcaggctggagctgccagggatgctttacagggatttaagatcacaccgtcccatgctatgaagatcacctatgccaagaaataacatttgggatagtcgtctttaaaagacttggtgttatttacagtgtttgttttgataacatttggctgggtcattttaatagttagagatgaggaggagtaaaagtgaaatttttgtgaaggacttaaattatccagtgtttctttagccttggtgaactatgaaatacgaaggccttaattttgtacaataaacttttatttgtattctgtgtatataatgctttcttgattgacccatctccctatcatcaaatgacttctagtctagaacacacttaaggtttataaacttgtgtaataggatgcttttctagtgttactttggaggagctaattatacaacatcattgaaccattcaataaaagttaagtaaaattagatcacagaagctagtagatgactgttgtattaatggtaacaatgattgttctgggtattagaagaaaatgagacccaggcaggatctaaatttgatctttgtatccttttaagaaatgaatatattattttgctgctagtagggattccacaagttttcttcattcagtattaaataaaggctgttcttactgtttactgagaaaacagaaagggaatgctatcttcacactttgcatttaatgctgtttccttcatgaggcaggactgttctaaggttaatatgcaatctctttattgaaagacctccagggtaaaaattttttgatctatagtctcttttcccccttaagacaaatagactgattaataaagagttgccagtgaaaaaaaaaaa

SEQ ID NO: 1134 - DNA, 4117 bp, Homo sapiens
ccgccatcttgttgttgatccgtacccagtgggcagcgccgggagctggaccaagcggccggtgagaggccgctgtagcggtgctcagccacctgtgctgcctgccagggggcgggccgaaacctggaggcccggggggcccagctcccgtagggagccgtgggcgctcggtgcccgggccgggcaggcgtggtatctgtctgttttgagggggacagtgatggttacatcaacttagtggcctatccttatgtggaaagtgagactgtggaacaggatgacacaacagaacgggagcaacctcggcgcaaacactcccgccggagcctgcaccggtcaggcagtggcagtgaccacaaggaggagaaagccagcctgtcccttgagacctctgagagctcacaggaggcaaagagtccgaaggtggagctgcacagccactcagaggtccctttccagatgctagatggcaacagtggcttgagttctgagaagatcagccacaacccctggagcctgcgttgtcacaagcagcagctgagccgcatgcgctccgagtccaaggaccgaaagctctacaagttcctcctgcttgagaacgtggtgcaccacttcaagtacccctgcgtgttggacctgaagatgggcacgcggcagcatggcgatgacgcgtcagctgagaaggcagcccggcagatgcggaaatgcgagcagagcacatcagccacgctgggcgtcagggtctgcggcatgcaggtgtaccagctggacacagggcattacctctgcaggaacaagtactatggccgtgggctctccattgaaggcttccgcaatgccctctatcaatatctgcacaatggcctggacctgcgacgtgacctgtttgagcctatcctgagcaaactgcggggcctgaaagctgtgctggagcggcaggcctcttaccgcttctactccagttccctgcttgtcatctatgatggcaaggagtgccgggctgagtcctgcctggaccgccggtctgagatgcgtctcaagcacctggacatggtgctccctgaggtggcgtcatcctgtggccccagcaccagccccagcaacaccagccccgaggcgggtccctcctctcagcccaaggtggatgtccgcatgattgactttgcacacagcacattcaagggcttccgggatgaccccaccgtgcatgatgggccagacagaggctacgtgtttggcctggagaacctcatcagcatcatggaacagatgcgggacgagaaccagtaggccctgttctgggcccccagaaccccttcctctccactgcaggcagggaccattgttctgaacttgccgtgaggacacacagacttgcttttaaagggttatatttctctttggtgtaaactaaaagaaatgtttttagctgtagcctggaatccatatatataaagtgaaggagggcagaccacacgccctctcagccaggctcctcagctttgtggctctgactggtgtgtccaggctgccttaggaaggaagaggtgcccctggtgggcttggcagcagggacagggtgcccttggacattggtttctcttgtctagatctttgagatctgtggctgcagggccctgctgattgtaaggtaaagccctgggctggtgcagggcccctccacgcccactcttcccttgttccccagaagtagagggctctgggtgcccatttcttgggggctttccagtcttatgctgtgggtgtcagctagctctttaataggtgccctcagggcaccacagggctgactgcacaaagctggacccatccttcggtctgaccttagcatggggctagattaatgaagctgggctgaggccaacttatggcagagggcggcgcctgggttccccaggcacctgttggcacgtgacaggttggcacctgtcctattcctgaaacagcctctctcaccaagttcccttgcctaagaaggccactccctcccaccccactgaagtgggggatagtcggtgtcctagcaggcctcagggcctctggtggctctggcccagacagtatttgcagttcttgtgctatgggtgggagtcttcttcctcaagtttcggcagctgtgctgctgctggatgggctgctcctcccagggctcaagggctgtggtccgctcagggtctcatttccccaggccaagttcaaggcagcagccctttgtgaggcgctcttggccctgggcctggagggagaactttaagcttttttgctcacagggacgtggtatgggccctgggtgcaggtgcccacattctgctaatgagagctttgtctgatcagtcctgggtccatcagtttgtccatgtgtccggctgccagcccgtcccttgggatccttcccctggggtgtagccttgttcattagtatatactcattccttcatgctttcctcagcagaacacttccacttctgaggtgagcttttgccccatgcccttcctccacaggtgttgcctttttataaagacctgatagcagaataaattggtgtttccctgttgacccagcaccatttctgtgggcctagaatatggccctcaacccttagagtggggcagtgagggcttgaggagtgacccttcctttctcatggttttagtcattttggctgccagcccttaatggcacagatctgctgcttctaacagatggccaggaggtgacaccgatttcagccattgccaaggttagcaccctctcctttgagcctagggccacactgttcattgtcactttaggcaagtgcctgtttggctttaaaggtaagcctgccagctgtgagaagccttggtaactgatggactcatttcctggtccttaaagatgcagcctcttaagggctccttgatggatgccatctctcctagcccccagccctggtgccactggtgggcaggttcccattctttggggctgggagggacagcttgcctgtttctggtcacaaattacagtcttctctcctgtaccattctgtggcttcagccatgggggcagtagcccttcattagtgtagatagtcattccctggtagggtggagggtaagacatagggtctggaactgtttgggaccttttggggatgtcctgtgcctcccagattcctcgattctgggaggagaggctgccgcattctgctgctcctcacagcgagcaaagctgcacccacttacattcagtattttcctggcactacaaagagtgggaaggcctgggatttgctgctgctcccttagagcagggcccctcttttcagcactttggacacctggagacccagccctgttatttaatggtagtgggcaagtgtgtgtgcatactgtctgccactgctttctccctgccccatgccagagagccctgtccctgccaggcccagccttcttagccccaacttgggaacaaagtgcaacatgggatcatgggttggggtgctcaggtgagccctctctatagtgcttccctgggccaagctgacaccagcccctgagggtggggtgggacgggtggtgcttaaaagaggaaggggaccagtgtagcaacttgccagggaccccacccctccctctctgggcctgtgcagtgagcatggggattcccatcaaggggcctggcacctgtgctagttacgtagccgctgctcacgcgctcactcctgaccacatgcacgttccctagatgcagactgctttgaactttaaagctgtacaatttggttatgtttgtgctgacttaaaatatattttaatgaggaaaaaataatggagaaccctgggaaggacctggttcttttgcttctcggggaactgtaagccctcgcgttctgggaatcgctctctgctgctctttcctggaagctaagcctgtctccaccgcccgaggcctgcgccggtggctcccgccgcagttgcgtttgctttggaccttgcgtgcgggggagggggtgctcggtccgagcccgctcctttctgtacacctagcgctgcccgccccgcttgtgtctgaggtcgtgtatgtcaaaaataaagccgctagaaacgg

SEQ ID NO: 1135 - DNA, 633 bp, Homo sapiens
atgggtgatgttgagaaaggcaagaagatttttattatgaagcgttcccagtgccacattgttgaaaagggaggcaagcataagactgggccaaatctccatggtctcttcgggcggaagacaggtcaggcccctggacactcttacatagccaccattaagaacaaagacatcatctggggagaggatacactgatggagtatttggagaatcccaagaagtacatccctggaacaaaaatgatctttgtcggcattaagaaggaagaggctgggcacggtggctcacgcctgtaatccgagcactttgggaggctgaggcagacagatcacgaagtcaggagatcgagaccatcctggctaacacggttaaatcccgtctctactaaaaatataaaaaattagccgggcgtggtggcaggtgcctgtagtcccagctactctggaggctgaggcaggagaatggcgtgaacccgggaggtggagcttgcagtgagccgagatcgcgccactgcactccagcctgggtgacagagcgagactccatctcaaaaaaaaaaaaacaaaaaaaaaaaaaaagaggaagaaagggcagacttgatagcttatctcaaaaaagctactaatgagtaa

SEQ ID NO: 1136 - DNA, 2727 bp, Homo sapiens
acatcccagggtatcgcgagaactgcttcggcgttctggctacaggttcggggcgcgggtctcttccgcggaaactgacattgcgtttccgttgtcggcctcccactgcaggagccatatattgaagaccatgtctgggagcttctactttgtaattgttggccaccatgataatccagtttttgaaatggagtttttgccagctgggaaggcagaatccaaagacgaccatcgtcatctgaaccagttcatagctcatgctgctctcgacctcgtagatgagaacatgtggctatcgaacaacatgtacttgaaaactgtggacaagttcaacgagtggtttgtgtcggcatttgtcactgcggggcatatgaggtttattatgcttcatgacataagacaagaagatggaataaagaacttctttactgatgtttatgatttatatataaagttttcaatgaatccattttatgaacccaattctcctattcgatcaagtgcatttgacagaaaagttcagtttcttgggaagaaacaccttttaagctgaatgcagaaaattccaaaataaatgatgtcaccacaatggtgtatactcaggaatgtgtacattgtaagttacttgattaaatagcctggaaaacttttgtgtattctcagcttatctaaacctaatgaaattccttttatatttaaaaatagtacattctgtctcatgtcacgtatcaatagatcaattggtatttccttgtgaacagtgttatttataaagagttcattatcaataatcatgttttttttttttttttttttctgatacagagtctcactctgttgccaggctggagtgcagtggcgcaatcttggctcactgcaacctccgcctcccaggttcaggcgattctcctgcctcagcctccaagtagctgggactacaggcgcgtgccaccacgcccggctaatttttgtatttttagtagagacagggtttcaccatattggtcaggctggtcttgaactcctgacctcgtgatctgcccgccttggcctcccaaagtactgggattacaggcgtgagccaccgtgcccaaccatgaaatatttttacttaaaaattgggaataagctcgctttttttttttttgagatggagtcttgctcctgttgtgcaggctgtagtgcagtggcacgatcttggctcactgcaacctccacctcccgggttcaagcaattctccttcttcagcctcccgagtagctgagattataggcgtgcaccaccacacctggctaatttttgtatttttagtagagacagggtttcaccatattggtcaggctggtcttgaactcctgacctcgtgatccacccacctcaggaagtgctgggattacaggcgtgtgagccaccacgcccggccatgaaatatttttacttaaaaattgggaataagctttttggttttttgtgggtttttgtttttgttttttgttttttgtttttttgagatggagtcttgctcctgttgtgcaggctggagtgcagtggcacagtcttggctcactgcaacctccacctcctgggttcaagcaattctccttcttcagcctcccgagtagctgggattacaggcatgcaccaccacacctggctaatttttgtgtttttagtagagacggggtttcgctattttggccgggctggtttcaaactcctgacctcagttgatccacccgcctcagcctcccaaagtgctaggattacaggcatgaaccaccgtgcccggccaggaataagcttttgacttacccaattcagataggttgatctttggggttttttttttttttttgagatggagtttcgctctgttgtccaggctggagtgcaatggcagttgtttcaccgtaacctctgcctcctgacttcaagcaattctcctgcctcagcctcccaaagtgctgggattacaggtgtgagccaccgtgcccggcccagataggttgatcttaatgtaacaacccaaaaataaatgtcatagtcaagatttggtagataaatttaaaattaaaatattctgcagttgggagtgaaatgtgatagcacatacgttgacattatgcatttagagatgttataaaaatgtataggcagtatacacagcactactcaagaagccaaagaaacacttgtgcagtgctaagtgtcacatgtctgcttccaccagaggctaggaatagtgatcctgctataatgtgagaacccaaatcatgtttataaaataggacgctgggagcagttgcaggccacagtgaagtgtgttgcttctgtcactttatattcttatatttcctttccctcagacagtaaactgttgatactcgtacttgtaaaaaattgtaaggcaatttttagtattgttgtcaaagaaaagcttggattacattaacatttgtattcagtcttttaggtgatacaccagagggggctgggaattgtctctttgttcctataagtagatcttaatgtaaaatagtaaatgtccattgaaaagcaagtaatacagcctgtgctaattgggagcacttgaacaattttgttccattctgagtaacttttgagcaagtaattctaagctttgtcttgtatccttgtgtgaaattgcataatttttaccctatttgatttcttaaataaagatgtttgctcaagataaaaaaaaa

SEQ ID NO: 1137 - DNA, 3790 bp, Homo sapiens
gccgagctgcgcacgtgcggccggaagggaagtaacgtcagcctgagaactgagtagctgtactgtgtggcgccttattctaggcacttgttgggcagaatgtcacacctgccgatgaaactcctgcgtaagaagatcgagaagcggaacctcaaattgcggcagcggaacctaaagtttcagggggcctcaaatctgaccctatcggaaactcaaaatggagatgtatctgaagaaacaatgggaagtagaaaggttaaaaaatcaaaacaaaagcccatgaatgtgggcttatcagaaactcaaaatggaggcatgtctcaagaagcagtgggaaatataaaagttacaaagtctccccagaaatccactgtattaaccaatggagaagcagcaatgcagtcttccaattcagaatcaaaaaagaaaaagaagaaaaagagaaaaatggtgaatgatgctgagcctgatacgaaaaaagcaaaaactgaaaacaaagggaaatctgaagaagaaagtgccgagactactaaagaaacagaaaataatgtggagaagccagataatgatgaagatgagagtgaggtgcccagtctgcccctgggactgacaggagcttttgaggatacttcgtttgcttctctatgtaatcttgtcaatgaaaacactctgaaggcaataaaagaaatgggttttacaaacatgactgaaattcagcataaaagtatcagaccacttctggaaggcagggatcttctagcagctgcaaaaacaggcagtggtaaaaccctggcttttctcatccctgcagttgaactcattgttaagttaaggttcatgcccaggaatggaacaggagtccttattctctcacctactagagaactagccatgcaaacctttggtgttcttaaggagctgatgactcaccacgtgcatacctatggcttgataatgggtggcagtaacagatctgctgaagcacagaaacttggtaatgggatcaacatcattgtggccacaccaggccgtctgctggaccatatgcagaataccccaggatttatgtataaaaacctgcagtgtctggttattgatgaagctgatcgtatcttggatgtggggtttgaagaggaattaaagcaaattattaaacttttgccaacacgtagacagactatgctcttttctgccacccaaactcgaaaagttgaagacctggcaaggatttctctgaaaaaggagccattgtatgttggcgttgatgatgataaagcgaatgcaacagtggatggtcttgaacagggatatgttgtttgtccttctgaaaagagattccttctgctctttacattccttaagaagaaccgaaagaagaagcttatggtcttcttttcatcttgtatgtctgtgaaataccactatgagttgctgaactacattgatttgcccgtcttggccattcatggaaagcaaaagcaaaataagcgtacaaccacattcttccagttctgcaatgcagattcgggaacactattgtgtacggatgtggcagcgagaggactagacattcctgaagtcgactggattgttcagtatgaccctccggatgaccctaaggaatatattcatcgtgtgggtagaacagccagaggcctaaatgggagagggcatgccttgctcattttgcgcccagaagaattgggttttcttcgctacttgaaacaatccaaggttccattaagtgaatttgacttttcctggtctaaaatttctgacattcagtctcagcttgagaaattgattgaaaagaattactttcttcataagtcagcccaggaagcatataagtcatacatacgagcctatgattcccattctctgaaacagatctttaatgttaataacctaaatttgcctcaggttgctctgtcatttggtttcaaggtgcctcccttcgttgatctgaacgtcaacagtaatgaaggcaagcagaaaaagcgaggaggtggtggtggatttggctaccagaaaaccaagaaagttgagaaatccaaaatctttaaacacattagcaagaaatcatctgacagcaggcagttctctcactgaacacatgccttcctttcatcttgaataactttgtcctaaaatgaattttttttccccttgatttaacaggatttttgtagactttagaatttggacttacctaacaagagtataaattgacttgggttgcaagcactgagcactgttacttctatcacgtctctcttttatttctgggatataaaacaggctttaagtttcttggttgcccaagggcagagcaaggaatatctggtgtttcttgtgatgataatattttaattttaaatatccctccctcatacaagtgtatgttaccattttaatataattctttttgtacctttccttcttgttttgcgaagatttttgtggcatggattgctgtgctcactgctgtaaaaggtgacctagtgtactgggcagctggtggcggtgcagaaaagagtctcaggttattttttgtttttagttatttcttggaccttgacagtatctaatgactcctcctgaaaatgctgcagtataaaagagcaaagagctttgggaaatacctaagaagcaccttaagattagggtggcattgcttttatagattcttgattttaaagcaacaggcctttctcaggtgttgcattttttggagcaaaaactatgggttgtaatttgaataaagtgtcactaagcagttataacgtttgatggctggggggtaggaagaggatggaattgagatgtttgagcctcatttacatcaatagaggtgtaatgtactgcatttcttcatttggtaacataacaaagactttcatacaaagaacgatgatgctcctcattaagatttgtttaattcaaggtggtttggatttggtaagcctttgcactctgtagagtacttagaagacaagggcaacttacttggagttagagccaagctgtcagacggtgcccagcacacattaatgttagcttctttctgagaaaaaaatacctcttccaggccctgaaacaaaaaatacatttgctgtgaagattgaaaatgaacaaagttagaaaaaaaaacagcaaaatcagtgatttagtcagatgagtttttcgttgtaggagcacttgatttctagtgtgttttgtacagtatataactacaagatagtacattttgtagcagttcaaagccaaagttgctagcatcattttgctgttgtgccagttaatcataggatcccattaaataagtgtgctaacatcgaatatagagaaaactggtaaagaacattccagtaggaaaagaaaagaacaatcttccatttctgggcttggccaccatcaccctggtcggacctgtcctggacttccaaccttgactgctgagctcctggcttagcttcttgggttcctaattcctggtgtttaataattctctccacgatcatgtttttctgattttttttttcagaaataatgttttttaaaagacaaaaacaaagggaagaatatttaattactgagcagaagtaaatactgttggcattttgtacataatctaatttttatatgcatgttcatgctttttaatttttttatcaaaaattaagtcatctacctactacttgtaaccagcttgtttcataacatgttattttcctgtgtcattaaataattacttcaatgttgaaaaaaaaaaaaaaaaaaaaaaaaa

SEQ ID NO: 1138 - DNA, 2982 bp, Homo sapiens
cgcaccccgcgcagcggctgagccgggagccagcgcagcctcggccccgcagctcaagcctcgtccccgccgccgccgccgccgccgccgccgccgcccccggggcatggcctgtctgatggccgctttctcggtcggcaccgccatgaatgccagcagttactctgcagagatgacggagcccaagtcggtgtgtgtctcggtggatgaggtggtgtccagcaacatggaggccactgagacggacctgctgaatggacatctgaaaaaagtagataataacctcacggaagcccagcgcttctcctccttgcctcggagggcagctgtgaacattgaattcagggacctttcctattcggttcctgaaggaccctggtggaggaagaaaggatacaagaccctcctgaaaggaatttccgggaagttcaatagtggtgagttggtggccattatgggtccttccggggccgggaagtccacgctgatgaacatcctggctggatacagggagacgggcatgaagggggccgtcctcatcaacggcctgccccgggacctgcgctgcttccggaaggtgtcctgctacatcatgcaggatgacatgctgctgccgcatctcactgtgcaggaggccatgatggtgtcggcacatctgaagcttcaggagaaggatgaaggcagaagggaaatggtcaaggagatactgacagcgctgggcttgctgtcttgcgccaacacgcggaccgggagcctgtcaggtggtcagcgcaagcgcctggccatcgcgctggagctggtgaacaaccctccagtcatgttcttcgatgagcccaccagcggcctggacagcgcctcctgcttccaggtggtctcgctgatgaaagggctcgctcaagggggtcgctccatcatttgcaccatccaccagcccagcgccaaactcttcgagctgttcgaccagctttacgtcctgagtcaaggacaatgtgtgtaccggggaaaagtctgcaatcttgtgccatatttgagggatttgggtctgaactgcccaacctaccacaacccagcagattttgtcatggaggttgcatccggcgagtacggtgatcagaacagtcggctggtgagagcggttcgggagggcatgtgtgactcagaccacaagagagacctcgggggtgatgccgaggtgaacccttttctttggcaccggccctctgaagaggactcctcgtccatggaaggctgccacagcttctctgccagctgcctcacgcagttctgcatcctcttcaagaggaccttcctcagcatcatgagggactcggtcctgacacacctgcgcatcacctcgcacattgggatcggcctcctcattggcctgctgtacttggggatcgggaacgaagccaagaaggtcttgagcaactccggcttcctcttcttctccatgctgttcctcatgttcgcggccctcatgcctactgttctgacatttcccctggagatgggagtctttcttcgggaacacctgaactactggtacagcctgaaggcctactacctggccaagaccatggcagacgtgccctttcagatcatgttcccagtggcctactgcagcatcgtgtactggatgacgtcgcagccgtccgacgccgtgcgctttgtgctgtttgccgcgctgggcaccatgacctccctggtggcacagtccctgggcctgctgatcggagccgcctccacgtccctgcaggtggccactttcgtgggcccagtgacagccatcccggtgctcctgttctcggggttcttcgtcagcttcgacaccatccccacgtacctacagtggatgtcctacatctcctatgtcaggtatgggttcgaaggggtcatcctctccatctatggcttagaccgggaagatctgcactgtgacatcgacgagacgtgccacttccagaagtcggaggccatcctgcgggagctggacgtggaaaatgccaagctgtacctggacttcatcgtactcgggattttcttcatctccctccgcctcattgcctattttgtcctcaggtacaaaatccgggcagagaggtaaaacacctgaatgccaggaaacaggaagattagacactgtggccgagggcacgtctagaatcgaggaggcaagcctgtgcccgaccgacgacacagagactcttctgatccaacccctagaaccgcgttgggtttgtgggtgtctcgtgctcagccactctgcccagctgggttggatcttctctccattcccctttctagctttaactaggaagatgtaggcagattggtggtttttttttttttaacatacagaattttaaataccacaactggggcagaatttaaagctgcaacacagctggtgatgagaggcttcctcagtccagtcgctccttagcaccaggcaccgtgggtcctggatggggaactgcaagcagcctctcagctgatggctgcacagtcagatgtctggtggcagagagtccgagcatggagcgattccattttatgactgttgtttttcacattttcatctttctaaggtgtgtctcttttccaatgagaagtcatttttgcaagccaaaagtcgatcaatcgcattcattttaagaaattatacctttttagtacttgctgaagaatgattcagggtaaatcacatactttgtttagagaggcgaggggtttaaccgagtcacccagctggtctcatacatagacagcacttgtgaaggattgaatgcaggttccaggtggagggaagacgtggacaccatctccactgagccatgcagacatttttaaaagctatacaaaaaattgtgagaagacattggccaactctttcaaagtctttctttttccacgtgcttcttattttaagcgaaatatattgtttgtttcttcctaaaaaaaaaaaaaaaaaaaaaaaaa

SEQ ID NO: 1139 - DNA, 3131 bp, Homo sapiens
gaagcgcccgccccggccggagccgccatgtaaccggcgccgcccggagcccgagccgcgcgggccccagcgacccgcccgccatgggggacgaggacgacgatgagagctgcgccgtggagctgcggatcacagaagccaacctgaccgggcacgaggagaaggtgagcgtggagaacttcgagctgctcaaggtgctgggcacgggagcctacggcaaggtgttcctggtgcggaaggcgggcgggcacgacgcggggaagctgtacgccatgaaggtgctgcgcaaggcggcgctggtgcagcgcgccaagacgcaagagcacacgcgcaccgagcgctcggtgctggagctggtgcgccaggcgcccttcctggtcacgctgcactacgctttccagacggatgccaagctgcacctcatcctggactatgtgagcggcggggagatgttcacccacctctaccagcgccagtacttcaaggaggctgaggtgcgcgtgtatgggggtgagatcgtgctggccctggaacacctgcacaagctcggcatcatttaccgagacctgaaactggagaatgtgctgctggactccgagggccacattgtcctcacggacttcgggctgagcaaggagttcctgacggaggagaaagagcggaccttctccttctgtggcaccatcgagtacatggcccccgaaatcatccgtagcaagacggggcatggcaaggctgtggactggtggagcctgggcatcttgctcttcgagctgctgacgggggcctcgcccttcaccctggagggcgagaggaacacgcaggctgaggtgtctcgacggatcctgaagtgctcccctcccttcccccctcggatcgggcccgtggcgcaggacctgctgcagcggctgctttgtaaggatcctaagaagcgattgggcgcggggccccagggggcacaagaagtccggaaccatcccttcttccagggcctcgattgggtggctctggctgccaggaagattccagccccattccggccccaaatccgctcagagctggatgtgggcaactttgcggaggaattcactcggctggagcctgtctactcaccccctggcagccccccacctggggacccccgaatctttcagggatactcctttgtggcaccctccattctctttgaccacaacaacgcggtgatgaccgatgggctggaagcgcctggtgctggagaccggccaggtcgggcagcggtggccaggagcgctatgatgcagcagtacgagctggacctgcgggagcctgcgctgggccagggcagcttttctgtgtgtcgccgctgccgccagcgccagagcggccaggagttcgcagtcaagatcctcagtcgcaggctggaggcgaacacgcagcgcgaagtggctgccctgcgcctgtgccagtcacaccccaacgtggtgaatctgcacgaggtgcatcacgaccagctgcacacgtacctggtcctggagctgctgcggggcggggagctgctggagcacatccgcaagaagcggcacttcagcgagtcggaagcaagccagatcctgcgcagcctcgtgtcggccgtgagcttcatgcacgaggaggcgggcgtggtgcaccgcgacctcaagccggagaacatcctgtacgccgacgacacgcccggggccccggtgaaaatcatcgacttcgggttcgcgcggttgcggccgcagagtcccggggtgcccatgcagacgccctgcttcacgctgcagtacgctgcccccgagctgctggcgcagcagggctacgacgagtcctgcgacctctggagcctgggcgtcattctgtacatgatgctgtcggggcaggtccccttccagggggcctctggccagggcgggcagagccaggcggccgagatcatgtgcaaaatccgcgaggggcgcttctcccttgacggggaggcctggcagggtgtatccgaggaagccaaggagctggtccgagggctcctgaccgtggaccccgccaagcggctgaagctcgagggactgcggggcagctcgtggctgcaggacggcagcgcgcgctcctcgcccccgctccggacgcccgacgtgctcgagtcctctgggcccgcagtgcgctcgggtctcaacgccaccttcatggcattcaaccggggcaagcgggagggcttcttcctgaagagcgtggagaatgcacccctggccaagcggcggaagcagaagctgcggagcgccaccgcctcccgccggggctcccctgcaccagccaacccgggccgagcccccgtcgcctccaaaggggccccccgccgagccaacggccccctgcccccctcctaatccccaccactgtgacccccttccctcataggggctgtgacctgggagcccggctcactcccggaggcctctgcctgcggctgacctgatccccaagggactgtcctttcctctcctaccccaccccactcccagacagagcagaagtatttttataagcagagaattttttatgtcttaccagatagagttgcagggaagggggggcctgctggggagtggggtttggggggccctctcccaggacactgcctcttctgggcagaaggcccctccagggggactgctccaacaggaaagagcccctcccccacttctaagcactgagttaggagtgctaactcctaaactgggaccccctaccctgttctcccctgaggccccgttcctgggaggggcacccctcaactgtcactttatggactgtctgtgcaattacgtccaccaaagacccgtgttgggggtactgaaggagaggccctgggggaccctctgaagcatttctgcctcactttatgtcatctgcttctcccctgttggggctaaggaaggagataggtggctcctaaaagaggaggccatcttctcacccaccccttcctctttggcacagctactcctggctgggggtggggccttgggggtctgggctgggcatccatggtcactgcctcagcccagccaggctgtgcctttgactttaaaataaaagtccacccagtgctgtgtgtggcaaaaaaaaaaaaa

SEQ ID NO: 1140 - DNA, 428 bp, Homo sapiens
atgtctcttgtcagctgtctttcagaagacctggtggggcaagtccgtgggcatcatgttgaccgagctggagaaagccttgaactctatcatcgacgtctaccacaagtactccctgataaaggggaatttccatgccgtctacagggatgacctgaagaaattgctagagaccgagtgtcctcagtatatcaggaaaaagggtgcagacgtctggttcaaagagttggatatcaacactgatggtgcagttaacttccaggagttcctcattctggtgataaagatgggcgtggcagcccacaaaaaaagccatgaagaaagccacaaagagtagctgagttactgggcccagaggctgggcccctggacatgtacctgcagaataataaagtcatcaatacctcaaaaaaaaaaaaaaaaaaaaa

SEQ ID NO: 1141 - DNA, 12086 bp, Homo sapiens
gactcccccctttgtgtctggtctgctcggagccactggaagtgcctcccggagggacgcagggtgtctcgccgcctccctgcccacccccttccccggctaccttcatccgccctcccgccgccccccgccctcggtccgcgacgcccgagttccgtcaggagcccagagctgcgggagaacgaggcggcggcggcggcggcggcggcggcggcggcggcagcagcagcggcttcctcggggggttgtgattcgctcacaggagccattgacgggagaagaggaggctttcttggtggaatttacctcaggcaagatcgagccgcaggaataaaaagcgaggaagggaagggagcgccgccgggaggactagaaggggcagcctctcacacccactccgcctgccgtctcggggagcccggaccggggccgcgaccgcgacccctcccctcccccgctcctacctctcctcagccttcgccagggcctccccaaccctctcacggttgttctgcgaaggcgtggggactgtgagcttgtccatggaggcaggcaccttttttgatccagtcaaggaagaggatttgttgttttcgaaatcagagtgaaggaagcaccgaagcgaaacttaaggaatcctgccttcccggagccgcgggcgatgcgactagggctgccgggcgccgccgccgcccgtccggcttcgtccttcccggcagtcgggaactagttctgaccctcgccccccgaccccggatcgaatccccgccctccgcaccctggatatgttttctcccagacctggatatttttttgatatcgtgaaactacgagggaaataatttgggggatttcttcttggctccctgctttccccacagacatgccttccgtttggagggccgcggcaccccgtccgaggcgaaggaacccccccagccgcgagggagagaaatgaagggaatttctgcagcggcatgaaagctctgcagctaggtcctctcatcagccatttgtcctttcaaactgtattgtgatacgggcaggatcagtccacgggagagaagacgagcctcccggctgtttctccgccggtctacttcccatatttcttttctttgccctcctgattcttggctggcccagggatgacttcctcgctgcagcggccctggcgggtgccctggctaccatggaccatcctgctggtcagcactgcggctgcttcgcagaatcaagaacggctatgtgcgtttaaagatccgtatcagcaagaccttgggataggtgagagtagaatctctcatgaaaatgggacaatattatgctcgaaaggtagcacctgctatggcctttgggagaaatcaaaaggggacataaatcttgtaaaacaaggatgttggtctcacattggagatccccaagagtgtcactatgaagaatgtgtagtaactaccactcctccctcaattcagaatggaacataccgtttctgctgttgtagcacagatttatgtaatgtcaactttactgagaattttccacctcctgacacaacaccactcagtccacctcattcatttaaccgagatgagacaataatcattgctttggcatcagtctctgtattagctgttttgatagttgccttatgctttggatacagaatgttgacaggagaccgtaaacaaggtcttcacagtatgaacatgatggaggcagcagcatccgaaccctctcttgatctagataatctgaaactgttggagctgattggccgaggtcgatatggagcagtatataaaggctccttggatgagcgtccagttgctgtaaaagtgttttcctttgcaaaccgtcagaattttatcaacgaaaagaacatttacagagtgcctttgatggaacatgacaacattgcccgctttatagttggagatgagagagtcactgcagatggacgcatggaatatttgcttgtgatggagtactatcccaatggatctttatgcaagtatttaagtctccacacaagtgactgggtaagctcttgccgtcttgctcattctgttactagaggactggcttatcttcacacagaattaccacgaggagatcattataaacctgcaatttcccatcgagatttaaacagcagaaatgtcctagtgaaaaatgatggaacctgtgttattagtgactttggactgtccatgaggctgactggaaatagactggtgcgcccaggggaggaagataatgcagccataagcgaggttggcactatcagatatatggcaccagaagtgctagaaggagctgtgaacttgagggactgtgaatcagctttgaaacaagtagacatgtatgctcttggactaatctattgggagatatttatgagatgtacagacctcttcccaggggaatccgtaccagagtaccagatggcttttcagacagaggttggaaaccatcccacttttgaggatatgcaggttctcgtgtctagggaaaaacagagacccaagttcccagaagcctggaaagaaaatagcctggcagtgaggtcactcaaggagacaatcgaagactgttgggaccaggatgcagaggctcggcttactgcacagtgtgctgaggaaaggatggctgaacttatgatgatttgggaaagaaacaaatctgtgagcccaacagtcaatccaatgtctactgctatgcagaatgaacgcaacctgtcacataataggcgtgtgccaaaaattggtccttatccagattattcttcctcctcatacattgaagactctatccatcatactgacagcatcgtgaagaatatttcctctgagcattctatgtccagcacacctttgactataggggaaaaaaaccgaaattcaattaactatgaacgacagcaagcacaagctcgaatccccagccctgaaacaagtgtcaccagcctctccaccaacacaacaaccacaaacaccacaggactcacgccaagtactggcatgactactatatctgagatgccatacccagatgaaacaaatctgcataccacaaatgttgcacagtcaattgggccaacccctgtctgcttacagctgacagaagaagacttggaaaccaacaagctagacccaaaagaagttgataagaacctcaaggaaagctctgatgagaatctcatggagcactctcttaaacagttcagtggcccagacccactgagcagtactagttctagcttgctttacccactcataaaacttgcagtagaagcaactggacagcaggacttcacacagactgcaaatggccaagcatgtttgattcctgatgttctgcctactcagatctatcctctccccaagcagcagaaccttcccaagagacctactagtttgcctttgaacaccaaaaattcaacaaaagagccccggctaaaatttggcagcaagcacaaatcaaacttgaaacaagtcgaaactggagttgccaagatgaatacaatcaatgcagcagaacctcatgtggtgacagtcaccatgaatggtgtggcaggtagaaaccacagtgttaactcccatgctgccacaacccaatatgccaatgggacagtactatctggccaaacaaccaacatagtgacacatagggcccaagaaatgttgcagaatcagtttattggtgaggacacccggctgaatattaattccagtcctgatgagcatgagcctttactgagacgagagcaacaagctggccatgatgaaggtgttctggatcgtcttgtggacaggagggaacggccactagaaggtggccgaactaattccaataacaacaacagcaatccatgttcagaacaagatgttcttgcacagggtgttccaagcacagcagcagatcctgggccatcaaagcccagaagagcacagaggcctaattctctggatctttcagccacaaatgtcctggatggcagcagtatacagataggtgagtcaacacaagatggcaaatcaggatcaggtgaaaagatcaagaaacgtgtgaaaactccctattctcttaagcggtggcgcccctccacctgggtcatctccactgaatcgctggactgtgaagtcaacaataatggcagtaacagggcagttcattccaaatccagcactgctgtttaccttgcagaaggaggcactgctacaaccatggtgtctaaagatataggaatgaactgtctgtgaaatgttttcaagcctatggagtgaaattattttttgcatcatttaaacatgcagaagatgtttaaaaataaaaaaaaaactgctttatcctcctgtcagcaccccctcccacccctgcaacaaagacttgctttaaatagatttcagctatgcagaaaaatttagcttatgcttccatatttttaaattttgttttttaagttttgcacttttgtttagtctcgctaaagttatatttgtctgttatgaccacagagttatatgtgtgtgtatcaaaagtggtctcaaaatatttttttaagaaaaaaagcaaaaacaatgtattgctgataatcagtttggaccagtttcttaaggtcattaaaacagaagcaaattaagacaggtttgactgcagtggtgtctggtatccatgttttatttctgggcacaagctagtttttatgttgatacgttcctgaacatattatcttgttggacatcttttctcttgtgttttgtttgaatgtgcaatagtttataggccacaaataagctttcttgtaagctctcttcctaacagggcacatattcttccataatataaacacttttctgccccatctcccatacttttgaaggtcagttctatgacagtgaattttgcacaggagaagcagctacctgatttcttactttctctctccttatcatggagaatacagaaacattgtctgaaagggctctaaagaaggaactaccaaaacctgacttgaaatgccatttcttttaaccttccaaatcctaaatgtttccttcaaggcatcttaataaacttatttgcttctggttttgggagttcataagagagaatagaacaaaatacaggacatcaaatattagccatttcccattttattttatttttctatgtaggttcatgttccatgttcatttatttaagaaatacatttttattggtaagcttatagagctacacttatggaatttttaagtaggtaaataaatggttaagacaaaatagtgttatagccttcattctctgaataggccatctttgactcataaaattacccttactgtttattataacttcagaagtaatttatagttctgaacctatagtatcttttaccctgttcccaagcaaagactggtgactttatctgaaaatgattcctcttcccatgacctaaaacactgtgaggaaaaatcattcaagtggcatgccaagtccctatgaaggaagggctgctatcaaacctaccttttttgagcaaactgagactaaacttctctcttttcaaaattgtgttatcttccttaatcctattttcataatttttccttttgccagtttttcacattatctttgatatgtgagcaacatttattatttacattagagtataccttttagtaataaaatgacttgaaatcatattatttttaaaagccctttgcttctttcattacttataatctcctctaaaacaacctctgcatgttttttttaaataaagcactttctgtcaaataatggacttttttctaaacagaaattattttctattaatttgcaaactgatgatttcacttttttttacttttttttcgattatcagagtacttagtaaatgttatatagtttagttctaagatagttccagggattaaaaggttaagaggaaaacacaaatcaccaaatttctgatttatgtttttatctcctgaacaatattttctcactcatattcctctatcttatcacttagctaaagacagcctaaatttcccaattttctgtccaaaatatttgtgatttacttgtatataagccttctcatttgccatgtgctgtgatcttacaagttagatgttactatacctaccatttattcagctggattgctgaacacagttctggattcatagaattaagaatatcttgttagtgcccaggatttccacgttttgtgttttattggcccttttctttattcagccccttaatctattttcagtcttctggcacgtaatttttttcacagttattattcttctattaacaaattatttttatctttcctagtacattttcacttagttctcttgcccttaaatatctttcacatgcattttaggatattcttttcaaatatttgtaggacaactttgaatcaaaataaattatgttccttctccaatttgaagcattgaggataaatgaccatttgaggtctaactgatcttttcctgccagaagagttatcttacgttctgctatatttgtatttgggccagttgattgtaggttgtccaacattttttaatattgggaaaattatgataaaatgctttaaaaattaatatgccagattaaaataactgaatagtttactatttcattcaagcatgtttaaaacaaataatttcctttcaccagtttttcttagtaaactcctgaaaaagtaggaaaggtggaaagtatatatcatttttataaattttaaattgtacatcagacttttaaaatctgtaatatacaagcaagcaaaattattttaaatgacttaattgtatgctaatactcatctgataataaatgcttcttaaagttgacatttaactgctatcacaaagttttatatgtagaaaagtggggtccttttgaataaaagatcattcaactaaaaatattaaaatttatttcactggatggtaatgtaaccttaaaagcatcataataggtaaagtctaatattagttcccttaacaaaatcctaactgtataccagaattaggtcactgaaagaacttgatttgaattacgtttagacaaaaatgatttaattgtaaattcttaaaactttctaaatgcataattggcaaaaaaaaaaacccactgttaccagtgtaggaagttacaagaaggcacatactgaatgctgaagtatacatatgctatttctcttaaacctcagagcaaccatatgagcattgtaattaatattcccattttacagatgaggaaactgaagctaagagaagctaagtaatatgcccaaggtccacatctagtaacagacaaagctgggatttcagtctatgtctgcctctctccacatctctttcatccataccacactgcctacatgccatatgacaggatgtgtaatgggctaacgtttatttaaaaagttcaggccaggtgcagtggcttatgcctataatccccgcactttgggaggccgagccgggtggatcatgaggtcagacgttcaacaccagcctggccaagatggtgaaaccccgtctctattaaaaatattttttaaaaattaactgagcgtggtggtgggcgcctgtagtcccagctactcaggaggctaaggcaggagaatctcttgaacccgagaggtggaggttgcagtgagctgagatcgcgccactgcactgcagcctaggcgacagagcaagactgcctcaaaaaaaaaacataaaaattcagtcactatactctggcacaattttcatttgtatatgagccaaaccacataccttaatgatttgggaagttaggcaaatatgagatatgtagacatatctatgctgattgttgcttgagaaataattactaattctagacaaaactcaatcctgtatcttccatcatgaatcttaaaatcatttcacttcactcctaacatttcttacattgcagaactaatggtaaagtaaattttacggaaaaagttaagatagctttgggaacagagacctttccctaaattgattccatagcagatttgggggaattaacaaagaatttcagtctcatcaatcctttgaatccatcttcaaaacttctgcttttaataactttagaaaatttactaatctatagaactaattgagtaggatataggaaggatacaaggatataatgtcctttttataaaagtttagtatagcttctttacatgtatccacttgttccagaaaatgtgcattggttctgaatgtgaaaatatttaaagagagaaaggaacactcaagtaagtgtgggcttcagtgggaattatcacaaaacattggcaagtatttttatttaaattattttcaaatttgacttctacagccaagtggaattggtaggctgtagctgttacactgaaatttctagtctttgtaagtgcctcctgaaagtcatttaaaatggaaaaatatttcaatgagcttttccttttttcatatttatggacatgaatattttattggagatcattaactcctagaatttgagattatatttccatacaacattttataaagttatgttgaacttactacctgttatgtgcaggttattatgtaactattcacagattgcttcatatattgctttatcttcccatctaacttcttaaagttaaaatccggacacacatgttgattatctagaccagtcattctggaaattgtaacactcccacataaaccccaggagactttttcagaatgcaatgtttctaaatgtactgttactggcagtttactctccagcatataaggttgcattttaacttttagattatgaactgtgcaaactttacccaaaactatcttgcatgattccctcctaaatatattccttgattaagtaaatctggcaaatcactgtttgagctagttacataaaatttgttatcaagagaaggcttttctacaagtttccagattaacataaagaaaagagggaatcacagggcatttaagtgcaccttcccattactttccttaaatcacctcatagttaggctgggcgcggtggctcacgcctgtaatcccagcactttgggaggccgagacggtggatcacgaggtcaggggactgagatcatcctggctaacacgatgaaacctcatctctactaaaaatacaaataattagccaggcatggtggcacgcgcctgtagtcccagctactcgggaggcagagacaggagaatcgtttgcacccgggaggcggaggttgttgcagtgagccgagatcgcgccaatgcactccagcctgggctacagagtgagactccatctcaaaaaaaaacaaaaaaaatcacctcatagtttatgtctgacttactccaaacctcagttatctgatttgtagtctgtgtcaggaaagttttcttcatatctattctgtctccctcctctttgattttaaatttttttcttttacccagtaggacaaaaaagagcagttggtcatcatccccaatattcttagtcttcagtatgcttcaggcctctcaatgaacacttaagtctcaattcttcagacaaaattgcttaagctcttctcctcagtcctattttaatgactttatatttaagaatatagaattatattttcttttatattcaaattcattactccagttaagtaatagtttgatagtttgatagaatcgagagttaagatgtttctatttgaaagtggattcaaccatcagaccaccagcaaatcggcacttaatttttgtgttatctaacattttctattgtggaattttatgattttatattctcattagttataactaaaaagccatgcacacagaattgtatatcattttgccattaaaattttttaacatattgcagcaagcttagttttatgattgagccacaaccttttacatattttttgtatgaaatattaaacactaaatgcaagattaactttcaaaagcaaaccctacattaatcaggtattatctatggacatttttgtagaccacttttgaaatacttattattttgcaacatagactggactatacaactttcatttaacttttaggtgactgatttaagttgagtgtgcatatagagaaaaacctagaaatttatctcatggcagatacatttgaaagtacttcagaagaatttatgctgtatattaaaactaggctcaaaataaatctatcgtatctttaaaagtccaattctgttattactgtgatgtttgtagtgttactattaaacattgtgaacatacacatttttaaaacaacttgaaacccattttaaaatctgggtaagagagaaggaatcttcagaacaaaatcacatcattagggtgtccagtttatgattgaatttttaagcaaattactgtatttgaaactacaacttgatttggttttcagttttaaaaggcaacatgtgggttttatccattttatttatacctttagatttcagaaacatcttcatgttttagatgcattctacagacatcatgttacttaaaaactcagggcccctttcatccctttgtacactgaaaaagttcaattgttagcaagtaagcaattagatccagttgaatatttaaagtgtttgttgcacagttcatttaatgtttcatcttatttgactttttcacatagatataatatcagatttcattaattataaaaagttgcccagttctgtaattactgaacagagggaatgactcaactaattggctacatgttgcaacaaatttaggcctttagagttgaagcactgacttaaaacgacttacatttctgttctttggtcaaatgaccatacatgatatgggacaaattgtttcattttgtttgttttttaataagggaacttggtaaagtagttcctgtcagataggattttctcaagagacaatttaacgttataaagccttctaaaagtgaactaaatattttataactttagtaatagcttggatggttttgagaaaataacctgtatttatcacattgtcaaacagaatttttctttgaatcagacaagttcaagctctaaattgatgtgctatatacttaaaatcctaggaagttatctgtaaccagtctcttgtctcaggctcttcaccttgttaccaatcctcgtaagtatgtaaaggaaacatatttttaaagaagcttaacagtaagaaaaaattactaaaagatgcaattcaaagataggtcccagtttaacactgaattgcttgacttctgtggcttttctttttctggccacatttatttatttaagcaatttttgtatgccttgttatttcatttccatagagattatattgtatcagtgtttatgtaagctggaatcatcctcagttttttgctgataatttttcaaataaagatacatggataattgtaaaatacactaactcttagggtgttgtagtagctgaaacatggagatgcgtagctgtcatgctttttctgaatggacaggagaaacataagctacggagtattcacttctgaggatgcttttccggaaaaagaaaggctagaaaatactcgcacttcctcagaaccctctttcttgttaacgggtatcttttgttggtgtgttttgctcttacattacagatagactatcatatatgactttatgaataatttcagttattttgcttttgtataagctgtctgaagccttgctatgctgtataagttgtgtttgatggatcagtgtgagtataaaataaagcaaatcacttttcttttgtattatctatggatgccactatgaaagctgacattaagccactaaagagttttctatgaataagtgtaagtaaatgctttgatatatataaacctaaataaaaagattgtattgatacagagacattggagaaggagattttaaggcagttctttaggtttaaaaaggcttgctgtaaaatggtgcgttattccgtttattaaagatcatattaatgacaataaaaaaaaaaaaaaaaa

SEQ ID NO: 1142 - DNA, 4355 bp, Homo sapiens
aaggcgctcgtttggcgcgcgcgccctaggcggcggatctaagctaacttcttggatcttttcttgtttctccttggtttttgactttttctggaccctggtgtctacgatttccgagatgccgtcttctttgttgggcgcggcgatgccggcctctacatctgccgcagccctgcaggaagctctggaaaatgctggacggctcatcgaccgtcagttgcaagaggaccgcatgtacccggacctttccgagctgcttatggtgtctgccccaaataatcccaccgtttctggcatgtcagatatggattatcctttacaaggacctggtttgctgtccgtacccaaccttccagagatcagttccatccgaagagttcctctcccacctgaacttgttgagcagtttggacatatgcagtgtaattgcatgatgggtgtgttccctcctatcagcagagcttggctcacaattgacagtgatatattcatgtggaactatgaggatggaggagaccttgcctattttgatggacttagtgagactattcttgctgtggggcttgtgaagccaaaagcaggcatctttcaacctcatgtgcgacacctcctggttttggcgacccctgtagacatagtaattcttggactcagctatgctaatttgcaaacaggttctggagttcttaatgatagtttgtctggtggaatgcagttgcttccagatcctttatattctcttcctactgataatacttaccttttaacaataacttccactgataatggcagaattttcttggctggaaaggatggctgtttatatgaagtagcctaccaggctgaagcagggtggtttagccaaagatgtaggaaaataaaccactcaaagagctcactttctttccttgttccttccttgctacaattcacgttctcagaagatgatcctattcttcaaattgcaattgataattctagaaatattttatatacacgatctgagaaaggagtaatacaggtgtatgatttgggacaagatggacaaggaatgagcagagttgcctctgtgtcacagaatgccattgtctctgctgctggtaacattgctaggaccatcgatcgttctgtttttaaaccaattgtccaaatagcagtgattgaaaattctgaatcactggactgtcagttattggctgtcacacatgcaggtgttaggttatattttagcacttgtccattcagacagccattagcacggcctaatacactgacgctggttcatgtccgcttacctcctggattctcagcatcttcaaccgtggaaaagccttcaaaagtacatagagctctttatagtaaaggtattctattgatggcagcctcagaaaatgaggataatgatattttatggtgtgtcaaccatgatacttttcctttccaaaagccaatgatggaaacccagatgacagctggtgttgatggtcattcctgggctctttctgcgatagatgaattgaaagtagataaaataattacacctttaaacaaggatcatattccaataactgattcaccagttgttgtacagcagcacatgttacctccgaagaaatttgttctcctctcagcacaggggagccttatgtttcataaacttagacctgtagatcaactgaggcatctacttgtgagtaatgtgggaggagatggagaagagattgaaagattctttaaattacatcaggaagaccaggcttgtgcaacttgccttattcttgcttgctccactgctgcctgtgatagagaagtatctgcctgggctactcgggctttctttaggtatggtggtgaagcacagatgagatttccaaccactcttccgcctccaagtaatgttggtcccatcttggggtctcctgtctattctagttctcctgttcctagtggtagtccctatccaaatccatcctttttgggaacaccgtctcatggtatacagcctcctgccatgtcaactccagtgtgtgctctgggaaacccagcaactcaggccacaaatatgagttgtgtgactggaccagagattgtgtactctggaaaacacaatggtatttgcatttacttttctcggatcatgggaaacatttgggatgcaagcttagttgtggagagaatattcaagagtggcaacagagagatcactgcaattgaaagtagtgttccctgccaactgctagagtcagtgctacaagaactaaagggtttgcaggaatttctagacagaaactcccagtttgcaggaggaccattaggaaatccaaatactactgctaaagtgcagcagaggctgataggattcatgcgtcctgaaaacggaaatccccagcaaatgcaacaggaactgcagaggaagtttcatgaggctcaactaagtgaaaagatttcacttcaggcaattcagcagttggttcgaaaatcatatcaggctctggctttatggaaacttctttgtgaacatcaattcactatcattgtggcagaacttcagaaggaacttcaagagcagctgaagatcaccacctttaaagatcttgtaatcagggacaaagaactcacaggggcattaattgcttctcttatcaactgctacatcagagataatgccgctgttgatggcattagtttacatttacaggatatctgcccacttctatatagcactgatgatgcaatttgttctaaggcaaatgagcttctccagcgttcccgacaagttcaaaataagactgaaaaagaaagaatgttaagggaatcattaaaggaatatcaaaaaattagcaatcaagtggacctttccaatgtttgtgctcagtatagacaagtgagattttatgagggtgtggtggaactttctcttacggctgcagagaaaaaagatcctcaaggtcttgggcttcatttctataaacatggagaaccagaagaagacatagttggacttcaggccttccaagaaagattaaacagttacaaatgcattacagacacacttcaagaactggtaaatcaaagtaaggccgctcctcagtctcccagtgtacccaaaaaacctggtcctccagtgttgtcatctgatccaaatatgctgagtaatgaagaagcaggacatcattttgaacaaatgcttaaattgtcacagcgatccaaggatgagctctttagtattgccctttataattggctaatacaagtcgaccttgcagataagctgctacaggttgcttctccatttctggagccacatctagtccgaatggccaaagttgatcaaaacagagttcgttatatggatttactctggcggtattacgagaagaacagaagtttcagtaatgctgctcgtgtactgtccagactggctgacatgcatagcacagaaatttcacttcagcagcgactagagtacattgctcgagccattcttagtgccaaaagttccactgccatttcatcaatagctgccgatggtgaatttcttcatgaattagaagaaaaaatggaggttgctaggatccaacttcagatacaggagacactacaaaggcagtattcccatcattcttctgtacaggatgcagtttctcagctggattctgagctgatggacataactaagctttatggggaatttgctgacccatttaaacttgcagagtgcaaacttgcaataattcattgtgccggttattcagaccctatattggtgcagacactttggcaagatatcatagagaaagaattgagtgacagtgtgacattgagctcctcggatagaatgcatgctcttagtctcaagattgttctccttggcaaaatttatgctggcacaccacgcttctttcctttagattttattgtacagtttttagaacagcaggtttgtactttgaactgggatgtgggcttcgtaatacagacaatgaatgaaattggagtaccattacctagactactagaagtttatgatcagttgttcaaatcacgggatccattctggaacagaatgaagaagccactgcaccttttggattgtatacatgtattattgataagatatgttgagaatcccagccaagttttaaattgtgaaaggagaagatttacaaatctctgcctggatgctgtttgtggttaccttgttgagctccagtctatgagctcgtcagtagcagtacaagccatcactgggaattttaaatctcttcaagctaaattagaacggcttcattaattactgtgatatactttcatccgttttatgatctgtaaaataaaaactcagctgggtccag

SEQ ID NO: 1143 - DNA, 2640 bp, Homo sapiens
ctttacgtcggcgcgtaacgagggggtgcgtgtgaggtcatcgcgcgggcgggcgggcggggtctggcggtttgaacgagacgaagacggaaccggagccggttgcgggcagtggacgcggttctgccgagagccgaagatggcagtgaacgtatactcaacgtcagtgaccagtgataacctaagtcgacatgacatgctggcctggatcaatgagtctctgcagttgaatctgacaaagatcgaacagttgtgctcaggggctgcgtattgtcagtttatggacatgctgttccctggctccattgccttgaagaaagtgaaattccaagctaagctagaacacgagtacatccagaacttcaaaatactacaagcaggttttaagagaatgggtgttgacaaaataattcctgtggacaaattagtaaaaggaaagtttcaggacaattttgaattcgttcagtggttcaagaagtttttcgatgcaaactatgatggaaaagactatgaccctgtggctgccagacaaggtcaagaaactgcagtggctccttcccttgttgctccagctctgaataaaccgaagaaacctctcacttctagcagtgcagctccccagaggcccatctcaacacagagaaccgctgcggctcctaaggctggccctggtgtggtgcgaaagaaccctggtgtgggcaacggagacgacgaggcagctgagttgatgcagcaggtcaacgtattgaaacttactgttgaagacttggagaaagagagggatttctacttcggaaagctacggaacattgaattgatttgccaggagaacgagggggaaaacgaccctgtattgcagaggattgtagacattctgtatgccacagatgaaggctttgtgatacctgatgaagggggcccacaggaggagcaagaagagtattaacagcctggaccagcagagcaacatcggaattcttcactccaaatcatgtgcttaactgtaaaatactcccttttgttatccttagaggactcactggtttcttttcataagcaaaaagtacctcttcttaaagtgcactttgcagacgtttcactccttttccaataagtttgagttaggagcttttaccttgtagcagagcagtattaacacctagttggttcacctggaaaacagagaggctgaccgtggggctcaccatgcggatgcgggtcacactgaatgctggagagatgttatgtaatatgctgaggtggcgacctcagtggagaaatgtaaagactgaattgaattttaagctaatgtgaaatcagagaatgttgtaataagtaaatgccttaagagtatttaaaatatgcttccacatttcaaaatataaaatgtaacatgacaagagattttgcgtttgacattgtgtctgggaaggaagggccagaccttggaacctttggaacctgctgtcaacaggtcttacagggctgcttgaaccctcataggcctaggctttggtctaaaaggaacatttaaaaagttgccctgtaaagttatttggtgtcattgaccaattgcatcccagctaaaaagcaagaggcatcgttgcctggataatagaggatgtgtttcagccctgagatgttacagttgaagagcttggttttcattgagcatttctctatttttccagttatccccgaaatttctatgtattatattttttggggaagtgaggtgtgcccagttttttaatctaacaactacttttggggacttgcccacatctctgggatttgaatggggattgtatcccattttactgtcttttaggtttacatttaccacgtttctcttctctgctccccttgcccactggggactcctctttggctccttgaagtttgctgcttagagttggaagtgcagcaggcaggtgatcatgctgcaagttctttctggacctctggcaaagggagtggtcagtgaaggccatcgttaccttgggatctgccaggctggggtgttttcggtatctgctgttcacagctctccactgtaatccgaatactttgccagtgcactaatctctttggagataaaattcattagtgtgttactaaatgttaattttcttttgcggaaaatacagtaccgtgtctgaattaattattaatatttaaaatacttcattccttaactctccctcatttgctttgcccacagcctattcagttcctttgtttggcaggattctgcaaaatgtgtctcacccactactgagattgttcagcccctgatgtatttgtattgatttgtttctggtggtagcttgtcctgaaatgtgtgtagaaagcaagtattttatgataaaaatgttgtgtagtgcatgctctgtgtggaattcagaggaaaacccagattcagtgattaacaatgccaaaaaatgcaagtaactagccattgttcaaatgacagtggtgctatttctcttttgtggccttttagacttttgttgccctaaaattccattttattgggaacccattttccacctggtctttcttgacagggtttttttctactttaaacagtttctaaataaaattctgtatttcaagagtaaaaaaaaaaaaaaaaaa

SEQ ID NO: 1144 - DNA, 437 bp, Homo sapiens
atgtctggtcgtggcaaacaaggaggcaaggcccgcgccaaggccaagtcgcgctcgtcccgcgctggcctccagttcccggtagggcgagtgcaccgcttgctgcgcaaaggcaactacgcggagcgggtgggggccggcgcgcccgtctacatggcggcggtcctcgagtacctgaccgccgagatcctggagctggcgggcaacgcggctcgggacaacaagaagacgcgcatcatccctcgtcacctccagctggccatccgcaacgacgaggaactgaacaagctgctgggcaaagtcaccatcgcccagggcggcgttttgcctaacatccaggccgttctgttaccaaagaaaaccgaaagccacaaagccaaaagcaaataaatgcagacaaacaaaccaagaccaaaggctctttttagagccaccca

SEQ ID NO: 1145 - DNA, 5946 bp, Homo sapiens; identical to SEQ ID NO: 123

SEQ ID NO: 1146 - DNA, 8911 bp, Homo sapiens
ttggggagagctggtgagcaagagtctggcccgagttagctagagctgttgccatgacaagcattttcttaagaaagctctgctgttgagatcgtccaaagctgggggctgggagggggggcacgaacttcgtggggcaccatccctccgaagagagcaagatcagagacacccgcccagctctcctgcaccctttttctttcaggaacctgagaggtccttcccattggaggggcagggggaggagacccagcccactccccggccttagccagaaaggcaagagagcaaagccagcgtctctagcttggttgccacactggggagactggtgggtggtcaccccaccctaccctcatccatggaaacccggagggagagtcccgcctgaagaaacctggatctttgctagaaagagagagatccagttgtcatcggtatccaggaagctctcctcttcctcctcctgacgtctaccactacagttgctggttgttgctaaggttgctgccatggtaacatgcacatcctgtttacaccttcatctgggcaagttggtctaagctaggaacctacctaccctggacaaccactatcatcaccacctggggacaccaatcatcgtgacacggagtccaccttccactcagttcccccatcctcttcctcctctcgctgccagacttcatacggaagaaaggatctagacttcggacggctactcgggagcttattgcacaagatatattcaatctattccctcactgggcccccagagaagcaagaagtaggaagaagttgagacagggaggcaggagacactggtcagttgaagggaaacgctacatcttctctggttgaggggcttggtaacagcaggcaaaatgacgaacccatcagaccgtgtcttgcctgccaactcgatggccgagagccgtgaaggggactttggctgcacagtaatggaactgaggaagctcatggagctgcgttcaagggatgcactgacccagattaatgtccactatggaggtgtacagaatctctgcagtagactgaaaacctcccctgtggaaggtctgtctgggaaccctgcagatctggagaaacgtaggcaggtgtttggacacaacgtgatcccccccaaaaagcccaagactttcttagaattagtgtgggaagctcttcaagatgtcacgctcatcatcctggagattgcagccatcatctccctggtcctgtccttttatcgccctgctggtgaagaaaatgaactgtgtggtcaagtcgcaactaccccagaagatgaaaatgaggcacaagctggctggattgagggggcagccatccttttctcagtgatcatcgtggtgttagtgactgcctttaatgattggagcaaagagaagcaattccgggggctgcagtgccgcattgaacaggagcaaaagttctccatcatccgaaacggtcaactcatccagctccctgtggctgagattgtggttggtgatattgcccaagtcaaatacggtgatctgctgcctgcagatggaatcctgatccaagggaatgatctgaagattgatgagagctctctgacaggggaatctgaccatgtcaagaagtccctggacaaagaccccatgttgctctcagggacccatgtcatggaaggttctggccggatggtggtgacagctgttggtgtcaactctcagactggaatcatccttactctcttgggggtcaatgaggatgacgaaggggagaaaaagaagaaaggtaaaaaacaaggagtccctgaaaatcgcaacaaagcaaagacccaagacggagtggccctggaaatccagccactcaacagccaggagggaatcgacaatgaggaaaaggacaagaaggcagtcaaggtgcctaaaaaggagaagtcagtgctgcagggcaagctgactcgcctggctgttcagattgggaaagccggtctgctcatgtctgctctcacggttttcatcctgattctatactttgtgattgacaactttgtgataaatcgcagaccatggctccctgagtgtactcccatctacatccagtactttgtcaagttcttcatcatcggcatcactgtactggtggtggctgtgccagaggggctgcctctggctgtcaccatctcactggcctactctgtgaagaaaatgatgaaagacaataacctagtacggcacttggatgcttgtgagaccatgggcaacgccaccgccatctgctctgataagacaggcacgttgaccatgaaccgcatgactgtggtacaagcttatattgggggcatccattaccgtcaaatcccaagccctgatgtcttcctgcccaaagtcctggacctcattgtcaatggcatttctatcaacagtgcttatacctccaagattctgcctccagagaaggagggaggcctgcctcggcaggtgggcaacaagaccgagtgtgctctgctaggctttgtcacagatctgaagcaggattatcaggctgtgcgtaatgaagtgcccgaggagaagctctacaaggtgtacacctttaactcagtgcgcaagtcaatgagcaccgtcatcaggaatcccaacggtggcttccgtatgtacagcaagggcgcctctgagatcatcttgcgcaagtgtaatcgaatcctggaccggaaaggggaagcagtgccattcaagaataaagacagagatgatatggtacgcactgtcatcgagcccatggcctgtgatggactccggactatctgcatagcttaccgggacttcgatgacacagagccctcttgggacaatgagaatgagatcctcaccgaactgacctgtatcgcggtggtgggcattgaggaccctgtgcgcccagaggtgccagatgctattgccaaatgcaaacaagctggcattactgtcagaatggtgacaggtgacaacatcaacacagcccgggccattgccaccaaatgtggcattctgacacctggggatgacttcctgtgcttagaaggcaaagaattcaaccggctcatccgcaacgagaaaggcgaggtagagcaagaaaagctggacaagatctggcctaagcttcgggtcctggcgcgatcttctcccactgacaagcacaccctggtgaaaggcataattgacagcactgttggggaacaccggcaggtcgtggctgtcactggtgatggcacaaatgacgggcctgctctgaagaaagcggatgttggttttgccatgggcatcgcaggcacagatgtagcaaaggaggcttcagacatcatcctaacagatgacaacttcaccagcattgtgaaggcagtgatgtggggacgaaatgtctatgacagcatctccaagttcctgcagttccagctcactgtcaatgtggtggccgtgattgtagccttcactggagcctgtatcactcaggattccccattgaaagctgtgcagatgttgtgggttaatctgatcatggacacttttgcttcattggccctggccacagagccccctacggaatctctgttgaagcggcgcccctatggccgaaataagcctctgatctcacgcactatgatgaagaacatcttgggccatgcattctatcagctcattgtcatctttatccttgtctttgcgggtgagaaattctttgatattgatagtgggaggaaggcacctctacattcaccacccagccagcactataccattgtttttaacaccttcgtgctgatgcagctcttcaatgaaatcaactcccgaaagatccatggagagaagaacgtcttttcaggcatctaccgcaacattatcttctgctctgtagtcttgggcacattcatctgccagattttcatcgtggaatttgggggtaaacccttcagttgtacaagcctcagcctgtctcagtggctgtggtgtctcttcattgggattggagaacttctgtggggccagttcatctccgcaatacctacccgatccctgaagttcctgaaggaggctgggcatggcaccaccaaagaggagatcaccaaggatgccgagggactggatgagattgaccatgctgagatggagctgcgccgaggccagatcctctggttccggggcctgaaccgtatccagactcagatcgacgtaattaacacattccagacgggagcctcttttaagggagtcctaaggcgacagaacatgggtcaacaccttgatgtaaaacttgttcctagttcatcctatgtagcagttgcaccagtcaaatcttcccccaccacttctgttcctgctgtttcatctcctcctatgggcaatcaaagtggtcaaagcgttccatagttccctccacgaaagcattcagaaaccctacaaccaaaagtccatccacagcttcatgacccaccctgaattcgccatagaggaggagttgccacgaacaccactcctggatgaggaagaggaggaaaatcctgacaaggcttctaagtttgggactagggtgctcctgttggatggtgaggtcactccatatgccaatacaaacaacaatgcggtggattgcaaccaagtgcagctcccccagtcggacagctctctacagagcctagagacatcagtttgaattttctttctctgactctcatccctattttacctatttccattttcgtctatcccatctatgaggtgatgatgggacttttcattgtcacgtcagctgctgtgttaacagcagtgtgtgtgaagtgaacctctacctgaccatgaagaggcaagagcacagacttacaaggatttcaacttaagcttgacttggggtttgtagcgggacccagtcaaaccccattcaggtcatggtagaatctactccttggtagtcacttgtcatttttaaagaaatgatgacaatcctcttggcatcaccccaccccacattctccccgatgttcctctcctgaattctggattttgtcctacaagtctgtgccatttataagctaagttgagggttcagagggagacaaatatccccaagtgaaatatgttgcggtagagatggaatgtataaaatccgccagtagtgtgattgtttttcaatttttcccactttgaaaacttacacctaaaggcctgtaggcctctaactctttctgccctttcattcaaacctctccaaagttctttgtcttttgtcttcccttcctttccttttttttttttttttttatgatgattaagaaaatggaaaggatatggatgaattgtgtaaacttagatccttctcccttttggcccaaaagaacccttgatttagttccagaatccaaccagtttctttgttaaaagggtccttttgaagcaattaagtgctggtaagaatatttctctgttgttgccaggttaccttctgcttttaaattgccatcttgtaaagtgtatgtggttcttaagtgccagggagatcagccttgcccatgaaggttgcatatgtgtggtatacagtttttacctgaaagcctgagctttctcttattcctaaagtggtggcaaaagaatgaactgggtatgaccctgcccccttactgggcttggatattgaggaccagacgctgccaaatctaggacaagacagaccatcaaagcagacttttgtgggctcctctttggggtgaccactgctttcaaagccatctgccaaggctctccagggcaggacctgactggtggggaatgagtgttcagaagccttgggagaggccaaagagccattctagcatgatctgagaaaaccttcctgcagaggccagaaaccttgagcttaggtgcctggggaccagcttcgacattctctccagtttctgattctaatttttgccacgtgtcacaacttttccagtctctgagaaggtcccagcctttctcaaatattctgattttgaaaatatgtatccaaagtgggaggcccctgtgacattttgccaacttaaacgagaaaaagaccccccgcacccggcacactcccccttcctccagccccgcttcagccacatgctccagctgctgcccagtaaagccctgtgcctttttttcccctgaatactgcccaaagcatccccttcccatctgcctctcaggagttggggactttgctaggagattttttaagtgttccttactgggacaacgtggagccacgtttgcaggagctccatttgtatccctgctggtgttgacttctgtgtaggggccagttcatgtccctgactctcacctcccattagataaatgaagcccacccccctttctagagtgatgagagtcaagaagaggggatgtatgaacggccaaattcccatgtgagaggaagatgacctgatccacctagccttttcttctggatctgtcctccctcacccctttcacctgagctgtccacagtaggaaacataaagaaacaatgtcccctacatatccccatgactacataatccatcatcgtaggaaataggaaagcaaatttgattttggttttgtaaaacgtacatgcttcaataattcttttttgtgtcttaaatactcataggggaaaaaaacagctcacccaaggtgttaggtttcacatatatattcatcaactattttagaagatttaattctatcaaatcttgtattacctcagatcattttaaatagcaagccaataacgagctttgaaggctattttaccattcctgttcacaaaaggttctcatggtgcctgacaggttacccttgagggcttgtgtctactttttaaaagtcaatggttttttttcttgtgttctagtttccataataggagagaaaatatagaaatatatgcaaaaattatagttttctttagatcagaaactgatatttttgggtcagccatatgtattttgtttaaaggatttaaaataaagtgccgtcatgtagccctgtggaagggagcacataaccagctgtttggcatgacaggtgacttagtatatttgtaattggttttaaaaccaatacaccatactttctttctgcaaacagccatctttatacttagggaagaaaaattgttgggttctagacttttttaatataaattttgttgatatggaattaggtaagtttaagtgtctatgtgcatatgttttttatataagttttttctattcagtttcactgatccaactggcagtgggtaaatatggcataagttaataacacttttccccaaaatggtgctttggatttgaaaagggtctgatggggagaaggagaacgtatcatcctagcttcctctcttaataaacctagaaaaacgggtagtaaactgtggatagtcaggaaaacacccagcaagggacacagctgtcaggaaatgaatcttccccccaacccccaccatgcagatggatagacagaatctttcctgactagtcattaggatcaggggcctctgttggatttgtgtttcttgaagaatagctggcagagtggtataaaagacacgaatatctcctggtctataaggatactctgatttggggtttgcatttttcatggtttttatttcctgttccccctggagttttccattagtgagtttttgtgcaaggatcttatttgtgatgccttccctcccctagaaagattttgtgcaatatattaaatggggacagaattctaaatggataaaacaatggctggttctagccctgagtgacagtcttaaggctagatccttcccatagtatcatctgtcctctggaatgactctcctgtccctaaaggggttaagagagagatcacctagaaatccctctggacacttgtgggttctttagggtttgagtttcttcttccccttgagcttcagagaggagagttggcatggttaaatctgaatggttacctcactgctgaaaacccagaggggcgtggcacactcgcttgtgtggaaaagcctctaaatgcatcccttcctttctttcctgcttcctttgccttacaattgaagcagcccgtggtaccatcacagtatgcagagacttcctcacctttcatatctagggaccacccccgatgcattggtgagggtgggcacttataaatgcctgctattgttaagccattccagcctcttcctctgaatagaccagacgccctttcacttagttcagtgccagtccttttgccttcccaaccctgctgttaggcctgctgttccctttgctcttgattaggagagatggaaggagatgagctcccataactgaattggcctttggttcatgttttctccccatatgtatatatgccatatgtgaatatgccatatatatgtgccaacaaatctatctacgttgttcttttcaaattagcacgcagataggaattttgagtttcttcttcttttagtaactagtataacaagcactggtatttttgtacaaaaaagaaaaacaaaagattgactattgtggtctgcatgacataaacaaacaaatggtgatatcaaagcaacgtataccccagtccagtgtgtgttgccataatttgcaattcagcttaacagtgcacccaatctatatttgcattttgatattatttaagctctatgtacaaggttttgcatgtatttatatggttcttagggaaaaaaaatgctataaactgcaaatctgaaattcaaatgtgttgttccactgagaccagaagaagaagaggagttttaaaagggataatttgttggagccaataaagctttttgctgatgaacagaaaccaatactgctgtgcactgagaataaaaactcatgcccacttgtaaaaaa

SEQ ID NO: 1147 - DNA, 4119 bp, Homo sapiens
cgcggggagcggcggcggcggcggcggcggcggtggcggaggcggacacattggcgtgagacctgggagtacgttgtgccaaatcattgccacttgccacatgagtgtaaatgatggcggatgccaagtatgtcctctgccgatgggaaaagcgattatggcctgcgaaggttttggcccgaaccgcgacttcaacaaaaaataagagaagaaaggaatattttctagctgtgcaaatcctctctctagaggaaaaaattaaggtgaaaagcactgaagttgagatcctagagaagtctcaaattgaagccattgcttcctcgttagcctcacagaatgaggttcctgcggcacccctggaagaactggcctacagacggtcgcttcgcgtggctctggacgttctgagcgagggctcgatttggagtcaagaaagctctgcagggacaggtagagctgaccggtctctgcgagggaagcccatggagcatgtctcctcgccctgtgattcgaactcctcatctcttccccgcggagacgtgttgggcagttccagacctcacaggaggaggccatgtgtgcaacaaagcctgtcaagttcgttcacttgtgaaaaggaccccgagtgcaaagtggaccacaagaaggggctcaggaaaagtgaaaacccaagaggcccgttggtcctcccagctggaggtggtgcccaagatgagagtgggtccagaatccaccacaaaaattggactcttgcaagtaagaggggaggaaactcagcgcagaaggctagcttgtgcctgaatggatcttccctttcagaggacgacacggagagagacatggggagcaaaggaggcagctgggcagccccgtccttgccctccggggtcagggaggacgatccctgtgccaacgctgagggacacgaccccggtctgccgttgggcagcctcactgcgcccccagcccctgagccctcggcctgctcagagcctggagaatgccctgcgaaaaagaggccgcgcctggatggcagccaaaggccgcctgccgtgcagctggagcccatggcagcaggggccgcaccatcccccgggccggggccagggcccagagagtctgtgaccccgcgcagcaccgccaggctgggcccgcctccctcccacgcctctgcggatgcaaccagatgtcttccttgcccggattcccagaagctggagaaagagtgccagtcttccgaagagtccatggggtctaattccatgcgttctatcctggaggaagacgaggaagacgaggagccaccaagagtccttttataccacgaaccacgttcgtttgaagtaggaatgctagtctggcataaacataaaaaataccccttctggccagcagtggtcaaaagcgtcaggcagagagataagaaagcaagtgtgctatacatcgaaggacacatgaacccgaaaatgaaaggtttcacagtgtctcttaaaagtttaaagcactttgattgtaaagagaaacagacgcttctgaatcaagccagggaggacttcaaccaggacatcggctggtgtgtctccctcatcaccgactacagggtccggttaggctgcgggtcttttgctggctctttcctggaatattacgcggctgatataagctatcctgtccgaaaatccatccagcaggacgtcttggggaccaagcttcctcaactgagcaaggggagccccgaggagcccgtggtggggtgccccctggggcagaggcagccctgccggaaaatgctccccgaccgctcgcgggccgcccgggaccgggccaaccagaagctggtggagtacattgtgaaggccaagggcgcggagagccacctgcgggccatcctaaagagcaggaagccatctcgctggctgcagaccttcctgagctccagccagtacgtgacctgtgtggagacctacctggaggatgaggggcagctggacctggtggtgaagtacctgcagggcgtctaccaggaggtgggggccaaggtgctccagcgcaccaacggcgaccggatccggttcattctggacgtgcttctgcccgaggccatcatctgtgcgatctctgcggtggacgaggtggactacaagacggctgaggagaagtacatcaaggggccttcgctgagctaccgggaaaaagaaatatttgacaaccagctccttgaagagcggaaccggcgccgtcggtgagggagcagccggctgtgctgtcagcggggcctggcggtggaagcgcctccagtgtgcatgagcgtgtctgaagatggggggctcagggggcacgtttgcgtttggacctgtctgtgcgttctcctgcgtggcagtcctgatttccatgcttctggagaatccatttcgttaacactgaaagccagttctcttttcctggcagtttttttcattttatttttggcattttttacaagataccgttcgggaaaggcttttgaaaggacggaagcgtattcactgtgcgccagtactcctggctgtgctgtggtttctcccgacgtgcacatcgatctcgtatgtgtggcatctgatattaaacgggaggttttaagaagcgtctgccgtgatcatggagcttcggaagcgggaatggttcttccgggtttgctgttttgtctgtttcccccttgtgtggtttccgcctgcgacagttccagaatttgctctcccactcagtgtgctctgcagctgtgaggaaacagccttcgttagaggcgggagcagagacgagccgctgctctgtgtcgtgtttgctgtggccgcagggagaggagcaggacacgcacctttccaggggcctctgtgtcccgcactgtgtgtgagtggaccgcagcgcgcagccacatgccctggctgccatgggccagaccgcctccacctcccccgcccgcctggcctgtcctgagtgcatttccctgcactgtgtcgtcactgcacagccagtcaccgcggtctcagtcatcggcgcggatggctatgctggggtcccagggtggccgcagcagtcagggtcactgtgggagccctggggtggagtgacaaaccgcattgtcctgtgcccgccatggcagaagcgcagcctttgtatggaggcccaaccgcgctcccgtctggagaagcggcttccggggtgtggctgccgggtcggctctggtccacagcacggtgccggggctgcaggttgttgagggctgtgactccgtggggctcagccaggctccagcagggtcagacgtgctgttaagagcaaagccacagacgatgacttgtccattctcagtggatgctccaggctgtgcctacacagcagtgctggtgacatgtccagggttccagggcccggtggcctgggagctgctttctccccactggctgggctgcatctggccctggctggaggccttgctttgaggggctgtgaccctcttcccccaggccctccccagccgacgacagccaccggagaggagatcggaacacgattgtctcagatgcagggcgctgtgcgggacgaagccgcaaggactctcgtatcgggcccttgggactcgggaggtgccagaggcggcggctgctctggacctcggtgttcactgacctttgtttcacttgcctctgctcgactccgagagcaggaaacccggccgtggcctggcagctccgcctcccatgcccgcacgctggggtctgtcttgtctggagcagtggggcacaccccggaggaggcgggggtcagggctgtcggccttggccccctgctggtcgctgtttcggggactcggggcggccagtaccaccgcctgaggcggggctcagcagcgttgcatgtacgggcctcgtactgcctcatggaaaatcctccggagccgccctccattgtgggttcctgagagtaggacacattgccatggttttgtgggaatcacgcgcccctgatggaacttttctgctgttgtgaagtacttttatccatttgcttctctgctgaccttgccaagttgttcgaggtggaattaaacacctcccagacctcaaaaaaaaaaaaaaaaaa

SEQ ID NO: 1148 - DNA, 3291 bp, Homo sapiens
agaatcggagagccggtggcgtcgcaggtcgggaggacgagcaccgagtcgagggctcgctcgtctgggccgcccgagagtcttaatcgcgggcgcttgggccgccatcttagatggcgggagtaagaggaaaacgattgtgaggcgggaacggctttctgctgccttttttgggccccgaaaagggtcagctggccgggctttggggcgcgtgccctgaggcgcggagcgcgtttgctacgatgcgggggctgctcggggctccgtcccctgggctggggacgcgccgaatgtgaccgcctcccgctccctcacccgccgcggggaggaggagcgggcgagaagctgccgccgaacgacaggacgttggggcggcctggctccctcaggtttaagaattgtttaagctgcatcaatggagcacatacagggagcttggaagacgatcagcaatggttttggattcaaagatgccgtgtttgatggctccagctgcatctctcctacaatagttcagcagtttggctatcagcgccgggcatcagatgatggcaaactcacagatccttctaagacaagcaacactatccgtgttttcttgccgaacaagcaaagaacagtggtcaatgtgcgaaatggaatgagcttgcatgactgccttatgaaagcactcaaggtgaggggcctgcaaccagagtgctgtgcagtgttcagacttctccacgaacacaaaggtaaaaaagcacgcttagattggaatactgatgctgcgtctttgattggagaagaacttcaagtagatttcctggatcatgttcccctcacaacacacaactttgctcggaagacgttcctgaagcttgccttctgtgacatctgtcagaaattcctgctcaatggatttcgatgtcagacttgtggctacaaatttcatgagcactgtagcaccaaagtacctactatgtgtgtggactggagtaacatcagacaactcttattgtttccaaattccactattggtgatagtggagtcccagcactaccttctttgactatgcgtcgtatgcgagagtctgtttccaggatgcctgttagttctcagcacagatattctacacctcacgccttcacctttaacacctccagtccctcatctgaaggttccctctcccagaggcagaggtcgacatccacacctaatgtccacatggtcagcaccaccctgcctgtggacagcaggatgattgaggatgcaattcgaagtcacagcgaatcagcctcaccttcagccctgtccagtagccccaacaatctgagcccaacaggctggtcacagccgaaaacccccgtgccagcacaaagagagcgggcaccagtatctgggacccaggagaaaaacaaaattaggcctcgtggacagagagattcaagctattattgggaaatagaagccagtgaagtgatgctgtccactcggattgggtcaggctcttttggaactgtttataagggtaaatggcacggagatgttgcagtaaagatcctaaaggttgtcgacccaaccccagagcaattccaggccttcaggaatgaggtggctgttctgcgcaaaacacggcatgtgaacattctgcttttcatggggtacatgacaaaggacaacctggcaattgtgacccagtggtgcgagggcagcagcctctacaaacacctgcatgtccaggagaccaagtttcagatgttccagctaattgacattgcccggcagacggctcagggaatggactatttgcatgcaaagaacatcatccatagagacatgaaatccaacaatatatttctccatgaaggcttaacagtgaaaattggagattttggtttggcaacagtaaagtcacgctggagtggttctcagcaggttgaacaacctactggctctgtcctctggatggccccagaggtgatccgaatgcaggataacaacccattcagtttccagtcggatgtctactcctatggcatcgtattgtatgaactgatgacgggggagcttccttattctcacatcaacaaccgagatcagatcatcttcatggtgggccgaggatatgcctccccagatcttagtaagctatataagaactgccccaaagcaatgaagaggctggtagctgactgtgtgaagaaagtaaaggaagagaggcctctttttccccagatcctgtcttccattgagctgctccaacactctctaccgaagatcaaccggagcgcttccgagccatccttgcatcgggcagcccacactgaggatatcaatgcttgcacgctgaccacgtccccgaggctgcctgtcttctagttgactttgcacctgtcttcaggctgccaggggaggaggagaagccagcaggcaccacttttctgctccctttctccagaggcagaacacatgttttcagagaagctgctgctaaggaccttctagactgctcacagggccttaacttcatgttgccttcttttctatccctttgggccctgggagaaggaagccatttgcagtgctggtgtgtcctgctccctccccacattccccatgctcaaggcccagccttctgtagatgcgcaagtggatgttgatggtagtacaaaaagcaggggcccagccccagctgttggctacatgagtatttagaggaagtaaggtagcaggcagtccagccctgatgtggagacacatgggattttggaaatcagcttctggaggaatgcatgtcacaggcgggactttcttcagagagtggtgcagcgccagacattttgcacataaggcaccaaacagcccaggactgccgagactctggccgcccgaaggagcctgctttggtactatggaacttttcttaggggacacgtcctcctttcacagcttctaaggtgtccagtgcattgggatggttttccaggcaaggcactcggccaatccgcatctcagccctctcagggagcagtcttccatcatgctgaattttgtcttccaggagctgcccctatggggcggggccgcagggccagccttgtttctctaacaaacaaacaaacaaacagccttgtttctctagtcacatcatgtgtatacaaggaagccaggaatacaggttttcttgatgatttgggttttaattttgtttttattgcacctgacaaaatacagttatctgatggtccctcaattatgttattttaataaaataaattaaatttaggtgtaaaaaaaaaaaaaaaaaa

SEQ ID NO: 1149 - DNA, 6615 bp, Homo sapiens
ggaagggcctcttcctctgtgagaattcagcattttgcaaccatccaaaaatgttgagggcatgctttgcttccagggcagacagagcagcacagtgagcatgggacacaggatccctgacttgctgtgtgcccttaaaccagccactacctctctgacgttcaaaattgagcaatggaaggcagcctgcccaactgttacctgcctgtcatcatgaaagcctgcggatgagtgcagaatacagaaactgcagccatgaccacgcacgtcaccctggaagatgccctgtccaacgtggacctgcttgaagagcttcccctccccgaccagcagccatgcatcgagcctccaccttcctccatcatgtaccaggctaactttgacacaaactttgaggacaggaatgcatttgtcacgggcattgcaaggtacattgagcaggctacagtccactccagcatgaatgagatgctggaggaaggacatgagtatgcggtcatgctgtacacctggcgcagctgttcccgggccattccccaggtgaaatgcaacgagcagcccaaccgagtagagatctatgagaagacagtagaggtgctggagccggaggtcaccaagctcatgaagttcatgtattttcagcgcaaggccatcgagcggttctgcagcgaggtgaagcggctgtgccatgccgagcgcaggaaggactttgtctctgaggcctacctcctgacccttggcaagttcatcaacatgtttgctgtcctggatgagctaaagaacatgaagtgcagcgtcaagaatgaccactctgcctacaagagggcagcacagttcctgcggaagatggcagatccccagtctatccaggagtcgcagaacctttccatgttcctggccaaccacaacaggatcacccagtgtctccaccagcaacttgaagtgatcccaggctatgaggagctgctggctgacattgtcaacatctgtgtggattactacgagaacaagatgtacctgactcccagtgagaaacatatgctcctcaaggtgatgggctttggcctctacctaatggatggaaatgtcagtaacatttacaaactggatgccaagaagagaattaatcttagcaaaattgataaattctttaagcagctgcaggtggtgccccttttcggcgacatgcagatagagctggccagatacattaagaccagtgctcactatgaagagaacaagtccaagtggacgtgcacccagagcagcatcagcccccagtacaatatctgcgagcagatggttcagatccgggatgaccacatccgcttcatctccgagctcgctcgctacagcaacagtgaggtggtgacgggctcagggctggacagccagaagtcagacgaggagtatcgcgagctcttcgacctagccctgcggggtctgcagcttctatccaagtggagcgcccacgtcatggaggtgtactcttggaagctggttcatcccacagacaagttctgcaacaaggactgtcctggcaccgcggaggaatatgagagagccacacgctacaattacaccagtgaggaaaaatttgccttcgttgaggtgatcgccatgatcaaaggcctgcaggtgctcatgggcaggatggagagcgtcttcaaccaggccatcaggaacaccatctacgcggcattgcaggacttcgcccaggtgacgctgcgtgagcccctgcggcaggcggtacggaagaagaagaatgtcctcatcagcgtcctacaggcaattcgaaagaccatctgtgactgggagggagggcgagagccccctaatgacccatgcttgagaggggagaaggaccccaaaggtggatttgatatcaaggtgccccggcgtgctgtggggccatccagcacacagctgtacatggtgcggaccatgcttgaatcactcattgcagacaaaagcggctccaagaagaccctgaggagcagcctggatggacccattgtcctcgccatagaggactttcacaaacagtccttcttcttcacacatctgctcaacatcagtgaagccctgcagcagtgttgtgacctctcccagctctggttccgagaattcttcctggagttaaccatgggccgacgaatccagttccccatcgagatgtccatgccctggattctaacggaccatatcctggaaaccaaagaaccttccatgatggagtatgtcctctaccctctggatctgtacaacgacagcgcctactatgctctgaccaagtttaaaaagcagttcctgtacgatgagatagaagctgaggtgaacctgtgttttgatcagtttgtctacaagctggcagaccagatctttgcttactacaaagccatggctggcagtgtcctgttggataaacgttttcgagctgagtgtaagaattatggcgtcatcattccgtatccaccgtccaatcgctatgaaacactgctgaagcagagacacgtccagctgttgggtagatcaattgacttgaacagactcattacccagcgcatctctgccgccatgtataaatccttggaccaagctatcagccgctttgagagtgaggacctgacctccattgtggagctggagtggctgctggagattaaccggctcacgcatcggctgctctgtaagcatatgacgctggacagcttcgatgccatgttccgagaggccaatcacaatgtgtccgccccctatggccgtatcaccctgcatgtcttctgggaactgaactttgactttctccccaactactgctacaatgggtccactaaccgttttgtgcggactgccattcctttcacccaagaaccacaacgagacaaacctgccaacgtccagccttattacctctatggatccaagcctctcaacattgcctacagccacatctacagctcctacaggaatttcgtggggccacctcatttcaagactatctgcagactcctgggttatcagggcatcgctgtggtcatggaggaactgctaaagattgtgaagagcttgctccaaggaaccattctccagtatgtgaaaacactgatagaggtgatgcccaagatatgccgcttgccccgacatgagtatggctccccagggatcctggagttcttccaccaccagctgaaggacatcattgagtacgcagagctcaaaacagacgtgttccagagcctgagggaagtgggcaatgccatcctcttctgcctcctcatagagcaagctctgtctcaggaggaggtctgcgatttgctccatgccgcacccttccaaaacatcttgcctagagtctacatcaaagagggggagcgcctggaggtccggatgaaacgtctggaagccaagtatgccccgctccacctggtccctctgatcgagcggctggggacccctcagcaaatcgccattgctcgcgagggtgacctcctgaccaaggagcggctgtgctgtggcctgtccatgttcgaggtcatcctgacccgcattcggagctacctgcaggaccccatctggcggggcccaccgcccaccaatggcgtcatgcacgtcgatgagtgtgtggagttccaccggctgtggagcgccatgcagttcgtgtactgcatccctgtgggaaccaacgagttcacagctgagcagtgtttcggcgatggcttgaactgggctggttgctccatcattgtcctgctgggccagcagcgtcgctttgacctgttcgacttctgttaccacctgctaaaagtgcagaggcaggacgggaaggatgaaatcattaagaatgtgcccctgaagaagatggccgaccggatcaggaagtatcagatcttgaacaatgaggtttttgccatcctgaacaaatacatgaagtccgtggagacagacagttccactgtggagcatgtgcgctgcttccagccacccatccaccagtccttggccaccacttgctaagcagaagatcctgcagacccttatctggaggaggaagagaagcaggagagagaaagccacagccagcctgccataggatccaactggacaacgtgtgggatggacctggaaacaagcacctccccaaacacatcaccactccctagggcggggcctgtgcatgctctcccatgacatctccatgctggtttctccatagcataaatgaaaaaaaaaaaaaaaaagtaaacagggcagtgtgtgctttttcttttctcccccctcaactatattaagaactcctagtttcaccctttctccatcccatcatcccacctatctgtggttgcttcccaagacctcctcccaagatagacatctcctacccagtgcccttgtgtgaccccaggactcaagtctcagactgtgaacagatgtggccatgcccagagacgccagcctggccagaagggcatgcctcagcttactacttcatctctcctggttccctccctgcagtgccccgggtgtcatcttctcccactctgggtaccagggattctaccacataggcttcccaaagccccattctaactcccctctctcagggaagccctagagagaggtccaaaaagcattcacagctgtatcacactctatgcaggtggggtaggagactgatcaggcctgctgtggggaagcagtatgtatgaacacagccagaaatgtcatagtccaaacaggatgctttcaggccatctcagctgcttgatggtgagatggttcccttattccttcaggaaaggcttagcattgggccacataggggaagcagctttgaacaaatcagtcatagcactgcctatagcattagccagtgaccaaattagggacaacgtcttggcacagaattgcttatcaaggaacatttccacaagaaagaaaatattaaggggttatttccacagaagcccaaaacgtcttggaaacacagaggtgaggaggaggaatagtaattgtcaatgagcttttaataccaagatacaccccctgcccccaaagaagagtcctcttttagggaatcagaaccttcattgtcctagaagctgaaagattcttggaacattttagcttttactctcaacttgctgttctctttacattccttaagttagactttcgggtgtggcttctctcccaggggtaacatttacttccattttctagactgaaccaaaagtcttctgcagaatctcccaccgagtgtggtaagaaggaaggacaaaaggctttaggatataaatttcatgttacagagcatgtcattgtcaaaggaaatctgtggccctgagattttaagaacataaaatgtgacatttgatatttctccagcccagggaagtaagatggttagcaatggttgccttaatcaaatggtcccatttttaaccccaaaggaagtgcccacagcaagaggtttgtgtgatgcacttatgtcctccggtgaggaaagggggccacatatgaaaggccccttaggtcagatcctgagagtagcacatttgagtgcagattcctgggccccacctcaaacctactaattctgaatctctgggaatagggccaggaaatctgccctttctacaaactacccaagttgttctgttgcacatcaatgtttgggaaccactgctgtaagggaatcattctggtcaccttgagctttgagctaccactaagccatgaaagaaaatacatcatacagggaagagagaagggaggaggttccaagtagtaactggcagatcctcctgtctggaggtaccaccttctattctggtttctgacttttccttcttgatgaccatagatgtgttccagaggcaaaagagacacattatcccagatggcagaacatgctttcaaaacatataaaatgtcaaagttccagatccttctacatctttagtcctgtctgaggatggtagctggctctctgtagctgatagatggctagagttccatccaaatccttgaccacgacttcatggagatttgaataatctatttgatgagatttctatttcaataacccacctctctcaccccacattcatatccctaaatttgaccctctgggccgagtcacattaccttcaggagacttgatcccagtagactgaggtcttccctttcagcagaaagatttcatttccctggcttgccagtggcactgatttccgaacacccaatgagtttaatattctttcctccttggcattactgccccagcctctttttattttttttgtgtgtgtctaataaccaggaaaaaaataaagcttaggttttaaaaagttttaaaaataatctgtttcagaaactgtcaaatgtaccatatttgtattaagagttgttgggaatttttgtacaatgaatttacatttatttatggtgacatatttacgcttgtgatcaaataatgatgttaaattcttaaatcatatttgctatgcagctgaagatgatattttgatttgtattttgggggtacctgtgttgagttgataaacatttccatcttcattaaaactgcttccaaactagtaaaaccagcaa

SEQ ID NO: 1150 - DNA, 1651 bp, Homo sapiens
gagcctccaagtgtccacaccctgtgtgtcctctgtcctgccagcaccgagggctcatccatccacagagcagtgcagtgggaggagacgccatgacccccatcctcacggtcctgatctgtctcgggctgagcctggaccccaggacccacgtgcaggcagggcccctccccaagcccaccctctgggctgagccaggctctgtgatcacccaagggagtcctgtgaccctcaggtgtcaggggagcctggagacgcaggagtaccatctatatagagaaaagaaaacagcactctggattacacggatcccacaggagcttgtgaagaagggccagttccccatcctatccatcacctgggaacatgcagggcggtattgctgtatctatggcagccacactgcaggcctctcagagagcagtgaccccctggagctggtggtgacaggagcctacagcaaacccaccctctcagctctgcccagccctgtggtgacctcaggagggaatgtgaccatccagtgtgactcacaggtggcatttgatggcttcattctgtgtaaggaaggagaagatgaacacccacaatgcctgaactcccattcccatgcccgtgggtcatcccgggccatcttctccgtgggccccgtgagcccaagtcgcaggtggtcgtacaggtgctatggttatgactcgcgcgctccctatgtgtggtctctacccagtgatctcctggggctcctggtcccaggtgtttctaagaagccatcactctcagtgcagccgggtcctgtcgtggcccctggggagaagctgaccttccagtgtggctctgatgccggctacgacagatttgttctgtacaaggagtggggacgtgacttcctccagcgccctggccggcagccccaggctgggctctcccaggccaacttcaccctgggccctgtgagccgctcctacgggggccagtacacatgctccggtgcatacaacctctcctccgagtggtcggcccccagcgaccccctggacatcctgatcacaggacagatccgtgccagacccttcctctccgtgcggccgggccccacagtggcctcaggagagaacgtgaccctgctgtgtcagtcacagggagggatgcacactttccttttgaccaaggagggggcagctgattccccgctgcgtctaaaatcaaagcgccaatctcataagtaccaggctgaattccccatgagtcctgtgacctcggcccacgcggggacctacaggtgctacggctcactcagctccaacccctacctgctgactcaccccagtgaccccctggagctcgtggtctcaggagcagctgagaccctcagcccaccacaaaacaagtccgactccaaggctggtgagtgaggagatgcttgccgtgatgacgctgggcacagagggtcaggtcctgtcaagaggagctgggtgtcctgggtggacatttgaagaattatattcattccaacttgaagaattattcaacacctttaacaatgtatatgtgaagtactttattctttcatattttaaaaataaaagataattatccatgagaaaaaaaaaaaaaaaaaaaaaaaaaaaaaaaaaaaaaaaaaaaaaaaaaa

SEQ ID NO: 1151 - DNA, 3385 bp, Homo sapiens
cgccgccgcgggctcaagcggggcggccgggccagcgcggggcggcggcgggcaggggcggcgagtgcgcgggcgctcgccgccgcccttctcggcgggcagcgcgcgaggaccaggccgaggaggaagtggcggcggcggcggcgggactgcgcgccccagctccgatccccgttccgcgtccccgccgccgggaggaggtgcccactcgctcgcggcgcgcgccggccgccagactcggcctgtgggcgatttcctccggacccaggctccccgcccgaggaggaagatgcagacctttctgaaagggaagagagttggctactggctgagcgagaagaaaatcaagaagctgaatttccaggccttcgccgagctgtgcaggaagcgagggatggaggttgtgcagctgaaccttagccggccgatcgaggagcagggccccctggacgtcatcatccacaagctgactgacgtcatccttgaagccgaccagaatgatagccagtccctggagctggtgcacaggttccaggagtacatcgatgcccaccctgagaccatcgtcctggacccgctccctgccatcagaaccctgcttgaccgctccaagtcctatgagctcatccggaagattgaggcctacatggaagacgacaggatctgctcgccacccttcatggagctcacgagcctgtgcggggatgacaccatgcggctgctggagaagaacggcttgactttcccattcatttgcaaaaccagagtggctcatggcaccaactctcacgagatggctatcgtgttcaaccaggagggcctgaacgccatccagccaccctgcgtggtccagaatttcatcaaccacaacgccgtcctgtacaaggtgttcgtggttggcgagtcctacaccgtggtccagaggccctcactcaagaacttctccgcaggcacatcagaccgtgagtccatcttcttcaacagccacaacgtgtcaaagccggagtcgtcatcggtcctgacggagctggacaagatcgagggcgtgttcgagcggccgagcgacgaggtcatccgggagctctcccgggccctgcggcaggcactgggcgtgtcactcttcggcatcgacatcatcatcaacaaccagacagggcagcacgccgtcattgacatcaatgccttcccaggctacgagggcgtgagcgagttcttcacagacctcctgaaccacatcgccactgtcctgcagggccagagcacagccatggcagccacaggggacgtggccctgctgaggcacagcaagcttctggccgagccggcgggcggcctggtgggcgagcggacatgcagcgccagccccggctgctgcggcagcatgatgggccaggacgcgccctggaaggctgaggccgacgcgggcggcaccgccaagctgccgcaccagagactcggctgcaacgccggcgtgtcgcccagcttccagcagcattgtgtggcctccctggccaccaaggcctcctcccagtagccacggagccgggacccagaggggcagcgcagggcgcagagcacacccgctgggccagcagctcccaacggcgatgctactactaagaatccccagtgatctgattcttctgttttttaatttttaacctgattctctgatgtcatgatctaaatgaggggtagtgggggatggaagagagtaccaggtggtccaccgttggggagtggggccgtccgcctgctctctactgtgcagacctcctaactgagtttacacacgcttgtgtttgcaacactaggtctggatgggaggtgaggggtgtgcgtatggctgccatgccagtgtctgtgcacatccctgtctgttggtctccatggccactgtggaccgggacccttgggggaagcctgcccatgtcgggctgtgggaggctgatcggtgcatgtgagagtggcttcccttctgcctgactccccactccctgacctgccccttccttgtttttcctcctactggtctccaccaaggctttgttagcccccaccctgcctggtgtgcagctaacccctccctccccacagccagaggaggccacagacccctcaggggagttccgcgctggggtctgggctgtgctccctcactaaagggaaggaaaggaagctgggcgtcctctgggccccccaacacacgtcccatttagccctgcacagcggtctccttcccctaagccagcactgctgctccctggagcccgggaaggaggctgcctggctggaggcccgagccgatggcgcctgtgctgaggatttgtgctgtgatttgggcaaatcattccaggtctttgggcctccacccccttgtctctagtggacatttgagatcagagagcaccacagggctggctttgtgccctaacccctgggatgcagcctgcctttccataaagtcacctaggtgaggataggcgcgggagcctcggcatgacaccatggagatcggggccctcttcccagtgggttcactccttttcacacctgctgggtccctcctcacccagcaggcctggtccacctctcattgcaagccccaagcactgagccagcaggtgccagggagccacccgccccccatcgcttctgcacacctcagactcaccccatcaccttggcagcaaagcactggctctgccgtctgacccctgatccaggcagccccctctgcagagaaaagggttggggagaagcctctgcagtcctggaagatgtggggtgctgggtgagaggcatcagcccccacaagtatgtttttgtgtcttaagatagcagtttactttgaaaaagtgaaaaaggcttccgggctgtcctctgcccagtgagatggaggacgctagagaaagtgctgagtgtcccgagagaggcccccgagccagtgcatggaggtccttcggcctggctcagctgggctgcaggatgcccactttgaggagggaggcacagggcttgggcgaggggcagaggccatcagaactgcccggcttttttggaaactgaggacccaacaactaaccacgtttacacgacttgagttttgaaccccgattaatgtctgtacgtcacctttcctagttctgaccctgagccctggggaacaggaaagcgtggctggcctcttgcactgctttgtctccaaaataaactactgaaatcaaaccgcatttcacacgtgtttacacatgttgctcaagtttgttatgtcatactcccagtccttaaaagacgtttaataaaacagctttaccttttaaaaataaaatttcaatcccagtctgcctcaggtacgggtgggggtgtgcaaaaaaaaaaaaaa

SEQ ID NO: 1152 - DNA, 7014 bp, Homo sapiens
cggggaccgcgacgagcccgggtcgccgttggcagcagcagcagcaacaccagcagcagcagcagccccggcggcggcgcggaccccgagcgcccgggcgcaccccggcttcccggagcgcgacgcggcggcagcagccccggtgcggccgcgcgcgccttaggctcggccccgcggctcggggaccccgactcccggcccagcgagcgcgtcccccggcgccgcccgagagcccgaggaggcagcggccgcaggcagccggggaggggggcggccaccgcccgcgccgggcatcctcaggagccccagagcgcggagggcgcggcgccgccgagcggtgctggcccccgcgggcctccccggaccttccccaccgcctgggcccgagggacgcgtgatcgggcgggcggccgggcgcaagggtgggagggagccgcccccgcccgcgccccctccgcccctcgccccaacccctgggcgccgggcccgggccgcgcggcctgaagcgcccgcgatggcgagcccgccgcggcacgggccgcccgggccggcgagcggagacggccccaacctcaacaacaacaacaacaacaacaaccacagcgtgcgcaagtgcggctacctgcgcaagcagaagcatggccacaagcgcttcttcgtgctgcgcggacccggcgcgggcggcgacgaggcgacggcgggcggggggtcggcgccgcaaccgccgcggctcgagtactacgagagcgagaaaaagtggcggagcaaggcaggcgcgccgaaacgggtgatcgctctcgactgctgcctgaacatcaacaagcgcgccgacgccaagcacaagtacctgatcgccctctacaccaaggacgagtacttcgccgtggccgccgagaacgagcaggagcaggagggctggtaccgcgcgctcaccgacctggtcagcgagggccgcgcggccgccggagacgcgccccccgccgccgcgcccgccgcgtcctgcagcgcctccctgcccggcgccctgggcggctctgccggcgccgccggggccgaggacagctacgggctggtggctcccgccacggccgcctaccgtgaggtgtggcaggtgaacctgaagcccaagggtctgggccagagcaagaacctgacgggggtgtaccgtctgtgcctgtctgcgcgcaccatcggcttcgtgaagctcaactgcgagcagccgtcggtgacgctgcagctcatgaacatccgccgctgcggccactcggacagcttcttcttcatcgaggtgggccgctcggccgtcacaggccccggcgagctgtggatgcaggcggacgactcggtggtggcgcagaacatccacgagaccatcctggaggccatgaaggcgctcaaggagctcttcgagttccggccgcgcagtaagagccaatcgtcggggtcgtcggccacgcaccccatcagcgtccccggcgcgcgccgccaccaccacctggtcaacctgccccccagccagacgggcctggtgcgccgctcgcgcaccgacagcctggccgccaccccgccggcggccaagtgcagctcgtgccgggtgcgcaccgccagcgagggcgacggcggcgcggcggcgggagcggcggccgcgggcgccaggccggtgtcggtggctgggagccccctgagccccgggccggtgcgcgcgcccctgagccgctcgcacaccctgagcggcggctgcggcggccgcgggagcaaggtggcgctgctgccggcagggggcgcgctgcaacacagccgctccatgtccatgcccgtggcgcactcgccgcccgccgccaccagccccggctccctgtcgtccagcagcggccacggctcgggctcctacccgccgccgcccggcccgcacccgcctctgccgcatccgctgcaccacggccccggccagcggccctccagcggcagcgcctccgcctcgggctcccccagcgaccccggcttcatgtccctggacgagtacggctccagcccaggcgacctgcgcgccttctgcagccaccgaagcaacacgcccgagtccatcgcggagacgcccccggcccgagacggcggcggcggcggtgagttctacgggtacatgaccatggacaggcccctgagccactgtggccgctcctaccgccgggtctcgggggacgcggcccaggacctggaccgagggctgcgcaagaggacctactccctgaccacgccagcccggcagcggccggtgccccagccctcctctgcctcgctggatgaatacaccctgatgcgggccaccttctcgggcagcgcgggccgcctctgcccgtcctgccccgcgtcctctcccaaggtggcctaccacccctacccagaggactacggagacatcgagatcggctcccacaggagctccagcagcaacctgggggcagacgacggctacatgcccatgacgcccggcgcggccctcgcgggcagtgggagcggcagctgcaggagcgacgactacatgcccatgagccccgccagcgtgtccgcccccaagcagatcttgcagcccagggccgccgccgccgccgccgccgccgtgccttctgcggggcctgcggggccagcacccacctctgcggcgggcaggacattcccggcgagcgggggcggctacaaggccagctcgcccgccgagagctcccccgaggacagtgggtacatgcgcatgtggtgcggttccaagctgtccatggagcatgcagatggcaagctgctgcccaacggggactacctcaacgtgtcccccagcgacgcggtcaccacgggcaccccgcccgacttcttctccgcagccctgcaccccggcggggagccgctcaggggcgttcccggctgctgctacagctccttgccccgctcctacaaggccccctacacctgtggcggggacagcgaccagtacgtgctcatgagctcccccgtggggcgcatcctggaggaggagcgtctggagcctcaggccacgccagggcccagccaggcggccagcgccttcggggccggccccacgcagccccctcaccctgtagtgccttcgcccgtgcggcctagcggcggccgcccggagggcttcttgggccagcgcggccgggcggtgaggcccacgcgcctgtccctggaggggctgcccagcctgcccagcatgcacgagtacccactgccaccggagcccaagagccccggcgagtacatcaacatcgactttggcgagcccggggcccgcctgtcgccgcccgcgcctcccctgctggcgtcggcggcctcgtcctcctcgctcttgtccgccagcagcccggcctcgtcgctgggctcaggcaccccgggcaccagcagcgacagccggcagcggtctccgctctccgactacatgaacctcgacttcagctcccccaagtctcctaagccgggcgccccgagcggccaccccgtgggctccttggacggcctcctgtcccccgaggcctcctccccgtatccgccgttgcccccgcgtccgtccgcgtccccgtcgtcgtctctgcagccgccgccaccgccgccggccccgggggagctgtaccgcctgccccccgcctcggccgttgccaccgcccagggcccgggcgccgcctcatcgttgtcctcggacaccggggacaatggtgactacaccgagatggcttttggtgtggccgccaccccgccgcaacctatcgcggcccccccgaagccagaagctgcccgcgtggccagcccgacgtcgggcgtgaagaggctgagcctcatggagcaggtgtcgggagtcgaggccttcctgcaggccagccagcccccggacccccaccgcggcgccaaggtcatccgcgcagacccgcaggggggccgccgccgccacagttccgagaccttctcctccaccacgacggtcacccccgtgtccccgtccttcgcccacaaccccaagcgccacaactcggcctccgtggaaaatgtctctctcaggaaaagcagcgagggcggcgtgggtgtcggccctggagggggcgacgagccgcccacctccccacgacagttgcagccggcgccccctttggcaccgcagggccggccgtggaccccgggtcagcccgggggcttggtcggttgtcctgggagcggtggatcgcccatgcgcagagagacctctgccggcttccagaatggtctcaactacatcgccatcgacgtgagggaggagcccgggctgccaccccagccgcagccgccgccgccgccgcttcctcagccgggagacaagagctcctggggccggacccgaagcctcgggggtctcatcagcgctgtgggcgtcggcagcaccggcggcgggtgcggggggccgggtcccggtgccctgccccctgccaacacctacgccagcattgacttcttgtcccaccacttgaaggaggccaccatcgtgaaagagtgaagatctgtctggctttatcaccaggatgtcacatgtcagagagtatcattaaaagaagacgctcagcactgtttcagcccgaagctgcttgcagttttcttttggatctgagcaatgactgtgtttggaaacatctgtggactctgttagatgaggcaccaacaaggcaaggtcacctgcctctttcccttgttcccggatggggcattcatcattgtgctgtttgcgttttgttttgttttgttttaacaaaattagctgaagaagttattctcaagaaaattggatgttttcattggccttcttaaattgtggccagtgtcttttaatttcttcttcttttccttttggcaaagcagatataaccctcagcatgctaggagagtgcacccgtacctatggaagtggtaaaatctggtatttactggcttacactcaaaacgaccacagtcctacctcagttcaaggtaaagccggatttccgtggcgggggtcccacaggacctcctgtagtagcccctgcgctgtgtgtctggagcgcggtcctcggccttattgaaatggtccaagtagacagctgcttgttggattccagtgcaggtacctgcgatgtttacgtccacaccgagcccagtgtgggactgacatttctcaatggaagtgaaatttgggattggactttgaagacggattactaaataataattattatatgtaactgaagcaacctacttttgaaaatcaactgtattgggtagtgggaggtgggagggaagggctttgggaaggggatgaatatctctttttacctttaacagacttgtttaatcttctcgatgtagatgtttatgtaggtacttcacattgcaaacgccttttattctatttacaagctcagatgtctctgctctcctgaatcttgggcatgcctttctgtaaccaaaaatccctgtaggcgtgctagcaattccagggtggtccgggtttggcagatttgatttttaaaaaacgtattatctttaataaaatgttattatgtcaaccagtgaggctgccctgaacaaaaaaaacaaaaagaaaaaaaaaaaaggaaagaaagaaactgataaaaagaggcattccagcccctatgttattgatggaaaaagaaaaagaagaaaagcaatctcgcagtacatgttacttgtcgaaaaaattccggacaagactacccttgttttatgttttcagtattctgaaaataccagtgtgtggcagttctcgcagatgttacctaaaactgctgaacttgaccggcagaatgttctgccgttttctgctccctcgacacttgattggagggctgtcgacctctcctcccgtgggggcttccccagtgcctatcttctctgatagtcatggagaggttacactaattcattggagatgtaagttgttggttttgttttgttttgtttttagaaaaatatatataaatatataatagatatctatcgctatagaataatgcattaataaaatgaggcttttttagaggaagaccaaaaaattcaatgtcttaaaaatatatttaatggcaatgcaaaagtcttcctgcttccgtgctgaactttagaacagaggattgtattgcaagacaaagttgaatgtaaagtgatctccctgaacatttttaaggttttacttttctgaaattatacatcacagcagtgcataggccatataatgttagctggaaggtcaatttcagtgtatgatatactttattaagatgtataaaaatcctgaagtttttatttagttttgggaataggcatcaatgggtggtatttgctttgtaactccccccaggtacgatagggactgaatatggaccctgctgaaagcagtgtattgacgcatatttaactcgccctctatccgtagagtagtcatgacactatacagatggttcgtgttcatactgcagcttaaaacaagcaaaatacacagatgataatatgctaaattttcctctatcctgtacatttcacaaaaaggcatatgcaatatttacatttttaatttagtttacagaatggaaccaaaatgtataaatgttatgtttgctaaaacttcacaatgtatattgggtctttgtacattttgcctgacttaccttaaatttaaaatattttttgctatataaactttaacagttattaaacagtgttttctttttgggtacgtattgtttctggatatcaagatgttaaatatatttcttgctattgtgatatgacaagagacttaacttatcttgctctgtcttccactgtacacgctgtatataggggtcaatgtgatgctgctggagacgagaataaactggactagaatagtgcattgtatttagtctgtattgatcatggatgccctccttaatagccatatgcaataaaataaagtacattatttatgaaatgaaaaaaaaaaaaaaaaaa

SEQ ID NO: 1153 - DNA, 1509 bp, Homo sapiens
gggaggggcggggcctccgccaccacctcagctgcggaccgaggcgagatggcggccaccgagggggtcggggaggctgcgcaagggggcgagcccgggcagccggcgcaacccccgccccagccgcacccaccgccgccccagcagcagcacaaggaagagatggcggccgaggctggggaagccgtggcgtcccccatggacgacgggtttgtgagcctggactcgccctcctatgtcctgtacaggcatttccggagagttcttttgaagtcacttcagaaggatctacatgaggaaatgaactacatcactgcaataattgaggagcagcccaaaaactatcaagtttggcatcataggcgagtattagtggaatggctaagagatccatctcaggagcttgaatttattgctgatattcttaatcaggatgcaaagaattatcatgcctggcagcatcgacaatgggttattcaggaatttaaactttgggataatgagctgcagtatgtggaccaacttctgaaagaggatgtgagaaataactctgtctggaaccaaagatacttcgttatttctaacaccactggctacaatgatcgtgctgtattggagagagaagtccaatacactctggaaatgattaaactagtaccacataatgaaagtgcatggaactatttgaaagggattttgcaggatcgtggtctttccaaatatcctaatctgttaaatcaattacttgatttacaaccaagtcatagttccccctacctaattgcctttcttgtggatatctatgaagacatgctagaaaatcagtgtgacaataaggaagacattcttaataaagcattagagttatgtgaaatcctagctaaagaaaaggacactataagaaaggaatattggagatacattggaagatcccttcaaagcaaacacagcacagaaaatgactcaccaacaaatgtacagcaataacaccatccagaagaacttgatggaatgcttttattttttattaagggaccctgcaggagtttcacacgagagtggtccttccctttgcctgtggtgtaaaagtgcatcacacaggtattgctttttaacaagaactgatgctccttgggtgctgctgctactcagactagctctaagtaatgtgattcttctaaagcaaagtcattggatgggaggaggaagaaaaagtcccataaaggaacttttgtagtcttatcaacatataatctaatcccttagcatcagctcctccctcagtggtacatgcgtcaagatttgtagcagtaataactgcaggtcacttgtatgtaatggatgtgaggtagccgaagtttggttcagtaagcagggaatacagtcgttccatcagagctggtctgcacactcacattatcttgctatcactgtaaccaactaatgccaaaagaacggttttgtaataaaattatagctgtatctaaaaacaaaaaaaaaaaaaaaaaa

SEQ ID NO: 1154 - DNA, 2344 bp, Homo sapiens
agttttacttccgtttgtttaacagctggcccggaagtttaagtgaatatgcggcttgggctccaaaagttgctgtacggtattttattttaaagtagaaatctgtccgcttttcacttacggaggccttacagtgtgtgttctgtgttacttgagtttatacgcactgcagaatttgtttaccctgctcttttggaaacgtattccggaagcgaaaccctgagtaatcggaagtggttaggagtgagagagctgctggatatgcggagggactgggcgggtcggcttccgaatggaagaggtctgtgagaagttaacctggtgataccgatccgaagagcctatcaagtgaagccccctgaaatacggagaataagaatcttagaggttgttcagcagaagtcttggagtgcattttcagtggttaaggtgaaaaaatgactactaaaaatttagaaaccaaagtcaccgttacttcatccccaatccgaggagcaggagatggaatggaaactgaggaaccacctaaatctgttgaagttacctccggagtccaatctagaaagcatcatagtcttcagagtccatggaagaaagcagttccatcagagagcccaggagttcttcagctagggaaaatgctcactgaaaaagcaatggaagttaaagctgtaagaatattagttcccaaagctgctataactcatgatatccccaacaaaaatacaaaggttaagtctctgggacatcataaaggagaattccttggtcagtcagagggagttatagaacctaataaggaactctcagaggtaaagaatgtattggaaaagctcaagaattctgaaagaaggttactacaggacaaagaaggtctttcaaaccagctccgtgtacagacagaggtaaatcgtgagttaaaaaagttactggtggcttctgttggggatgatcttcagtatcactttgaacgtctagcccgtgagaaaaatcagcttattttagaaaatgaagccctaggtcgaaacacagctcagctttctgaacagttagaacgtatgtcaatacagtgtgatgtatggcgaagtaaattccttgcaagcagggtaatggcagatgagttaaccaactcaagagcagctttacagcgtcaaaaccgtgatgcacacggggctatacaagatctcctaagtgaacgggaacagtttcgtcaagaaatgatagctacccagaaattattggaggagctcttagtttccttgcaatggggaagagagcaaacttactcccctagtgtacaaccccacagcacagcagagctagcattaacaaatcacaagttggcaaaagcagtaaattctcatcttctgggaaatgttggcattaacaatcaaaaaaagattccatcaacagttgaattctgcagcaccccagctgagaaaatggctgaaacggttctaagaattttagatccagttacctgcaaagagagttcacctgataatccattttttgagtcttcaccaaccaccttacttgctacaaagaaaaatattggacgatttcatccctatactagatatgaaaatataactttcaattgctgcaatcactgccggggagaactgattgccctttaacagtcaatatgttggaggcatgctaagaataaacaactaaataactgtattagaaaaaaaagaaacttactaaatatcataatctgatgatatgtggtcctgaattggctactagtttaagcaaataaactgtaagtcatttatgggttagttggggaataaatggatatgggctggatattcggtaatatcattaatgaaaagcagattgcagaaatacagtatgatctcagtattttgaaattgtaaatacatgtacagacaaatacttagacagtatgcatactggtgttaacagtcacaatttctgggtgatgaaaatgtaacttgaaaccgctccatttctacaatgcacatttactgtttctgttataataaaagggtatgttagaaaaacaaaaaggaggctgggcatggtggctcatgcctctaatctcagcactttgggaggccaaggtgggcggatcacttgaggtctggagtttgagaccagcctgagcaacatggtgagaccccatctctacaaaaaaaatataaaaattagccaggtgtggtggtgcacacctgtggtcccagctacttgggaggctgaggtgggaaaatcacttgaacctgggagggtgaggttgcagtgagctgagatcatgccactgcactccagcctgggtgacaggaaaaaaaaaaaaaaaaaaaaaaaaaaaaaa

SEQ ID NO: 1155 - DNA, 2244 bp, Homo sapiens
gctgcatctgaggcggacgccgcagtgtagggcacaccctgagggtagcgagagacgtgacaggaccgagcagctgggggctgcagcctgctctgtccccaccgatcccagagagaggctgtgagtctggatctgggcgttcgcaccctgagagagggggtcaaagctcccctgcggccccgaggaagaagagcaaggttgaggacagcctcgggtcaccagagtagtttggaggcaggcctgcaggcgcgtccccgctcctcagctccaagctgacgtatctacacctgccggcgggcattaagatggctggttatgccactactcccagccccatgcagacccttcaggaggaagcggtgtgtgccatctgcttggattacttcaaggaccccgtgtccatcagctgtgggcacaacttctgccgagggtgtgtgacccagctgtggagtaaggaggacgaggaggaccagaacgaggaggaagatgaatgggaggaggaggaggacgaggaagcggtgggggccatggatggatgggacggctccattcgagaggtgttgtatcgggggaatgctgacgaagagttgttccaagaccaagatgacgatgaactctggctcggtgacagtggtataactaattgggacaacgtagactatatgtgggacgaggaggaagaagaagaagaggaagatcaggactattacctaggaggcttgagacctgacctgagaattgatgtctaccgagaagaagaaatactggaagcatacgatgaggacgaagatgaagagctgtatcctgacatccacccgcctccttccttgccccttccagggcagttcacctgcccccagtgccgaaagagctttacacgtcgcagctttcgtcccaacttgcagctggccaacatggtccagataattcgccagatgtgccccactccttatcggggaaaccggagtaatgatcagggcatgtgctttaaacaccaggaagccctgaaactcttctgtgaggtggacaaagaggccatctgtgtggtgtgccgagaatccaggagccacaaacagcacagcgtgctgcctttggaggaggtggtgcaggagtaccaggaaataaagttggaaacaactctggtgggaatacttcagatagagcaagaaagcattcacagcaaggcctataatcagtaagatgtgtgaaaagttgggtagccacaggaggtgttcattaaggatatgattccatttatatagctatttctattgcataaccaggacagttttattgttttgaggtcaatgttcttttaaaatttgattttctgtaagaagaggctttttggcccagaaagccttacttattttacatcttccagtttgtccatcccatgagttagagttcgtcttgactctgcaagctagaatcaaagaattatgaaagtaagatcatttagatttgaccaagggcaccattaaatggtgtcaggttttaggaagcagacgggtgtataaaaagaaaatgaacaaagatttcacttattggggatcaggcataactggatgcctggattgtcctgccacccagctgccaccaataaaatcattcatcactctgcaagagggaccagatgcttccatcatcagtactccttgtttttctgttatctcctttgaggtagctaaaaatggcagccaaaaaaaaatgttgaggcttttctcaagtatatactcatgttattttgcagaagatagggtcaacttcttcagttgagttatctgaaagtgttgggcagtgacaccatgccaaacactgttaaattcatgccattaaaaacagtggagtgttctgcaaagcccgattctctgcagctttaagactggacagtattgaaatattcacaggaatcttccaagccgtgaaagcttaatattaaacagcccttttaattgcaaaggagaaaaaaatggagacacttgtgaaaccttgcattctgagtgctgccacaaataaattaaggaattccagaatttcttcatctacttctgcagtcttaactctgaattaatgactgtatatatcaaacttcagatcttaaaaaacatcagctcgcaagaggctgaggcaggagaatgacatgaacctgggaggcggagcttgcagtaagccgagactgagccactgcactccagcctgggcaatagagcaagactccatctcaaaaaaaaaaaaaaaaaa

SEQ ID NO: 1156 - DNA, 4776 bp, Homo sapiens
cggccgcatccttgccgcccgccccggcccagccgcgtcccggagccgtcgggcatggagccgtggaagcagtgcgcgcagtggctcatccattgcaaggtgctgcccaccaaccaccgggtgacctgggactcggctcaggtgttcgaccttgcgcagaccctccgcgatggagtcctgctctgccagctgcttaacaacctccgggcgcactccatcaacctgaaggagatcaacctgaggccgcagatgtcccagtttctctgtttgaagaacataaggacatttctcacggcctgttgtgagacgtttggaatgaggaaaagtgaacttttcgaggcatttgacttgtttgatgttcgtgactttggaaaggttatagaaacattatcacgactttctcgaacacctatagcattggccacaggaatcaggcccttcccaacagaagaaagcattaatgatgaagacatctacaaaggccttcctgatttaatagatgaaacccttgtggaagatgaagaagatctctatgactgtgtttatggggaagatgaaggtggagaagtctatgaggacttaatgaaggcagaggaagcacatcagcccaaatgtccagaaaatgatatacgaagttgttgtctagcagaaattaagcagacagaagaaaaatatacagaaactttggagtcaatagaaaagtatttcatggcaccactaaaaagatttctgacagcagcagaatttgattcagtattcatcaacattcctgaacttgtaaaacttcatcggaacctaatgcaagagattcatgattccattgtaaataaaaatgaccagaacttgtaccaagtttttattaactacaaggaaagattggttatttacgggcagtactgcagtggagtggagtcagccatctctagtttagactacatttctaagacaaaagaagatgtcaaactgaaattagaggaatgttccaaaagagcaaataatgggaaatttactcttcgagacttgcttgtggttcctatgcaacgtgttttaaagtaccaccttctcctccaggaactggtcaaacataccactgatccgactgagaaggcaaatctgaaactggctcttgatgccatgaaggacttggcacaatatgtgaatgaagtgaaaagagataatgagacccttcgtgaaattaaacagtttcagctatctatagagaatttgaaccaaccagttttgctttttggacgacctcagggagatggtgaaattcgaataaccactctagacaagcataccaaacaagaaaggcatatcttcttatttgatttggcagtgatcgtatgtaagagaaaaggtgataactatgaaatgaaggaaataatagatcttcagcagtacaagatagccaataatcctacaaccgataaagaaaacaaaaagtggtcttatggcttctacctcatccatacccaaggacaaaatgggttagaattttattgcaaaacaaaagatttaaagaagaaatggctagaacagtttgaaatggctttgtctaacataagaccagactatgcagactccaatttccacgacttcaagatgcataccttcactcgagtcacatcctgcaaagtctgccagatgctcctgaggggaacattttatcaaggctatttatgttttaagtgtggagcgagagcacacaaagaatgtttgggaagagtagacaattgtggcagagttaattctggtgaacaagggacactcaaactaccagagaaacggaccaatggactgcgaagaactcctaaacaggtggatccaggtttaccaaagatgcaggtcattaggaactattctggaacaccacccccagctctgcatgaaggaccccctttacagctccaggccggggataccgttgaacttctgaaaggagatgcacacagtctgttttggcagggcagaaatttagcatctggagaggttggattttttccaagtgatgcagtcaagccttgcccatgtgtgcccaaaccagtagattattcttgccaaccctggtatgctggagcaatggaaagattgcaagcagagaccgaacttattaatagggtaaatagtacttaccttgtgaggcacaggaccaaagagtcaggagaatatgcaattagcattaagtacaataatgaagcaaagcacatcaagattttaacaagagatggcttttttcacattgcagaaaatagaaaatttaaaagtttaatggaacttgtggagtactacaagcatcattctctcaaggaagggttcagaaccttagatacaactctgcagtttccatacaaggagccagaacattcagctggacagaggggtaatagagcaggcaacagcttgttaagtccaaaagtgctgggcattgccatcgctcggtatgacttctgtgcaagagatatgagagagttgtccttgttgaaaggagatgtggtgaagatttacacaaagatgagtgcaaatggctggtggagaggagaagtaaatggcagggtgggctggtttccatccacatatgtggaagaggatgaataaattcaaatcccgtgttgcaccctgcaccaaaaatttcagagaagggataaatagaagcctgcacagcatcgtgaattaactgaagtgtttaaaaagctgcatttctggctgttcaacatcctccctccttagcccctcctaagtcttaatgctgagatttctaaagatgctggtactgacagattaatggcttgcctagagctgtgcaagaaacagcctgccagtctgtcattgtcagggaccagggcaaaaccaagagctgttcttcccagaagagccctgcaaacacattggttcgtgcttccctttacttcttctggtcagataccatgaatgccagtcatcagtaaatcttaatacacttttgctttattctcacatgccattcaccagattatttgatggtacaaagaagcagaagtgtaattttccttttcccagcatgacgaaaaattggagttctgccatttgagcagcttactggaaagatccagccttacttgtcttaaattgtccaacaaggtgactcattgcccggcaaacacttttaccctcagatgttactcatgatattataaaatatgaggccagtgctcaggtttgcatcataagtgagctatccctgaagggttttaattacttatttggtgtcctgattatatttgcaaacttctttataaaaggtgaaaaaagcacacaaaagagagggtgtcttcatattaaaccttcacaaccttcatgatttcataggattattttggaaatatagcacttgactttatgaaaggatctgggctaggtatattaagggtagttgccaataacctgaagaagctggcattgtttacagaaacagatcaagggctataatttatgtcattttatagcagcagtatctattaatacatgccttttcctcccatccacctcccccgcacacacacaaagatgacctgggacatgatttttttattcccacattttcttggagcacaaacaactttgttgaggattttggaaggaaagcacaactgggtcctttattcatttctgggacagaaagagggtcagtggacttttgtgggcctccagcttctctcagagtctccccctctgcagcccatcctgggagtgtattaactggagggaagatgggtcttgcagtacatttgttttgcccagccatcactcttttttgtgaggagcctaaatacattcttcctggggtccagagtccccattcaaggcagtcaagttaagacactaacttggccctttcctgatggaaatatttcctccatagcagaagttgtgttctgacaagactgagagagttacatgttgggaaaaaaaagaagcattaacttagtagaactgaaccaggagcattaagttctgaaattttgaatcatctctgaaatgaagcaggtgtagcctgccctctcatcaatccgtctgggtgccagaactcaaggttcagtggacacatccccctgttagagaccctcatgggctaggacttttcatctaggatagattcaagacctttacctcagaattatgtaaactgtgattgtgttttagaaaaattattatttgctaaaaccatttaagtctttgtatatgtgtaaatgatcacaaaaatgtattttataaaatgttctgtacaataaagttacacctcaaagtgtactcttggaatggattctttcctgtaaagtcttatctgcgactctgtctcgggaatgttttgtctgttgccgtcagccgaactttgttatggagggagcagcctcacacaagcagaaacactcctgtggatggtattgtagcatgtattgtttattttagtcaatagaccctctccttataaatggtgtttagtcttcctgttgcatttcatgggcctgggggtttcctagcagaggatattggagcccctttttgtgacattaccaattacatctttgtccacgtttaatactttgttttggaaaatttaaatgctgcagatttgtgtagagttctaataccaaagacagaagtaaatgttttccatatactttgtcttgcctgtatgcagccctcgtgtaatacggtgaattagagtggtatttcactttgtattattttgtaaatatgtcaatataataaatagtgactaaattgataaaaaaa

SEQ ID NO: 1157 - DNA, 2164 bp, Homo sapiens
agatgattccctgattctccagagagattacacacttcgtttgtggctaaggtgacccaatgaaagaagaaaatgaaagccataaagaaaagtcttacagaagaagaatacctgtacctggacttttctcaccaaacagaaggatgcatctttcctcttcatacatctgtaactttatttctgttatcttactgtgactgtaaaatctttaaaatttgcttagttgtcaccaaagaggtgagtagagatagttcactactaagagatgacctgatccaggatgttgaaatacagattatttcaaggcaggagctcccaccaatagtccaaaattgctgtttgcctgcagtagtagaacgatcagacaatttttgtagagcaggacttgctgttgtattgagacacataatccagaaatcctatgaagcagaccccttaaagaaggaacttttggaacttctgggctttaaaaagacttgcttgaaagcctgtgctgaagttagtcagtggaccaggctatgtgaactcaccatccctttggctattgagaattttctcagagaatcttctgaccagcccccaactatacctgtagaaatactacagctagagaaaaagcttagtgagcctgttagagtgcataatgatgataaactccgcaggcagaagctcaagcaacagaaggctgatggagttgggcctccccttactaagggaaaggcaaagagcaaggtccacacacaggaaacatctgaagggttggattcttcatccaagagtctggaactgaaagtggcattctcaaagctcacagtacaggaagaaccagctactaccaacagagagccttctcacatcagaaaagcaaaagcctccgaccttccacctctggagcatgtgtttgcagaagggctttacttcactctggcagatattgtgctcttgccctgtatccatcatttcttggtaattatcagcaggaaattttctgagaagctggtagaatttccattgctagcctcttggtaccagaggattcaggaagtgccaggagtaaaaacagcagcttctaagtgtgggatccaatttctccatttaccaaagttgttgacaacctcaactgaacagcatccaaacttatgtgaagtcccaggtgtagaagagcaaagcgatcctttatttataggaggaccaagaccaaccatggccaagttaatggaaaagggcattgaagtgatgttttctccccacccttgccctacttggactcttgattggaatgttctccctgcagcagtcagcccaaaggaaggtaaaatgtccagtgatcgagctttgaggaagcagcaacagttgaacaaccttgtctatgtggtaacaaatcaggccaaacctggtgacagaattgtggatttctgcagcggtgggggccatgttggaattgtccttgctcacatgctgccatcatgtcaggttacattaatagaaaacaaggaattatcattaattcgtgctaagaagagaagtgatgaactgggtttaagcaacatttggttcattcaagcaaatatggaatattttactgggatgtttaatattggagtagcattgcatgcttgtggagtggcaacagacatggtgattgagcactgtatcaaaacacgggcttccttcgtcacatgcccttgctgttatggtttcattcagaacacctcaaagttcaattttccaaaaagtgaacaattcaagaaaactttatcatacaaggaacacatgattctgtgcagatttgcagaccagacagctgtccagctcccaccccaacgaaggctcataggaaaacagtgcatgtgcttggtggatctggatcgagcaagagctgcagaagaatgtggatactccgttcaagtgatatccatggagccagagagctgctctcccaaaaataacatgattgtgggagtccccatttaaaatgagatattcacatttgatattttgccatccgtcttcacgttggatgcccagtggcattcaggaggttcttggcataactaggaaacagcattagccatcttgaacctattgtgctcaggaaggaaagcaacagggaaatcttggaagtaaaggctccctgcaaagcatcacaaaaaaaaaaaaaaaa

SEQ ID NO: 1158 - DNA, 1930 bp, Homo sapiens
gcggcccggcggacgtgggcaggagggctggaaaagccggcgctggagcgggaacgggagtagctgcctgggcgccaaaggccgcggcactcccacgcggaccccgaagtccgcaacccggggatgggcccgcggctgcgaggggatcttctctggatcaagcaatggtggtgaaaaatgtttcgcaagggcaaaaaacgacacagtagtagcagttcccaaagtagcgaaatcagtactaagagcaagtctgtggattctagccttgggggtctttcacgatccagcactgtggccagcctcgacacagattccaccaaaagctcaggacaaagcaacaataattcagatacctgtgcagaatttcgaataaaatatgttggtgccattgagaaactgaaactctccgagggaaaaggccttgaagggccattagacctgataaattatatagacgttgcccagcaagatggaaagttgccttttgttcctccggaggaagaatttattatgggagtttccaagtatggcataaaagtatcaacatcagatcaatatgatgttttgcacaggcatgctctctacttaataatccggatggtgtgttacgatgacggtctgggggcgggaaaaagcttactggctctgaagaccacagatgcaagcaatgaggaatacagcctgtgggtttatcagtgcaacagcctggaacaagcacaagccatttgcaaggttttatccaccgcttttgactctgtattaacatctgagaaaccctgaatcctgcaatcaagtagaagtcaacttcatctgaaagttcagctgttttcaaactgcaatgctgaaatgttatgcaaataatgaagttatcccttgctctagattttctgaagaaaatggattgtgtaaaatgctgatcatttgtttattaaaatgtgtcctattacacagtgagttaactctcaatgaagtcatctattttctgggctaaaaaacttcatttgtctttttcaacttctaataagcttaacctaagtgtcacagaagcctaggtgtcacagaggtccactcagtgacaaacacacactgaaggcctgaggaagacgagatgtcacagaggtccactcagtgacaaacacacactgaaggcctgaggaagactagatgtcacagaggtccactcagtgacaaacacacactgaaggcctgaggaagacgagatgtcacagaggtccactcagtgacaaacacacactgaaggcctgaggaagactagatgtcacagaggtccactcagtgacaaacacacactgaaggcctgaggaagacgagatgtcacagaggtccactcagtgacaaacacacactgaaggcctgaggaagacgagatgtcacagaggtccactcagtgacaaacacacactgaaggcctgaggaagactagatgtcacagaggtccactcagtgacaaacacacactgaaggcctgaggaagacgagatgtcacagaggtccactcagtgacaaacacacactgaaggcctgaggaagacgagatgtcacagaggtccactcagtgacacacactgaaggcctgaggaagactgaggacatgggctcagtggtggcttcccagtcatggtatcactggcatggacctctgtccggcagaggtgtggactggagaccaggattcatgctggtctggaacagtgacattgccaacttaagacacacaaagcagattttcagaagtgtctggtcaagataacatgctggccaaccacaattcctagagttaagagaaccttaaaagattaccgctcatgctaaaagtatgtaaagatcccatgtacagtatgatagtgtactttttttaaaggactgtcaatatacaaaactttaaagattaaaaacattaaaaataaaa

SEQ ID NO: 1159 - DNA, 855 bp, Homo sapiens
cctttcctttcagcggagcgcggcggcaagatggcagtgcaaatatccaagaagaggaagtttgtcgctgatggcatcttcaaagctgaactgaatgagtttcttactcgggagctggctgaagatggctactctggagttgaggtgcgagttacaccaaccaggacagaaatcattatcttagccaccagaacacagaatgttcttggtgagaagggccggcggattcgggaactgactgctgtagttcagaagaggtttggctttccagagggcagtgtagagctttatgctgaaaaggtggccactagaggtctgtgtgccattgcccaggcagagtctctgcgttacaaactcctaggagggcttgctgtgcggagggcctgctatggtgtgctgcggttcatcatggagagtggggccaaaggctgcgaggttgtggtgtctgggaaactccgaggacagagggctaaatccatgaagtttgtggatggcctgatgatccacagcggagaccctgttaactactacgttgacactgctgtgcgccacgtgttgctcagacagggtgtgctgggcatcaaggtgaagatcatgctgccctgggacccaactggtaagattggccctaagaagcccctgcctgaccacgtgagcattgtggaacccaaagatgagatactgcccaccacccccatctcagaacagaagggtgggaagccagagccgcctgccatgccccagccagtccccacagcataacagggtctccttggcagctgtattctggagtctggatgttgctctctaaagacctttaataaaattttgtacaaagacaaaaaaaaaaaaaaa

SEQ ID NO: 1160 - DNA, 2727 bp, Homo sapiens
gttgctagagataccgcctggaggccactgatctgtaaaagggatctctacagaagatagggatttttgatcgccagagaagaagggatatgtgagatccaaacgccgaaggaggaaagcaggctccgtggtctcttccagccctgatggaagaaactaccgagccttattatactaggtgctttccacatgcctattcatttaatcctccagcaaccttgtaagaagggccatcccattttatatttaaacaaaccttaactactgacgcaaggagtcaaggatctaatcccaaagcctctgcctggttcgctgcagatggatgtccgcgaggacgccagccctccgcctcccgccgggtccctgaacgccggcccggccggtccaacctcattccgcttcccgccatcgaaacgcgaagcccccgccttcccccaaacgtctcagcgccgctggggcctttctggctgcgccgcctccgaccccaggccccggtccgcgcccgccgctcgctagtcctgggagtgaggagaacgcgtgctgaggacccggccagagggacagcggggaccgccctcccgctgcgtctctgaaagcgaggccgttcctcccgcgtccgacccccgcggggccgtcaggttcggggcggcccaggctgcgggtccgcagggcgcttcgggccgagccggcgcggcgcgtgaagggcaggggacgccccgaaagaccgctggggtgggaccccaagctccaggggtctttggaaataagaatgcggcgtgacgttggctgtgcgggcgcggggctgacgcggaccctataacccatcgccgaaaccgggcggccgcgcccctattcctcggcatttctctctgtccgcggccctgctcagccaatcagcgagtgggctcctaggcaggtcctgagtgacagcgcggcgggctggatcaggagatgcgcgtgcgcggcccggcccggctgatcgcttcgggtgctcgactcctgttgcgcatgctcagcgcgctgcccggctggggacccgcgcacctgcagcgcccgctgctcggccctgcatcctgcctgggcatcctgcgcccggccatgacggcgcactcattcgccctcccggtcatcatcttcaccacgttctggggcctcgtcggcatcgccgggccctggttcgtgccgaagggacccaaccgcggagtgatcatcaccatgctggtcgccaccgccgtctgctgttacctcttctggctcatcgccatcctggcgcagctgaaccccctgttcgggccccagctgaagaatgagaccatctggtacgtgcgcttcctgtgggagtgacccgccgcccccgacccaggtgcccagctctcggaatgactgtggctccactgtccctgacaaccccttcgtccggaccctcccccacacaactatgtctggtcaccagctccctcctgctggcacccagagacccggacccgcagggcctgcctggttcctggaagtcttcccagtcttcccagccagcccgggccctggggagccctgggcacagcagcggccgaggggatgtcctgctccaatacccgcactgctctggagtttgccctctttcccaaggagatgctgctggggagctggtatgggtggggtctttccctttacagacggggcagatgccaggactcagcccatcctgaggaggacacgtgtcctcatggagagggtgctccggcccaggcgggggagtcagtgcccagtcagcagctctgccaccatcctgctgggaactgggggggcctctattgggttataggcaaggccttttctctggcatggaattgttaattttctgacacgtctagatgtgaaatttctgaaaatgttgaagcagagaaacattcacacacaaaaagcaacatagtcatgtgggtccagatggcctcagtcctagatgttggcaccctttgctgtgtctcctcagagtatcctgttccgcctcctgccacctggacctccctcagtggatgtcttccctcccccgaccccagcctgtcagtccgagcacagtgcaggtttggctctgacttgggcttttggctgcagtgggggtggatttcagagcctctcatggcagcatctaagtgaccagagctgggatgagagaggggaaggggcaatgtgagtggcgctatgggacgggccagccctgctcctgagccagccccgccctctgccccctggccctgggctctgtgctagggatggtgaagaatgggggcgtgccagcctggcaggagtgggaagcaacacgcaggggtcccggacctctccagccttgccctcacgcttacccgagctcccagtgtggttagcacagagctcacccaccttgcctggctcccagctggggcctgtcctcactggtgctccaggggaagaaacgacagcctcacttctgtatggactgctgatgtggcctgccatcctgttcagcgggcattgtctttggagcagcaggagaataggatgcctctcactcacatgccagttcctggctggccagctgctcagggctcaggctggggcctcccattgacatcctccccctacactccctctctgagcctccgtcgcccctcctgttgggtaagggtgttgagtgtgacttgtgctgaaaacctggttcatatataataaataatggtgatgaaaagatta

SEQ ID NO: 1161 - DNA, 2518 bp, Homo sapiens
agttaggtcatgaggctttggccttgacaccaagggatgctgtctccttgccggaagcagctcaccaaagccggcagagaacccaggttccgtggggccacgatgtggggctccgcgggcgccccggcgctggccgacttcctgtctcctgggtcagatgctgctccgcactgcagctatggtcgcatgcagtgcctgccgaagcccgcagcaggaatgctgccttcggtgattttaatttcacttttctacttctctcaataacaaaatccgcgtttcaaactccagggaaaagaaaacggaattggctccaggaggatctgcaatcaccaccgggaactttgggaggctgggaagatggagccaaaccaatgtgtggggtggaggtgcggatctggggcggccggcctctcctacaggtctcaggtccgcaggcctggcgtgccagcacctgccacgggactggaagcccattccttgacaacgcctaaggggatcccgttgctagggctgttgccaaggcggggcaacgaggaggggctcgcttccgggaggacggcaattggcaacccggaagcggtcggtagtgcggcgctgtttaaagatggcggcggaggaacctcagcagcagaagcaggagccgctgggcagcgactccgaaggtgttaactgtctggcctatgatgaagccatcatggctcagcaggaccgaattcagcaagagattgctgtgcagaaccctctggtgtcagagcggctggagctctcggtcctatacaaggagtatgctgaagatgacaacatctatcaacagaagatcaaggacctccacaaaaagtactcgtacatccgcaagaccaggcctgacggcaactgtttctatcgggctttcggattctcccacttggaggcactgctggatgacagcaaggagttgcagcggtgagaagggtgggcactgggcaccgaggcaggtgggtgtctacctcctccccgggcgagtaggatgtgtctcgagtagggtgtctccctccttcccgggcgatgggctggactctggccttgccaggcggggcagtgctgtctcggccctggcgtctgggctggtcgaggagcccatgctgggcccgcctttccatcccacccccaggttcaaggctgtgtctgccaagagcaaggaagacctggtgtcccagggcttcactgaattcacaattgaggatttccacaacacgttcatggacctgattgagcaggtggagaagcagacctctgtcgccgacctgctggcctccttcaatgaccagagcacctccgactaccttgtggtctacctgcggctgctcacctcgggctacctgcagcgcgagagcaagttcttcgagcacttcatcgagggtggacggactgtcaaggagttctgccagcaggaggtggagcccatgtgcaaggagagcgaccacatccacatcattgcgctggcccaggccctcagcgtgtccatccaggtggagtacatggaccgcggcgagggcggcaccaccaatccgcacatcttccctgagggctccgagcccaaggtctaccttctctaccggcctggacactacgatatcctctacaaatagggctggctccagcccgctgctgccctgctgcccccctctgccaggcgctagacatgtacagaggtttttctgtggttgtaaatggtcctatttcacccccttcttcctgtcacatgacccccccccatgttttattaaagggggtgctggtggtgagccgtgtgtgcgtgtccctgctctgctgcccgcctggctgctctgtctgctgccccctccccccaggtgggtccccctgcttttcacctatctactcctgagcttccccaacaggagcaggtttgaggggccaggcctcttggaggcccctcctgcttcgttgggttctgcttccttcccttcttagctggctcaggggcttctatgggatcctggaagttccttagggacttgcccagggtcccagggccacccacacttcatctgctccctcataggccccacctccacgtcccggctgggccccagaccccagcttcctgccctccaccgggagtctgcatggttgggagtcctgggtggaggggcctttgtgaggctggacccggctcagggcaggtggaggagctgggcctcccacagggtgcccgggcagtgccatcctggtgggggagggcagccttcaaacgtgtggggtctacagtcctcaggtctaggcagggctgccggttctccacctccccatccgccccaggccccctgcctgtgcctgccttgcaccccctctgcttgggccacggtgtctctgcattgcctgcctttttgccttcacctcttttcttccccgccccctgcacattcggggtctcagcccccaggctgtgagctccttgggggcaggccctcaataaatgtgaactgctgctgccgcctctgcaaaaaaaaaaaaaaaa

SEQ ID NO: 1162 - DNA, 1684 bp, Homo sapiens
cgggcgcgcggggagggggcgcaggaagcgggcgaggccgggcgcgggaggcggcggcggccccgggagctgccgatcggcgccgggacaaaggcgcggccgcccggcgcccccagcagcccgagccggggcgcacagccggggcgcagcccgcgccccccgccgcgattgacatgatgtttccacaaagcaggcattcgggctcctcgcacctaccccagcaactcaaattcaccacctcggactcctgcgaccgcatcaaagacgaatttcagctactgcaagctcagtaccacagcctcaagctcgaatgtgacaagttggccagtgagaagtcagagatgcagcgtcactatgtgatgtactacgagatgtcctacggcttgaacatcgagatgcacaaacaggctgagatcgtcaaaaggctgaacgggatttgtgcccaggtcctgccctacctctcccaagagcaccagcagcaggtcttgggagccattgagagggccaagcaggtcaccgctcccgagctgaactctatcatccgacagctccaagcccaccagctgtcccagctgcaggccctggccctgcccttgaccccactacccgtggggctgcagccgccttcgctgccggcggtcagcgcaggcaccggcctcctctcgctgtccgcgctgggttcccaggcccacctctccaaggaagacaagaacgggcacgatggtgacacccaccaggaggatgatggcgagaagtcggattagcagggggccgggacagggaggttgggaggggggacagaggggagacagaggcacggagagaaaggaatgtttagcacaagacacagcggagctcgggattggctaaactcccatagtatttatggtggccgccggcgggggccccagcccagcttgcaggccacctctagctttcttcctaccccattcccggcttccctcctcctcccctgcagcctggttaggtggatacctgccctgacatgtgaggcaagctaaggcctggagggtcagatgggagaccaggtcccaagggagcaagacctcgcgaagcgcagcagccccggcccttcccccgttttgaacatgtgtaaccgacagtctgcctgggccacagccctctcaccctggtactgcatgcacgcaatgctagctgcccctttcccgtcctgggcaccccgagtctcccccgaccccgggtcccaggtatgctcccacctccacctgccccactcaccacctctgctagttccagacacctccacgcccacctggtcctctcccatcgcccacaaaagggggggcacgagggacgagcttagctgagctgggaggagcagggtgagggtgggcgacccaggattccccctccccttcccaaataaagatgagggtactaaagttgtcttggtttttattttattattatttttttctttttccagtatactagcttgtcttttaagaaaggggatattaaaaaaaaaaaaagacaaaagtgtttttaaaaaaaagcaacacccacacctgtgtctgtatatagtcagcttatctcgtgttcaatcgtctgatctctacagagagaagtggaaaatgctgtatcaagggtgggcttagctgtgcctttccaataaagatgtgagaagcttcaaaaaaaaaaa

SEQ ID NO: 1163 - DNA, 4782 bp, Homo sapiens
ttgggggatgccgacgcctgggccttgaggatgctgcggaagctcaccatcgagcagatcaacgactggttcaccatcggcaagacggtgaccaatgtggagctgctgggcgcgccgcccgccttcccggcaggggcggccagggaggaggtgcagcgccaggacgtggcccccggcgctggtcccgcggcccaggctccggctctggcccaagctccggcccggccggccgctgcgttcgaaaggtcactcagccaaaggagctcagaagtagagtatattaacaaatacagacagctcgaagcacaagagcttgatgtgtgtcgcagtgtccaaccaaccagtgggccaggtccaaggccatctttggctaaattaagcagtgtgacgtgcatcccagggacaacttataaatatcctgatttgcctataagtcgatacaaggaagaggttgtgtctttgatagaaagtaattccgtggtgattatccatggggccacgggaagcggtaaaagcactcagctcccgcagtatatcttggaccactacgttcagcgctccgcctactgcagcattgtggtcacccagccccggaagataggggcaagcagcatcgccaggtggatcagtaaagagcgtgcctggaccctgggaggtgtggtgggctaccaggtagggctagagaaaatagcaacagaggacaccaggctaatttatatgacaactggagtcctgcttcagaaaatagttagtgccaagagtttgatggaattcacacatatcatcattgatgaagtacacgaacgaacagaagaaatggatttcctgctattggtagtccgcaaactcttaagaacaaattcacgttttgtgaaggtggtcctgatgtcggctaccatcagctgtaaagagtttgcagactactttgctgttcctgttcaaaacaagatgaatcctgcatatatttttgaagtggaaggcaagccccattcagttgaagagtattatcttaatgatttggagcacattcatcatagcaagctctctcctcatctcctggaggaaccggtgataactaaggatatatatgaagttgctgtctctctcattcagatgtttgatgacttggatatgaaggagagtgggaacaaggcttggtcgggggcccagtttgtgttggagcgaagcagtgtgttggtgtttttgccaggtctgggtgaaataaattatatgcatgaacttctcacaagcctggttcataaaaggttgcaggtctatccactccattcaagtgtggctttagaagaacagaataatgtctttttaagtccagtccctgggtacagaaagattattctgtccaccaatattgcagagagttctgtcacagttccagatgtcaaatatgttatagatttttgtttgactagaactttggtctgtgatgaagatacaaattatcagagtctgcgattgagttgggcttctaaaaccagctgtaatcagagaaaaggccgtgctggacgagtgtctagagggtactgttaccggctggtacacaaggatttctgggacaactccatccctgatcatgttgttcctgagatgttgcgttgtccattaggaagcacgatcttgaaagtgaaattacttgacatgggtgagccgagagctctgctggccactgccctttccccgcctggtctgagtgacattgagcgcaccatccttctactaaaggaggttggagcacttgcagtgagtgggcagagagaagatgaaaacccccatgatggtgaattgaccttcttaggaagagttttagcccaacttcctgtaaatcagcaacttggtaaactcatagtccttggacatgtatttggatgtctagatgaatgtcttattatagcggcagctctttctttgaagaatttttttgcaatgcctttccggcagcatctcgatggatataggaacaaagtgaatttctctggcagtagcaagagtgactgtattgcacttgttgaggcatttaaaacatggaaggcttgcagacagacaggggagctgcggtacccgaaggatgaacttaattggggacggttaaattacattcaaatcaagagaattagagaggtggctgaattatatgaagaattgaagactagaatctcacagttcaacatgcatgttgattctcggcgacctgtcatggaccaagagtatatatataagcagcgattcatcctacaggttgtattggcaggtgctttctatccaaattactttacttttggacagccggatgaggagatggcggtgagggagctggctggcaaggaccccaagacaactgtcgtgttgaaacacattcctccctatggatttctttactataaacaactacagtctctctttagacagtgtggtcaagtcaaatccattgtatttgatggtgcaaaagcctttgtggaattctcacgaaatccaacagagagatttaaaacccttcctgcagtatatatggcaattaagatgtctcaactaaaagtttcacttgaactcagcgttcattctgcagaggaaattgaagggaaggtgcaaggcatgaacgtctcaaagctcaggaacacaagggtgaatgtggacttccagaagcagacggtagatcctatgcaagtctcctttaacacatcagacaggtcccagacagttacagatctccttctaactattgatgtcacagaggtggttgaagtgggacacttttggggatacaggattgatgaaaacaactcagagattctgaaaaagcttactgctgaaatcaaccaactgacgctggtgcccttgcccactcacccacatccagacttggtctgtctggcaccttttgctgattttgataaacaacgctactttagagctcaagtcctttatgtttctggaaattctgctgaggtattctttgtagattatggcaataagtctcatgtagatctacatcttttgatggagattccctgtcaatttcttgaacttcctttccaggctttggaatttaagatttgcaaaatgagaccatcagcaaagtctcttgtttgtggcaagcactggagtgacggggccagccagtggttcgcctctctggtgagcggctgcaccctccttgtgaaggtcttctctgtggtgcacagcgtcctgcacgtggatgtgtaccagtactcaggggtccaggatgccatcaacataagagacgtcctcatccagcagggctatgccgagctcacggaggagtcctacgagtccaagcaaagccatgaagttctcaagggcctcttttccaagtcagtagaaaacatgacagatggctctgtgccctttcccatgaaagacgacgagaaatatctcatccggattttgttagagagcttttctaccaataaactgggtactccaaactgtaaggcagaacttcacgggccttttaacccttatgaactaaagtgccatagtttgaccagaatatccaaattcaggtgtgtttggattgagaaggagagcatcaactctgtcattatcagtgacgcccctgaagaccttcaccagagaatgctggttgcagcttccctttccatcaatgcgactggatctacgatgctgctgagagaaacctctctgatgcctcatatccctggcctcccggctctcctcagcatgttattcgcaccggtgatagagttaaggattgatcagaatggcaagtactatactggagtcctttgtggtttggggtggaatccagctacaggggcttccatactgcccgagcacgacatggagcttgcgtttgacgttcaattcagcgtggaggatgtcgtcgaggttaatattctcagggctgctattaacaagctagtctgtgatggaccaaatggatgcaagtgtcttgggccagagagagttgcgcagcttcaagacattgcccgtcagaagcttttaggtttgttctgtcagtcaaaaccaagggagaagattgttcccaagtggcatgaaaagccctacgagtggaatcaggttgatccaaagctggtcatggagcaggccgaccgtgagagcagcagagggaagaacacctttctctaccagctccacaaactggttgtgctcggcacctgagcatgtccacaggtggcctccagcacacccctcaggaagctgtggaggctggattccaggctccctccgcagactgactttcctctgtgtctgggtgttacagtctgtgcccactgcatcctaaaggccttttctttcttcttttctctttgggtgatagtcagagagtggtgtttttgttcaggtgggaaggattggaaactctagtcttttctagaaacagaaaatcactgtattaaatattttggaaagattgttctgaaagaagtctgtttggataaagagctgtattttgctttaaatttattaaggtaaatataagtagttaatcttagatgtaaggttccagaatgtgcttacatattctgttctgttacagtgatttaaaccagtagtataggaaaaaacttaaaaaacaaaaaaaccatgtagtattttctgatttttttttccatgagggaaaatatctaatttttataagactaagttgagttatacttcttggttcacattttggaaatcagagattacagattacatggccatagcttatctgtgttaaaacaataaaagcattaaatgaaaaaaaaaaaaaaaaaaaaa

SEQ ID NO: 1164 - DNA, 1116 bp, Homo sapiens
aagcgaccgagggactgggagtcgttagtgagagtttcactcttgttgcctaggctggagtgcaatggtgcgatcttggctcatcacgaccttcgcctcccaggttcaagtgattgtcccatttcagcctcccgagtagctgggattacaggatgacgcggcatggcaagaactgcaccgcaggggccgtctacacctaccacgagaagaagaaggacacagcggcctcgggctatgggacccagaacattcgactgagccgggatgccgtgaaggacttcgactgctgttgtctctccctgcagccttgccacgatcctgttgtcaccccagatggctacctgtatgagcgtgaggccatcctggagtacattctgcaccagaagaaggagattgcccggcagatgaaggcctacgagaagcagcggggcacccggcgcgaggagcagaaggagcttcagcgggcggcctcgcaggaccatgtgcggggcttcctggagaaggagtcggctatcgtgagccggcccctcaaccctttcacagccaaggccctctcgggcaccagcccagatgatgtccaacctgggcccagtgtgggtcctccaagtaaggacaaggacaaagtgctgcccagcttctggatcccgtcgctgacgcccgaagccaaggccaccaagctggagaagccgtcccgcacggtgacctgccccatgtcagggaagcccctgcgcatgtcggacctgacgcccgtgcacttcacaccgctagacagctccgtggaccgcgtggggctcatcacccgcagcgagcgctacgtgtgtgccgtgacccgcgacagcctgagcaacgccaccccctgcgctgtgctgcggccctctggggctgtggtcaccctcgaatgcgtggagaagctgattcggaaggacatggtggaccctgtgactggagacaaactcacagaccgcgacatcatcgtgctgcagcggggcggtaccggcttcgcgggctccggagtgaagctgcaagcggagaaatcacggccggtgatgcaggcctgagtgtgtgcgggagaccaaataaaccggcttgggtgcgcaaaaaaaaaaaaaaaaaaaa

SEQ ID NO: 1165 - DNA, 2441 bp, Homo sapiens
agagtgccgggagcgcctgattggcggccctcccggcgcctgcaggccccgccccggctgcggaggctcagtcacagccctcccctcctcgctccctcccctcctctccccgcccagttcttctcttcccgtctgaggtggcggtcggtctcgccttgtcgccagctccattttcctctctttctcttcccctttccttcgcgcccaagagcgcctcccagcctcgtagggtggtcacggagcccctgcgccttttccttgctcgggtcctgcgtccgcgcctgccccgccatgaatgaggagtacgacgtgatcgtgctgggcaccggcctgacggaatgtatcctgtcaggtataatgtcagtgaatggcaagaaagttcttcatatggatcgaaacccttactacggaggagagagtgcatctataacaccattggaagatttatacaaaagatttaaaataccaggatcaccacccgagtcaatggggagaggaagagactggaatgttgacttgattcccaagttccttatggctaatggtcagctggttaagatgctgctttatacagaggtaactcgctatctggattttaaagtgactgaagggagctttgtctataagggtggaaaaatctacaaggttccttccactgaagcagaagccctggcatctagcctaatgggattgtttgaaaaacgtcgcttcaggaaattcctagtgtatgttgccaacttcgatgaaaaagatccaagaacttttgaaggcattgatcctaagaagaccacaatgcgagatgtgtataagaaatttgatttgggtcaagacgttatagattttactggtcatgctcttgcactttacagaactgatgattacttagatcaaccgtgttatgaaaccattaatagaattaaactttacagtgaatctttggcaagatatggcaaaagcccatacctttatccactctatggccttggagaactgccccaaggatttgcaaggctaagtgctatttatggaggtacctatatgctgaataaacccattgaagaaatcattgtacagaatggaaaagtaattggtgtaaaatctgaaggagaaattgctcgctgtaagcagctcatctgtgaccccagctacgtaaaagatcgggtagaaaaagtgggccaggtgatcagagttatttgcatcctcagccaccccatcaagaacaccaatgatgccaactcctgccagatcattattccacagaaccaagtcaatcgaaagtcagatatctacgtctgcatgatctcctttgcgcacaatgtagcagcacaagggaagtacattgctatagttagtacaactgtggaaaccaaggagcctgagaaggaaatcagaccagctttggagctcttggaaccaattgaacagaaatttgttagcatcagtgacctcctggtaccaaaagacttgggaacagaaagccagatctttatttcccgcacatatgatgccaccactcattttgagacaacgtgtgatgacattaaaaacatctataagaggatgacaggatcagagtttgactttgaggaaatgaagcgcaagaagaatgacatctatggggaagactaacagcagtacatgttattatgtaattaggacacatttaaaatttggcaaataatgcatataatgaaatcaatattgtaaggcctgcttttgtaatgaaaatggagagaatgaagagcgctgtgccagtaaatactccccttcacctttctaattattaacttgttttcatggagtggctattcagcattggcagttaccacattctgttcaatttaaccaaactggctttttttttttctagtgaagttaaacaaacattgggataccgacacagacaacttgagacagtttttttaatcttttaatcagtgtagctatgtgctgctgctgctcaagagctggatccatacaggttgtgtgtcatctgtcctcttgaggttcaggagattctaaattgaatattccacggtttgggacagcatccggaagttttccctatgactttatattttgtattatgtcaaatgttatggcagggcccaaatagcatagccacaagtttggtttatgtgggcataaaattctaaccaaaccccagacatagggagtcatttggagaaagcctgtatgtggtgttttaacctaataaagttgatgagagagaaggggagaggaagcgaacataaagcgggtcaagtgtagtgcatcttttgtatctcaggcgtggcttcttcagtggaccaagctgcaatgcagtattgacttgacagagcctctacttctgtctcaaaatggctccaaatgatttctgtactgcaaaataaagccaaattctggaaactaaaaaaaaaaaaaaaaaaaaaaaaaaaaaa

SEQ ID NO: 1166 - DNA, 740 bp, Homo sapiens
gcctcacagaattgagagtttgttcttacacacaagtttaatgccaccttcctctgtctgccatggaccaacaagcaatatatgctgagttaaacttacccacagactcaggcccagaaagttcttcaccttcatctcttcctcgggatgtctgtcagggttcaccttggcatcaatttgccctgaaacttagctgtgctgggattattctccttgtcttggttgttactgggttgagtgtttcagtgacatccttaatacagaaatcatcaatagaaaaatgcagtgtggacattcaacagagcaggaataaaacaacagagagaccgggtctcttaaactgcccaatatattggcagcaactccgagagaaatgcttgttattttctcacactgtcaacccttggaataacagtctagctgattgttccaccaaagaatccagcctgctgcttattcgagataaggatgaattgatacacacacagaacctgatacgtgacaaagcaattctgttttggattggattaaatttttcattatcagaaaagaactggaagtggataaacggctcttttttaaattctaatgacttagaaattagaggtgatgctaaagaaaacagctgtatttccatctcacagacatctgtgtattctgagtactgtagtacagaaatcagatggatctgccaaaaagaactaacacctgtgagaaataaagtgtatcctgactcttga

SEQ ID NO: 1167 - DNA, 2043 bp, Homo sapiens
gcgggctgggccggcctgggcggggcgcgcgactgctccgggcggcgatggcggcggacggggactggcaggatttctatgagttccaggagccggcccggagcctcctggaccaggagaactgtaacgcgagccccgagcctggggcggaggcgggggccgaggcgggtgggggcgccgacggtttcccggccccggcctgcagcttggaggagaagctgagcctgtgcttccgcccctcggatccgggcgccgagcccccgaggacggccgtgcggcccatcacggagcgcagcctcctgcagggggacgagatttggaatgccctgacagataattatgggaatgtgatgcctgtagactggaagtcatcgcatactaggaccttgcacttgcttactctgaacctctcagaaaaaggggtaagtgacagtttgctctttgatacatcagatgatgaagagctgagagaacagctggatatgcactcaatcatcgtctcctgtgttaatgatgaacccctcttcacggcagaccaggttattgaagaaattgaagaaatgatgcaggaatcaccggacccagaagatgatgaaacccctacacagtcagatcggctttcaatgctttcccaggaaattcaaactctcaagaggtctagtaccggcagttatgaagagagagtgaaaaggctctcagtgtctgagttaaatgaaatcctggaagaaattgagactgccattaaggagtactctgaggagctggtgcagcagttggctttacgagatgaactggagtttgaaaaggaagtgaaaaacagctttatttctgttcttattgaagtgcaaaacaaacagaaagagcacaaagaaacagcaaaaaagaaaaagaaactaaaaaatggcagctctcagaatgggaagaatgagagaagtcatatgcccggcacatatttgactacagtcattccttatgagaaaaaaaacggaccaccgtctgttgaagatcttcaaatattaacaaaaattcttcgtgccatgaaggaggacagtgaaaaagttccgagcttgttaactgattatattctgaaagttctgtgtcctacatagagcagcaactttatctgcggtgggctccaagctagatttccgacagcattattctgagagctggctaccattacccttcttgctattggaaactcagcacatttgaacttgggtttgattcagtattaacagatcttgactacactaattctttatattatagaaccaacggaaatatgggcactattttgaattctagagatggtttttgttaaatctactaataaactgttctcttagtagattaagagagagtaatattaattgtgcatgtgcagttgtatttctcattaactgacagtatgcccatttgtttttatggctttcttatctaaactgcactgatgaactagattaaagccttgggagatttatactataaattcagtgatggcaagaaccaacactgtttttttgtgagaattgtcagtgtaactattacctaccagtattgttcagagagattgaaacagaataaacgggctgttcttgaagaagcaaaaccagaatatgcattactttggtttaatacttagtgctaacattgaaactgttggtggtgatggattttgtagcttgctgcttgtttcaccactggtcaaattttaaccattaaattgccattcacttttagaatcttgtatttaagttttgattttcaaatgttctgcttcatgtgtctgtgaagaattgtactttaagtgtgtgtcctctgaggtgcttgagaaagtgtacactgcagaactgcccattctcattactgtgtcctattttattcatgcctgtgtgtttttcttaagtatgaattctagatacagctacttatggattcatcaatatcatgagcacttttgctggttccagtcaaatcaatggcatttaataaattttttaagaagtaaaaaaaaaaaaaaaaaaaaaaaaaaaaaaaaaa

SEQ ID NO: 1168 - DNA, 2839 bp, Homo sapiens
ggggttagcgcctgcgctctggacggctttggggcagggcagatttatatctgcgggggatcagctgacgctccgcattgcagactgcggagtcagacggcgctatgtacgccctcttcctcctggccagcctcctgggcgcggctctagccggcccggtccttggactgaaagaatgcaccaggggctcggcagtgtggtgccagaatgtgaagacggcgtccgactgcggggcagtgaagcactgcctgcagaccgtttggaacaagccaacagtgaaatcccttccctgcgacatatgcaaagacgttgtcaccgcagctggtgatatgctgaaggacaatgccactgaggaggagatccttgtttacttggagaagacctgtgactggcttccgaaaccgaacatgtctgcttcatgcaaggagatagtggactcctacctccctgtcatcctggacatcattaaaggagaaatgagccgtcctggggaggtgtgctctgctctcaacctctgcgagtctctccagaagcacctagcagagctgaatcaccagaagcagctggagtccaataagatcccagagctggacatgactgaggtggtggcccccttcatggccaacatccctctcctcctctaccctcaggacggcccccgcagcaagccccagccaaaggataatggggacgtttgccaggactgcattcagatggtgactgacatccagactgctgtacggaccaactccacctttgtccaggccttggtggaacatgtcaaggaggagtgtgaccgcctgggccctggcatggccgacatatgcaagaactatatcagccagtattctgaaattgctatccagatgatgatgcacatgcaacccaaggagatctgtgcgctggttgggttctgtgatgaggtgaaagagatgcccatgcagactctggtccccgccaaagtggcctccaagaatgtcatccctgccctggaactggtggagcccattaagaagcacgaggtcccagcaaagtctgatgtttactgtgaggtgtgtgaattcctggtgaaggaggtgaccaagctgattgacaacaacaagactgagaaagaaatactcgacgcttttgacaaaatgtgctcgaagctgccgaagtccctgtcggaagagtgccaggaggtggtggacacgtacggcagctccatcctgtccatcctgctggaggaggtcagccctgagctggtgtgcagcatgctgcacctctgctctggcacgcggctgcctgcactgaccgttcacgtgactcagccaaaggacggtggcttctgcgaagtgtgcaagaagctggtgggttatttggatcgcaacctggagaaaaacagcaccaagcaggagatcctggctgctcttgagaaaggctgcagcttcctgccagacccttaccagaagcagtgtgatcagtttgtggcagagtacgagcccgtgctgatcgagatcctggtggaggtgatggatccttccttcgtgtgcttgaaaattggagcctgcccctcggcccataagcccttgttgggaactgagaagtgtatatggggcccaagctactggtgccagaacacagagacagcagcccagtgcaatgctgtcgagcattgcaaacgccatgtgtggaactaggaggaggaatattccatcttggcagaaaccacagcattggtttttttctacttgtgtgtctgggggaatgaacgcacagatctgtttgactttgttataaaaatagggctcccccacctcccccatttctgtgtcctttattgtagcattgctgtctgcaagggagcccctagcccctggcagacatagctgcttcagtgccccttttctctctgctagatggatgttgatgcactggaggtcttttagcctgcccttgcatggcgcctgctggaggaggagagagctctgctggcatgagccacagtttcttgactggaggccatcaaccctcttggttgaggccttgttctgagccctgacatgtgcttgggcactggtgggcctgggcttctgaggtggcctcctgccctgatcagggaccctccccgctttcctgggcctctcagttgaacaaagcagcaaaacaaaggcagttttatatgaaagattagaagcctggaataatcaggctttttaaatgatgtaattcccactgtaatagcatagggattttggaagcagctgctggtggcttgggacatcagtggggccaagggttctctgtccctggttcaactgtgatttggctttcccgtgtctttcctggtgatgccttgtttggggttctgtgggtttgggtgggaagagggccatctgcctgaatgtaacctgctagctctccgaaggccctgcgggcctggcttgtgtgagcgtgtggacagtggtggccgcgctgtgcctgctcgtgttgcctacatgtccctggctgttgaggcgctgcttcagcctgcacccctcccttgtctcatagatgctccttttgaccttttcaaataaatatggatggcgagctcctaggcctctggcttcctggtagagggcggcatgccgaagggtctgctgggtgtggattggatgctggggtgtgggggttggaagctgtctgtggcccacttgggcacccacgcttctgtccacttctggttgccaggagacagcaagcaaagccagcaggacatgaagttgctattaaatggacttcgtgatttttgttttgcactaaagtttctgtgatttaacaataaaattctgttagccagaaaaaaaaaaaaaaaaaa

SEQ ID NO: 1169 - DNA, 2011 bp, Homo sapiens
gagtctgtaccctcgtgatgtccccgccccggttcccaggcaagtttagggaagtgaaaggcgccaggtgccagtcctggcctctgatgtaacccagcgccccgcagtcccgacacagattcctggatctcagccccatagcagctatgatcccgctgctgctggcagcgctgctgtgcgtccccgccggggccctgacctgctacggggactccgggcagcctgtagactggttcgtggtctacaagctgccagctcttagagggtccggggaggcggcgcagagagggctgcagtacaagtatctggacgagagctccggaggctggcgggacggcagggcactcatcaacagcccggagggggccgtgggccgaagcctgcagccgctgtaccggagcaacaccagccagctcgccttcctgctctacaatgaccaaccgcctcaacccagcaaggctcaggactcttccatgcgtgggcacacgaagggtgtcctgctccttgaccacgatgggggcttctggctggtccacagtgtacctaacttccctccaccggcctcctctgctgcatacagctggcctcatagcgcctgtacctacgggcagaccctgctctgtgtgtcttttcccttcgctcagttctcgaagatgggcaagcagctgacctacacctacccctgggtctataactaccagctggaagggatctttgcccaggaattccccgacttggagaatgtggtcaagggccaccacgttagccaagaaccctggaacagcagcatcacactcacatcccaggccggggctgttttccagagctttgccaagttcagcaaatttggagatgacctgtactccggctggttggcagcagcccttggtaccaacctgcaggtccagttctggcacaaaactgtaggcatcctgccctctaactgctcggatatctggcaggttctgaatgtgaaccagatagctttccctggaccagccggcccaagcttcaacagcacagaggaccactccaaatggtgcgtgtccccaaaagggccctggacctgcgtgggtgacatgaatcggaaccagggagaggagcaacggggtgggggcacactgtgtgcccagctgccagccctctggaaagccttccagccgctggtgaagaactaccagccctgtaatggcatggccaggaagcccagcagagcttataagatctaacccttatggccaggtgcagtggctcacgtatgtaatcccagcactttgggaagccaaggagggaggatcacttgaactcaggaattcgagaccagcctgggctacatagtgagaccacatctctactagaacttaaaaaaagttagccaggcacggtgataaatgcctgtagtcccagccactgaagccagaggatcgattgaaccagggagatcatggtcacagtgaactatgattacgccaacctgggtcacatagcaagactctgtttcaaaaaaaaagggggggcgggggacgggtgggtgcagtggctcacatctgtaaccccagcactttgggaggctgagatgggcagatcacttgaggtcaggagttcgagaccagcctggccaacatggtgaaaccccatatccattaaaaatatttaaaaattagccagacatggtggcacgcgtctgtggtcctagctcctcgggaggctgaggcaggagaatcgcttgaactcgggaggcagaggttgtcatgagctgagctaacaccacggcacttcagcctgggtgacagaatgagactctgtgtcaaaaaaataaaaaataaaaaatctaagggctcaggaaccagtttggacttgattttgaatcccagttcatccccttcctagctgtatgaccttgattgtgtgccttaaccgctctgtgacacagtctacctgtctgcaaaatgggaaacataatacctgccatcaggattgttgaggagtaaataaatggaaattggtgaaa

SEQ ID NO: 1170 - DNA, 1651 bp, Homo sapiens; identical to SEQ ID NO: 1150

SEQ ID NO: 1171 - DNA, 8532 bp, Homo sapiens
aacatttacaacaaagttgattctgtgtagggttggaggctagacagttccacaaatttttagtcacattttccatgtcagttaaatctagggagttcaagactactggaaaaattagtctcattactaaaagaaacttagagaccgagggaggtaccagagtctaggaggtacctctgggttgcagaagtaattgtaaaataccagacctgttctttttactaaaagctagtttcactatcttctggtctgaaatactgaggcaaatactcaagacttattttcttcctaatcttgctggtgaaacagaagttactagaaagaaaggaagaaaaaacttgatttggtgactgcaggaagcaacacgttgctgcttttattctacagataatgatttatgaggaatccaagatgaatttggagcaggagaggccgtttgtctgcagtgccccaggctgctcccagcgcttcccaacagaggaccatctgatgattcataggcacaaacatgaaatgactttgaagtttccttcaataaaaacagacaatatgttatcagatcaaactccgaccccaacgagattcctgaagaactgcgaggaggtgggcctcttcagcgagctggactgctccctggagcacgagttcaggaaggctcaggaagaggagagcagcaagcggaatatctcgatgcataatgcagttggtggggccatgacggggcccggaactcaccagcttagcagcgctcggctgcccaaccatgacaccaacgttgtgattcagcaagccatgccgtcgcctcagtccagctctgtcatcactcaggcaccttccaccaaccgccagatcgggcctgtcccaggctctctatcttctctgctacatctccacaacagacagagacagcccatgccagcctccatgcctgggaccctgcccaaccctacaatgccaggatcttccgccgtcttgatgccaatggagcgacaaatgtcagtgaactccagcatcatggggatgcaaggtccaaatctcagcaacccctgtgcttctccccaggtccagccaatgcattcagaagccaaaatgaggttgaaggctgcattgactcaccaccctgctgccatgtcaaatgggaacatgaacaccatgggacacatgatggagatgatgggctcccggcaggaccagacgccacaccatcacatgcactcgcacccgcatcagcaccagacactgccaccccatcacccttacccacaccagcaccagcacccagcacaccatcctcaccctcaaccccatcaccagcagaaccatccacatcaccactcccattcccaccttcatgcacacccagcacatcaccagacctcgccacatccgcccctgcacaccggcaaccaagcacaggtttcaccagcaacacaacagatgcagccaacccagacaatacagccaccccagcccacaggggggcgccggcgaagggtggtagacgaggatccggacgagaggcggcggaaatttctggaacggaaccgggcagctgccacccgctgcagacagaagaggaaggtctgggtgatgtcattggaaaagaaagcagaagaactcacccagacaaacatgcagcttcagaatgaagtgtctatgttgaaaaatgaggtggcccagctgaaacagttgttgttaacacataaagactgcccaataacagccatgcagaaagaatcacaaggatatctaagtccagagagtagccctcctgctagtcctgtcccagcttgctcccagcaacaagtcatccagcataataccatcactacttcctcatcggtcagcgaggtggtaggaagctccaccctcagccagctcaccactcacagaacagacctgaatccgattctttaaaatgcaccatcagacctggcctccaagaagagctgtagcgtaccatgcgtcctttcttttaagggcatttttagaattaactcagacctggaagactcctcagttcttcaaagactggctttcatttttatagttattatggaaatgttgtcttttatacttagttatataagaaaaaagggagttatgcaattaatatctatcagcttgggaaacgctttggtgcttttctccagttttctggtaccagttacttgtttataaactgaaccttttctgtatatagccatggtttcattcttatcagtccaaccctttgcctgaaacattgaatcttgttaaaccacagcttttagctaaaatgaggtatacctagatgtcaagtaagacagatccaaggtaactgggtaggaaatcttttgacatcttaactcatgttgagtttgtgctgtggtgtcaccagaattccagataaacacacagcctttcccatacctttttttttcttactataaaatattataagatccattgatgtccaaataataccaccaagcatctcttcacctctcctcctcttggtccacttgctaatgcccagttttcttctccatttccactttttcttaggctccctatttactattcattttgacttccttctgttttatttttttccctttagcattgcatgtgaataagaaaataatgtttaaagaaaaaaaaaaaaaagcaaacctccaaaacgtggacctaaccattgcttcacttacacttcacccacagctggagttcattcaactcttgcttttcacaaaatagtaaccaggagatgtttaatgtgcctgatttaatgtttttaataatcacagcaaatgaaaggtggtttagttataagtgaagcatggttgaataccagctggggagacactagggaagggagctttgtaagccttgattgcgaaagtccaaattttgatgtggggctataacatgacacccttggattgcgactggttttatacggcctgcctataacgttgaaaatccatgtactacataataattcagaagggctctattcactacacagattacattgttcaatcatcagctgctaatagcctaagatttatttttttttttttcttaagcctatggaaccggctttgctgttctggggggtgaaaatagactaactactggagaaacaaagagagaaagaaaacccagtgtttccataggggcacttttagccttcccacaacagttaagcactctttgactgctgaaggaaccccatggatgaggtgcaggctacttcactctttttttttcttttttgagacagagtctcacctattgcccagactgaagtgcagtggtgcgatcatggatcactgcagcagcatcctccgagttcaagctatccttccacctccgcctcctgagtagctgggaccacaggttcacataaccatgcctggctaatttatttttacttttattttaaaataaaagatgaggtctgtcttatgttgcccaggctggtctcaaactatcctacttcttcctcccaaagtgttgggattataggtgtgagccactgcacccagcctacttcactcttctgaattattctgatttattttcaacaacttttgtgaacttgcccgtgatacaaagcagatagtccctgaaccacagtcgtgcctccttgaaacaagccattctactgtgctaatgttttaatatcacatctcacaaataacaggggtgaatgtttctctctagcaatctaggcaggtgctggtgtttcatctccatttgaatgcttgacctcttaatgtgtgtgtgtgtgtgtgtgtgtgtgtgtgtgttcatgggttttaaaagaacagtattttacaaaaggtgtagcttttataagagtgcagaaaagggaaggatgtgtttttttctctcactatagtataagaatctattttggagaaaaaaagaaaatatgagggtctcgaagcatgatttttatataactagtttcagttttatctaataacttactttttaaatcaatatttatcaacaatctttccttgtatgcagtgctttcaaaagatggttttgagtgtccagtgaaacttatgacttggatatatggttgaagaatcaaaacaaaagcaaaaaaaaaaagcaaaaaaagaaaagagaaaaaaagaaaaaatgcaaatggaataattttctattatattttagacaaacatatcattttcgagtattttaaatactgaattcatagttgttgttttttaaattccaacagtaacagctgaatggtttaatctgactggcttcctaagaaatgtttaagactcagctttaaaaagaagttaacattcatatctctgttttgaaatcaaaaatcatatttcaaaattctttcctaggaccatctatgtgtctcccctcccctccacaaaaaggagaaagagtgcattaaaatgtttagttgggttttttaatttttaatttttatgttatgttttgctttgttttaagtaaacaaaaatttttctttctttactgcatgcatagcacttaataaaatggatttttaaaaaatccactagtaatatcagaatgtccagggagtgactgtcactacaatgatggtttagtttacttctgttccaccttttgattgaaatatttagttgttaggctgaaagcctcggcagttaagaacttgcctgagttttcttcgttcagcaacttgacagtttgactgatgtgcattatatatagctcaattatgtctgttttttatgctaagtaggaaaaccaaccacacacattagcaaaccggcctcaacatataattagaataaactgtcttcttgttctactcagggcctttaggtgtgttcattcacggtatggaaatacagtaaatgaaagattccaactagttgtcagtgcttcttgaaattccaaacagaaagatacattggtcaaatccaacacttggcttatcaatattaagtcttttacctaaaggcccagccgtcaccagacaacagaataatcaatctgcctgaaaatccctcctccttgtcctacactttttgcctgtttgggagaatatctttgtactccattctcctccctcagccagttactgggtcacccatccatgtgttcatgaatcaatcatcacggcctgcagagcacctgtcctaaggagggaaaatcctgtcacactgcctctccccattcgtgtgtggttttcttgatcggtgagatctgtctctgaagtcactgccagcctccctgggaacgtctatagtgcctcccctgccttatgtgatgggagttaacaactcagataagtacacctgagagcatttctatcaggtaaactgtcacttaaatggaggtgtccacatcttaattgtttctccttgacacatttctcaatccacgaagccaggagaggtagagtgaaaatcccagccatggatgaatgtactaatttgaaagccaagtgttaagtcggatgttttcccgttacactactactcagccctctcctgcggccacatcaacggatgcaagtcacagtcttaacacagcctgtgggagacaagcagtttgtgtgctcacagtatatattatagtaattagggtgacttagagcaaatactcttcagatcctatgtagtcagtgaaacaaaatggagagcgtattctgatagaaggacgtcgacggtgaatgttctggtggttgttgcctgttaagtaaactttagtgtgtaagttgagtttgtcattaaaatcataaaccagctgcggtaacagacaagcctttggctggggagttttaagcctcggtaactgctataaaactagccatccagttaggatagaatgtgtttctttctggttaaaaaaaggaaaaaccatctaagaaaatatatatgtatgtatgtgtgtatacagtggaattcaaaggaccaaagcaaaatttgaacaggaatctattaatttagaattttataagatatttattaataaatgttatttttaaacattccatttgaacagtattctgtaggatctacttgtttttaaagtgttagtccataataaactactatagttatgtgtattttcatttttcagggtttcaaatggctattctccatcatttggtggaaatgtttgcttagatctctgtgcatagacatttcaaggatttttattgctctgtgagttattttttaatcaacattctgaacagttttttttaaacatttatttctgtgtgttcatttttaaagtaagctctttcatttaggaagcagagttcagctaaagggaatcagtaactctaactggaacagctttcttgtagaagtgtaaaaacagcttcatctctgcctctctccaccccaccccaatttcctagaaagccttgcactattcagctcccttagtgctttttgtcccttcccgaacaatatgcagtagctttaagccattcaagctccattatgcagtatatctgagaagggaaaggaaacaacccatttaaatttgaataaaaccgtgcctatgcgaacagtagcaatttagaatctcttttctgcttttaaaataatttatatttaaaaattgcactttagctttttgatccctttgtatttctcttattctctttctaacctcttctctgtcctcaaacttgcctttgctctcctttacaataccccccacccctcctccaaggctctgagcggcatcatttaaaatactttacagatatttgcaccaggtacatttatgtgcgtccattggtagcacagctgagacctgtgtctcacatcagcctaggtgaagcctactacaagaatgccaaggagaagagccagtacactatatggtttatactctttatccctttattcatagcatgttttttaaaaatgttatattatgcaacagatgtgaggcagcagctaagctatacttaagaattttctctcaccttccaaaccaaagtgtcctgaataagccaggagacttattcttttgtgcaccctggtgcacatctgactgttgtcctagccatagactctctgaggccactgaaagaacagtggccctatcgatttcattcctaggtctcaaaaatacaatgttgccttgtaacataattagggacagcacctctatttcacaattataatctaaggtaggataagacgacacagcagcaataaacttacaagtaaaattcaataccaaaacaaacacaaagaaatttaaaaaacaaaaaacctagctcatcatgttgtgaaaatgaaaaagtgaatgtccattcaaaatattttactatttcttgtggagtttttcagtgatgtaatgcttgtagccaaattgcttaaagagtgtttatatatttttttccttataaattgtctattttttaaaaaagctatttaaccacagctgaagtggggggtaaggccaaattgccaacacttgttaaaagattaatactcttaagtggcactctgatacctttccaacttgtcatcagaaaggaatcaataattaccaactgttgtatttagaccaacttacaatatctagctcattagaagccaggatctagaaagctccttctaagccatttaagatattcttacattgagcttcatattatagaactttataggattggatattttacaatagaataatttagcctcaggactgagaatgtggaagctgaataaattagctttaaatacatcattaaaatcttatgcacaataagctcattagattctagttttctcctttagaataccaatgccacagacactacaggagataatgaaaggtatcagttgtgttgagtggagggagtttaagagaaaggacccttcccaaccagcagccagtagaaaatacaacctactcacctttttcccttctaagttctgctaaatcacatctgcctcatagagaaaggaatgttgcctttgagaactgtcttggagaacagataagcttgaaatgttctctctagagaggacatagggtttgggatcctctgaaaaggcccagaaaaatagctcagttcaaatacaatgttctaggacaattggaatataaatattgtccaaaaatataattaaaagaaaaaagtttagcactgtgtaaagtaagtgttaactgaggaagtcccaaaaaggtgctgtcactttaagttctggacttggggttctttgtatttgtaaacagcaaagcatttgtgtttgtttgtctatttgtaaagcaaccaccttccttattggaaggagaaaaaaaggggtacatacatgtaaatacttgctgcagcatttaatatgtttaattttgtgttaagctttttgttgcatcgtgaacacatttattgttaccaatggacaatgagttcattaagactgttcaactaggtcagatttttacatctctttctagcaagaagagacaagattttgtgcatttgtacaaatgttaatatcactgcaattccaatataataaagcactcaaatgcaaataa

SEQ ID NO: 1172 - DNA, 4848 bp, Homo sapiens
gactgcgcggcgggctgtggctgcggaggttgaggggcgtccgaggcgcggaggggctggctgggcaggaggggttggcggggcagcagggccgcggccatggggagcttgaaggaggagctgctcaaagccatctggcacgccttcaccgcactcgaccaggaccacagcggcaaggtctccaagtcccagctcaaggtcctttcccataacctgtgcacggtgctgaaggttcctcatgacccagttgcccttgaagagcacttcagggatgatgatgagggtccagtgtccaaccagggctacatgccttatttaaacaggttcattttggaaaaggtccaagacaactttgacaagattgaattcaataggatgtgttggaccctctgtgtcaaaaaaaacctcacaaagaatcccctgctcattacagaagaagatgcatttaaaatatgggttattttcaactttttatctgaggacaagtatccattaattattgtgtcagaagagattgaatacctgcttaagaagcttacagaagctatgggaggaggttggcagcaagaacaatttgaacattataaaatcaactttgatgacagtaaaaatggcctttctgcatgggaacttattgagcttattggaaatggacagtttagcaaaggcatggaccggcagactgtgtctatggcaattaatgaagtctttaatgaacttatattagatgtgttaaagcagggttacatgatgaaaaagggccacagacggaaaaactggactgaaagatggtttgtactaaaacccaacataatttcttactatgtgagtgaggatctgaaggataagaaaggagacattctcttggatgaaaattgctgtgtagagtccttgcctgacaaagatggaaagaaatgcctttttctcgtaaaatgttttgataagacttttgaaatcagtgcttcagataagaagaagaaacaggagtggattcaagccattcattctactattcatctgttgaagctgggcagccctccaccacacaaagaagcccgccagcgtcggaaagaactccggaagaagcagctggctgaacaagaggaactggagcgacaaatgaaggaactccaggccgccaacgaaagcaagcagcaggagctggaggccgtgcggaagaaactggaggaagcagcatctcgtgcagcagaagaggaaaagaaacgccttcagactcaagtggaacttcaggccaggttcagcacagagctggaaagagagaagcttatcagacagcagatggaagaacaggttgctcaaaagtcctctgaactggaacagtatttacagcgagtacgggagctggaagacatgtacctaaagctgcaggaggctcttgaagatgagagacaggcccggcaagatgaagagacagtgcggaagcttcaggccaggttgttggaggaagagtcttccaagagggctgaactagaaaagtggcacttggagcagcagcaggccattcagacaaccgaggcggagaagcaggagttggagaatcagcgtgtcctgaaggaacaggccctgcaggaggccatggagcagctggagcagcttgagttagaacggaagcaagcacttgagcagtacgaggaagttaaaaagaagctggagatggcaactaataagaccaagagctggaaggacaaagtggcccatcatgaaggattaattcgactgatagaaccaggttcaaagaaccctcacctgatcactaactggggacctgcagctttcactgaggcagaacttgaagagagagagaagaactggaaagagaaaaagaccacggagtgactgagcttgctggcagtcacgtcagttatgtagatactgcatggcaggagagctttacgctaaagacaaaagaaacagctttgggggccgggcgtggtggctcacgcctgtaatcccagcactttgggaggccgaggcgggtggatcacctgaggtcaggagttcaagagcagcctggccaacctggtgaaaccctgtctctactaaaaatacaaaaaaaattagctgagcgtggtggcgggcgcctgtaatcccagctacttgggaggctgaggcaggagaatcacttgaacgtgggaggcggaggttgcagcgagctgagatcatgccgttgtactccagcttgggcaacagagtgagactccatctcaaaacaaaacaaaacaaaacaaaacaaaaaaacccggctttgctgcttttaactcttcttccttctgtgcctctctaagtgggtcagtatcctaaggaagccttcttatttatcttcctgcaaacaagggttacctgaaaagaaaaaaaaagtcaacattgtcaagctgtttgtttactctttctttgaaaacatcaccttctgaaatttgtcttttagctctctcagattcttccccaaatgaggcagggtgcagacagcacagtcagctctgcagagtttggaggggctcactgccactgggtactcagaacctctgtggactggatgtcagctctttcctttggcagcgtgtttccttttccgagtatgtgctgttaaactagattggccggttcgctttccatttcctgacacttgacatggaatgcctttgaccattggtgctctgacagagaagtcatggagtcattgccatttcctggttgcccttttggaatgtgatcctgttagtagaggttttctagcttctactaagatatttctttccctaaccatcatacacttggcatgtttcattcccatctcctttcccctcaccttaaaggagactacccctttgccccatattgtcaacctaattttctctcgtactctctctagtgaatgatgtgctaccaagtatatgccaggctgtgagaggattatactgagtagtagaaagaagctaatttgaaataaaaattatttgtataattaagaaagcagattagatgcacatggtcaacaggaagttgactgtatgtctgctagttagattcaaaacatcataaagatgatagcatgtcaatatattagcctagccattatgttagcctttgttaggtgggcagcttttctgctttttcccttcctctgtggtgacaacggaggaaatatccaacagaaatacgtctaacagggaaattgggatcatagtttatatgcatctgatttgaaaggagtattgaggaaggttttcatatatgatctatctttggattaaaaagaacatttatgaaatcaagccttctaacactagttataattgagaagcaacagtaactccgtggacagcaatcaagcttaaaattgtaaataaatatggggataattcagttgttgcaaaaaaagggcagaattcagtagaataaagtccttttctcttacaggtattaaatgaggacagagaacctcaggtgttcttatgctagtgcttgctgagtgcatactaagaaagcaattccaaatagatgtatacatctagagagagtggtattagagattcagtgtatgtatttatttacatgagaggaaactggaatataatcccataaattatcaccttttatgactggaaaatatttgccaatgaagaaatggtctgtaggtatttgtcttaagatttttggctgtttaataaaaatgtaactttaacggtttcttatagttgcctttataaagtgtattgtctaaaatatttttgtatcatgtgcctttgaaatttgacagctgatttgggtgttggatttctgcccagccatttatcagtattatcattttattcagtagctggcaggtgtattagaccaacgagacttaggtaaggaatggaacctttcctgtggtttgactgcacattacaccagaagactccagtatccctcattccagaatgaggaaaaagtattctacaaagaacctaatcacctctgtgaaatctatgggatggaaacagtgtggccttaggagtcaaatagtctctgcatggtggggaggatcatgatggaatatgtgaatttctacttctagaagttgtgaaataggtcctgcacttttgcagaatgtccttctttaaacctggcttattccacagctgtagctgataacatgacctggggcttagctgctctagccctgggttcttggagacctcacactgcctggcccctggccatccacctaaggactgcctgctttctggtcacatgtggaccttgatacgactaagcggttacatatgtggttgtgcaaaagctttctgtttaatgcatagtgttaccgatttacatcttggttttcagtggcactatgtctaggaggcaatatccttttaaacagtgctttggctaagatagatacttgtgaatcaaagatagcacagaaatgaactaagtatatcccatttggaattatattttgatactatttaaaatggtttcacctgttaaagggccaacagaactcttggttttacttttgtaattactgtacagaaaatttcaagagtgtttgagtgcttgtcatcaggtgttttccttaataagtagggatatgatcatttacaggaattatatatgaaaaaagtttttgaaatgtatttttgtgatgtgctatgttgaggggaaaccaaatatttatgattttaaaacattcgtatgaaaacattgtacaatgtaatatgctcaactttctcaattttttgctaatttttctaagatacattaaaaatgttttatatttttttttaagtaaaatggacccagtaagaaaattaaaaataccagaacatacactttaaa

SEQ ID NO: 1173 - DNA, 3111 bp, Homo sapiens
gcgggtcagcgcgagccgctgcagtgagtccgtcacggctccggcgcgagcgcgaggctgcagcccccgagtttcccggccgtcttcgccccctctccccctcctttcttcttctctgcctctcctgcctctcgccgctgctcctcccgcgctctccggctctgaatctcgaccttaatttatttccccctaccctgcccgctccctcgcgtgcccaatcgcccggccggcgcgggccccgcggcgccgcctcccctcccccacgcgcgccccctccccgccggcgacccgagggccgcagctgggccgccgccgccgtttcctgcgagccagcctgagcgcaacacttctccgagccagcgagccagcgagccgccgacccgccgagcaaaatgggaaatgaggcaagttatcctttggaaatgtgctcacactttgatgcggatgaaattaaaaggctaggaaagagatttaagaagcttgatttggacaattctggttctttgagtgtggaagagttcatgtctctgcctgagttacaacagaatcctttagtacagcgagtaatagatatattcgacacagatgggaatggagaagtagactttaaagaattcattgagggcgtctctcagttcagtgtcaaaggagataaggagcagaaattgaggtttgctttccgtatctatgacatggataaagatggctatatttccaatggggaactcttccaggtattgaagatgatggtggggaacaatctgaaagatacacagttacagcaaattgtagacaaaaccataataaatgcagataaggatggagatggaagaatatcctttgaagaattctgtgctgttgtaggtggcctagatatccacaaaaagatggtggtagatgtgtgactcttatcagagagtaccacccaacacttttgctttcttctccatctctgaagatctgctcaagacgtccagcaatgctctctgtgtatttaaatggaagtatttttctctgtgaagccacattttccaacatgagcctcatgaagccaactaagtgttattgaactgtaattctctcaataactcagtgtagcactttaaagtctgaaggacagcaacatgaaaagagcatatcaatgtggtggagaaagggaaggggttggctttttaatttatttttcttcatcttttataacaagaaagtatctatatatacatatgtaaatatttatatatagatatatgtagctttctatatatgtagtaggttggctttaatttaatatacttgattcagaaacaaaacaatagagtacaaaagtgccaagcagaacataaaacatccttacttttatttcacacagttttatatatagatagaagactgtacaatttgagccgggtgttaggccagctattttccttttcctgtgctttctcctttgagagattgacaaagcatttgttaacgtcctattatttaccttaattacatttttgtaacaaaggagtctgtaactttatttatacttatgaatatatccagggactacttctcattgctgagcagcttttaatacacctctgcttgaggagaaagtctagttcattgctactgccaagagctagttcttgtgttcatatagtaactgcacagggcttatagctgcttcattctgctactttgtaactaggagccattgcatttattaaatgtccctcagtaacgttaagtgctagttgtgattttatacataaaggccagaagctgtctgaggcaatcatgattgattgtatgtatcacttactgaagaatacctgaagtgatcatgtaactacttataagggatatccatttgtttgattacatgggtaaataatttgtcattaaacttgtgtttgaatcatgaattcccttgtttcaaaagacttgcagctaatctaaaaaactggtgatatttaatatgcatgtatgtatctaaacacccacatatatttgtggtttaagtgtgagaaatcttgctaatctatatgccacagaagagcaaaattgtatccaaatttatgccacttaaatttctttaccacgagggatagagcatgcatactggtttttttttcttgatttgcccatataattggtaatggataacttaataaatttgtgtgatataaaagtagtgtatcatgttctactgtttgatcttatcccttcccatttctgcaaaggtactgttagctggaagaaaaacattttggttagctttgtatgacagtagtctttccctttatagtttctctataaaaactggttttaaaatcagtggaaaagggcaggttgaatcaaggtgaatcaatctgaaattgagcacacctgcctgccatcgctgttccttcaactgagtgctgcacatcatgggctctgtctgtgagagaaaaatcccggtgcttggtgtccttgcatgacatggagttttgcatgtagatcaatttaaaatgtacctcttgtttacataatttgcataattttaaaagataatgttgccaaactttggaaatgttaatgttcagactgaaaatctccactacatgtaactttcttcctctggatcagtggcatggcttataatcccagccagtggtttgaactgttccagtgtcaactgccatgtgctctgcttcaagggggaactagccttttgtgaattttttgtacataagtatttgttacaaatattttagcaaatgctttctatttctcttgcttgtgcatatcttggctggcgttacagaaaaatagtgtaaacattatttccttaccggggaatgagggttttttctttttctttttttttttttttttttttagtttgtgtgtgggggtgggtaagggaggggatggtttatgttgaatgtttagtttttcttctgcatgatacgtcatgttgtgggatctttagaaaacttcatactgtatgaataagaaaataaaatatttgaaacttgaaaaaaaaaaaaaaaaaaaaaaaaaaaaaaaaaaaaaaaaaaaaaaaaaaaaaaaaaaaaaaaaaaaaaaaaaaaaaaaaaaaaaaaaaaaaaaaaaaaa

SEQ ID NO: 1174 - DNA, 3911 bp, Homo sapiens
gcagacggcaaccgggccgctgattgggcggcgaaggagccattcggggagactctggtgggttcggctgccccaagagtgataagttcggcttcagacacgccttagcgccagcagtgagtcggagctctatggaggtggcagcgggtaccgagtggcggctgcagcagcgactcctctgagctgagtttgaggccgtccccgactccttcctcccccttccctcccccttttttttgttttccgttcccctttcccctcccttccctatccccgacgaccggatcctgaggaggcagctgcggtggcagctgctgagttctcggtgaaggtatttcatttctcctgtcccctcccctccccaccccatctattaatattattcttttgaagattcttcgttgtcaagccgccaaagtggagagtgcgattgcagaagggggtgcttctcgtttcagtgcttcttcgggcggaggaggaagtaggggtgcacctcagcactatcccaagactgctggcaacagcgagttcctggggaaaaccccagggcaaaacgctcagaaatggattcctgcacgaagcactagacgagatgacaactccgcagcaaacaactccgcaaacgaaaaagaacgacatgatgcaatcttcaggaaagtaagaggcatactaaataagcttactcctgaaaagtttgacaagctatgccttgagctcctcaatgtgggtgtagagtctaaactcatccttaaaggggtcatactgctgattgtggacaaagccctagaagagccaaagtatagctcactgtatgctcagctatgtctgcgattggcagaagatgcaccaaactttgatggcccagcagcagagggtcaaccaggacagaagcaaagcaccacattcagacgcctcctaatttccaaattacaagatgaatttgaaaaccgaactagaaatgttgatgtctatgataagcgtgaaaatcccctcctccccgaggaggaggaacagagagccattgctaagatcaagatgttgggaaacatcaaattcattggagagcttggcaagcttgatcttattcacgaatctatccttcataagtgcatcaaaacacttttggaaaagaagaagagagtccaactcaaagatatgggagaggatttggagtgcctctgtcagataatgaggacagtgggacctagattagaccatgaacgagccaagtccttaatggatcagtactttgcccgaatgtgctccttgatgttaagtaaggaattgccagcaaggattcgtttcctgctgcaggataccgtagagttgcgagaacaccattgggttcctcgcaaggcttttcttgacaatggaccaaagacgatcaatcaaattcgtcaagatgcagtaaaagatctaggggtgtttattcctgctcctatggctcaagggatgagaagtgacttctttctggagggaccgttcatgccacccaggatgaaaatggatagggacccacttggaggacttgctgatatgtttggacaaatgccaggtagcggaattggtactggtccaggagttatccaggatagattttcacccaccatgggacgtcatcgttcaaatcaactcttcaatggccatgggggacacatcatgcctcccacacaatcgcagtttggagagatgggaggcaagtttatgaaaagccaggggctaagccagctctaccataaccagagtcagggactcttatcccagctgcaaggacagtcgaaggatatgccacctcggttttctaagaaaggacagcttaatgcagatgagattagcctgaggcctgctcagtcgttcctaatgaataaaaatcaagtgccaaagcttcagccccagataactatgattcctcctagtgcacaaccaccacgcactcaaacaccacctctgggacagacacctcagcttggtctcaaaactaatccaccgcttatccaggaaaagcctgccaagaccagcaaaaagccaccaccgtcaaaggaagaactccttaaactaactgaaactgttgtgactgaatatctaaatagtggaaatgcaaatgaggctgtcaatggtgtaagagaaatgagggctcctaaacactttcttcctgagatgttaagcaaagtaatcatcctgtcactagatagaagcgatgaagataaagaaaaagcaagttctttgatcagtttactcaaacaggaagggatagccacaagtgacaacttcatgcaggctttcctgaatgtattggaccagtgtcccaaactggaggttgacatccctttggtgaaatcctatttagcacagtttgcagctcgtgccatcatttcagagctggtgagcatttcagaactagctcaaccactagaaagtggcacccattttcctctcttcctactttgtcttcagcagttagctaaattacaagatcgagaatggttaacagaactttttcaacaaagcaaggtcaatatgcagaaaatgctcccagaaattgatcagaataaggaccgcatgttggagattttggaaggaaagggactgagtttcttattcccactcctcaaattggagaaggaactgttgaagcaaataaagttggatccatcccctcaaaccatatataaatggattaaagataacatctctcccaaacttcatgtagataaaggatttgtgaacatcttaatgactagcttcttacagtacatttctagtgaagtaaacccccccagcgatgaaacagattcatcctctgctccttccaaagaacagttagagcaggaaaaacaactactactatctttcaagccagtaatgcagaaatttcttcatgatcacgttgatctacaagtcagtgccctgtatgctctccaggtgcactgctataacagcaacttcccaaaaggcatgttacttcgcttttttgtgcacttctatgacatggaaattattgaagaagaagctttcttggcttggaaagaagatataacccaagagtttccgggaaaaggcaaggctttgttccaggtgaatcagtggctaacctggttagaaactgctgaagaagaagaatcagaggaagaagctgactaaagaaccagccaaagccttaaattgtgcaaaacatactgttgctatgatgtaactgcatttgacctaaccactgcgaaaattcattccgctgtaatgttttcacaatatttaaagcagaagcacgtcagttaggatttccttctgcataaggtttttttgtagtgtaatgtcttaatcatagtctaccatcaaatattttaggagtatctttaatgtttagatagtatattagcagcatgcaataattacatcataagttctcaagcagaggcagtctattgcaaggaccttctttgctgccagttatcataggctgttttaagttagaaaactgaatagcaacactgaatactgtagaaatgcactttgctcagtaatacttgagttgttgcaatatttgattatccatttggttgttacagaaaaattcttaactgtaattgatggttgttgccgtaatagtatattgcctgtatttctacctctagtaatgggctttatgtgctagattttaatatccttgagcctgggcaagtgcacaagtctttttaaaagaaacatggtttacttgcacaaaactgatcagttttgagagatcgttaatgcccttgaagtggtttttgtgggtgtgaaacaaatggtgagaatttgaattggtccctcctattatagtattgaaattaagtctacttaatttatcaagtcatgttcatgccctgattttatatacttgtatctatcaataaacattgtgatacttgatgtagtga

SEQ ID NO: 1175 - DNA, 820 bp, Homo sapiens
gggagagcctggggccgggccgtgtggatgccatccccgagcgcggttcgcgctcggctgaggcgctggacaagtggcttgggctcccgcgcctcagtttctctctgtggcgccgcctacctcacagacttgtgagcactcactgacgtgggtagcgcccagggcctgcggggcgcaggagagctggagtcaggcggagaccgcaggctgaccccgcagcggccgggctgtcgcggcccccacctcaggtaaccatgtgcgaccgaaaggccgtgatcaaaaatgcggacatgtcggaagagatgcaacaggactcggtggagtgcgctactcaggcgctggagaaatacaacatagagaaggacattgcggctcatatcaagaaggaatttgacaagaagtacaatcccacctggcattgcatcgtggggaggaacttcggtagttatgtgacacatgaaaccaaacacttcatctacttctacctgggccaagtggccattcttctgttcaaatctggttaaaagcatggactgtgccacacacccagtgatccatccaaaaacaaggactgcagcctaaattccaaataccagagactgaaattttcagccttgctaagggaacatctcgatgtttgaacctttgttgtgttttgtacagggcattctctgtactagtttgtcgtggttataaaacaattagcagaatagcctacatttgtatttattttctattccatacttctgcccacgttgttttctctcaaaatccattcctttaaaaaataaatctgatgcagatgtgtaaaaaaaaaaaa

SEQ ID NO: 1176 - DNA, 353 bp, Homo sapiens
  misc_feature (278)..(278): n is a, c, g, or t
ctttctgagatctgcttttagtgaagtggatcaatgatgaaactagccaaatctgagcatcagaagtctttccagtctacctgatgcatgatctctacagttctgagaagcaaaactataaaacaatgtaaaacaataagggcatatgtctggtgtgtgtgtgtgtgtgtgtgtgtgtgtgtgtgtgtacgcacatgtgtttataaagataacagctgtaggaatgaatgagattgagggtgggggggtgcgtatgtatgtctatgaaagcctaatcntttctgggcaatgatgaaaaggttttactactgatctttgtaactatgatggtttctacacttgacctgagctca

SEQ ID NO: 1177 - DNA, 5579 bp, Homo sapiens
gagtcgcgccctcccgccccgcgccgcggaacttgctctaacttcctcggccgagccgggccgcgccgccgctgccgccgccgcgcgcggattctgcttctcagaagatgcactattatagatactctaacgccaaggtcagctgctggtacaagtacctccttttcagctacaacatcatcttctggttggctggagttgtcttccttggagtcgggctgtgggcatggagcgaaaagggtgtgctgtccgacctcaccaaagtgacccggatgcatggaatcgaccctgtggtgctggtcctgatggtgggcgtggtgatgttcaccctggggttcgccggctgcgtgggggctctgcgggagaatatctgcttgctcaactttttctgtggcaccatcgtgctcatcttcttcctggagctggctgtggccgtgctggccttcctgttccaggactgggtgagggaccggttccgggagttcttcgagagcaacatcaagtcctaccgggacgatatcgatctgcaaaacctcatcgactcccttcagaaagctaaccagtgctgtggcgcatatggccctgaagactgggacctcaacgtctacttcaattgcagcggtgccagctacagccgagagaagtgcggggtccccttctcctgctgcgtgccagatcctgcgcaaaaagttgtgaacacacagtgtggatatgatgtcaggattcagctgaagagcaagtgggatgagtccatcttcacgaaaggctgcatccaggcgctggaaagctggctcccgcggaacatttacattgtggctggcgtcttcatcgccatctcgctgttgcagatatttggcatcttcctggcaaggacgctgatctcagacatcgaggcagtgaaggccggccatcacttctgaggagcagagttgagggagccgagctgagccacgctgggaggccagagcctttctctgccatcagccctacgtccagagggagaggagccgacacccccagagccagtgccccatcttaagcatcagcgtgacgtgacctctctgtttctgcttgctggtgctgaagaccaagggtcccccttgttacctgcccaaacttgtgactgcatccctctggagtctacccagagacagagaatgtgtctttatgtgggagtggtgactctgaaagacagagagggctcctgtggctgccaggagggcttgactcagaccccctgcagctcaagcatgtctgcaggacaccctggtcccctctccactggcatccagacatctgctttgggtcatccacatctgtgggtgggccgtgggtagagggacccacaggcgtggacagggcatctctctccatcaagcaaagcagcatgggggcctgcccgtaacgggaggcggacgtggccccgctgggcctctgagtgccagcgcagtctgctgggacatgcacatatcaggggttgtttgcaggatcctcagccatgttcaagtgaagtaagcctgagccagtgcgtggactggtgccacgggagtgccttgtccactgtccccctgtgtccaccagctattctcctggcgccggaactgcctctggtcttgatagcattaagccctgatggcgccggtggcgcggtgggcatggttcttcactgagagccggctctccttttcttaaagtgtgtaaatagtttatttataggggtaagaatgttctcacaccatttcacttcctcttcctctcctccagcattctcctctgagcagccttagatagtgtccatggctggagccgaccctttgagtccccttgagtgtcttaagaaccagcccacaacagcctctctttctcctccacatactgcagcctccctccatgcatcccacatacaagcactcccccactccccagcgtggcctcactgtcttctggtcttggtgctactgaaattgtcacccagaatttgaatcctgaccctccccactgcaagcccagggagccccagcccaagatggccagcctgaaactgttggccagggctcctcttgtggccatgtacccagggctggctggcctgccatttgcctctccccggagacagccgttcttctgcaaccacaccccgtgcctagccacaaccccaggctgcagctgctcagaagctccaggcattttgtttctggtgaccgcccctaatgggatatcggtgatcactggtccacccttcctgtcagggcttttctggggctgctcttggaaatgaagtcttaagtactgaataactcccctggggatagctggggcatttgtctagctgggctactttctaacactttgccatagctcagaccacttctcatcgttcagggatggactgcaaccttaatttacttgccggagtgtacattctagtgtggtgtatactggtggctgttgatgatgatttttttttttttacacaattctctgtagactaggagaagaatgcttgtgtttttcggaagtgtgatgcttctctttgactgccaaactcttttatggaatatatctttatattaatgctgttttggtcatttttgtttggggtcactattgagatattgctaagcatctcagtggtaaacgcggctgccagaggaaccaagggatagggtatgtagaccttacagaaggatggatggtaaaggcagtccatcatcagcacaatctgacttacatttcattgagtaattttttttttttttaagattctgtatggcagcactttcagttgcccttgtgtgccggccacagccgcacaagttggcttgtggtttatcccccgctataagtgagagctggagaaacttcaactccataggtctagaggaaacattgttttaggttatttctgtccacccctgtgcgatactatttattgatccaagcagaagagcttggggacactgagtcgaagtggggacatgggattgaagcctgggcactgctgctgcatgagctgtgtgtcctgggtgtgccggcctttctgtgaagggggttggtggcagtgcccacctcactagatgcctctgacccagcctcccctgggggagtgggtggccacagaccctccctgccagagctcctggaaggctcctgcaggcctgacccatctattcctgtagacctggtttaggatgaagtctcggtgcgatttttgcagagttgggtttatctttcaactatagacccttctggctgttctcagccatatcatgtgactctgaatagttggatgaggaatggaaagaaagcaaggatgagagccggtcacgtggcagtctccgcccagcatcggctgtccgcacagaggcacagggcaggcctcctgtgcactccccacctagcactggcctgtcctgaatccccgccttccctggttggaggccagctgtggcatttgcaccctcttctcacctcaccatgcacatgctaactttaaagccttggggtctttcctgtaccccctcctcaaccctggtccaccccctctcaggatcttgtcaacgttatttttcctgtcccgtcttcctatcgctggccttcctttcccatcctaaaaacttgccgaggccctatggctccctccctttctttcccaggcagcttcttatctgggctgtctgtaccccttcctttgcaccacccaccatgccccacgtagctgaaagctgcttatcccaattgtcaactctggccttcttcagcctctgtagcaccagacactgcacctcctgaatgtcctctgcttctctgcttcagaggcccaggctcgccagttctctgacctctcccatatgtctgcttaggactctgctgcagctgtcctcaccagcctccggggaatcccactacccacagggcagggctgtgggctgggctgaaaaaccatctgcatggtccacaagaagcctggcactgggtttccccatgaataacaatgaaaattaatggatgcacaaccttcctggaacgtggaatttctctgggagattccatgcagaggccactggggaggtggcaggcatgcatgtgactgtaggtggctgcagtgttggaaggctcccagcagagcagagagggtgtcagtctcatcagggaacccacctgatggcttctcagccagcagtctcagaggaacatagacgactgctgagaaaggagggaggcagcagtggtcccagcacctgaggcatcctgctgtcatgggaaggtctccgcccaaatgtcagatgcatcagcctgtcacccgctggtccagagctttcagctgtactggtagggggtgggtggtggagtgctgaatgaccttcacaggtgggcctttccagctctagggtcttacgggtgtcggtccacagaaccacggtttttaggttgtgtgtccggggctatgggaacctgtcccccatgatggatcttggtagagacacttccctctgtcatcgtgcccaggaggatgctgcaggtgactacctgcagccctgttctcattcatttggatgccctccagaaatctggggagccatacacctttagagccttttttgctccttatcaagttggcaaggcttggccaattcctgttcaaggctgcattaaaggcatgttcaccatcctggctaatacggtgaaaccccttctctactaaaaatacaaaaaaattagccgggcttggtggcgggtgcctgtagtcccagctactccggaggctgaggcaggggaatggtgtgaacccaggaggcggagcttgcagtgagccgagatcacaccactgcactccagcctgggctcaaaaaagaaaaaaaaaaaaaaaaaaaggcccgttcattctcaaatgcttttggcgtctccagggtgcctcaggaaaacatgaagtgggcattgtagaacttggggctactgtgtaactttggaagaaaaagttaagggtacttttaagtggatactgttttgatgaaattgccaacttcagggagcccagcttggagaaggaggacgtgagtattccttacaaggctccgaaacaattctttcttcacttagttttctttctgtgctctgcatcttatattccagcagggtcttccaatgcatggtttaataactactagaactggccaggtgcagtggctcacgcctgtaatcccagaactttgggaggctaagacaggcagatcacttgaggccaggagttcgagaccagcctggacaacatggtgatacccagtttctactaaaaatacaaaaattagtcgggcatggtgatgtgcacctgtagtcccagctgctcgggaggctgaggcaggagaatcgcttgaacccgggagacagaggttgcaacgagccaagatcgagccactgcgctccggcctgggtgacaggagactccatctcaaaaaataaaattaaaaaaaaactactacaataaattatcaccttggactgtataaaacaacttttaaactagtctttttaaaaagtacacttaaataaaaatctaaacataagagaatgtaaagtga

SEQ ID NO: 1178 - DNA, 5165 bp, Homo sapiens
gggaagccagacggttaacacagacaaagtgctgccgtgacactcggccctccagtgttgcggagaggcaagagcagcgaccgcggcacctgtccgcccggagctgggacgcgggcgcccgggcggccggacgaagcgaggagggaccgccgaggtgcgcgtctgtgcggctcagcctggcgggggacgcggggagaatgtggactgggtagagatgaacgagacttttctcagatgttggatatttgcttggaaaaacgtgtgggtacgaccttggctgcccccaagtgtaactccagcactgtgaggtttcagggattggcagaggggaccaaggggaccatgaaaatggacatggaggatgcggatatgactctgtggacagaggctgagtttgaagagaagtgtacatacattgtgaacgaccacccctgggattctggtgctgatggcggtacttcggttcaggcggaggcatccttaccaaggaatctgcttttcaagtatgccaccaacagtgaagaggttattggagtgatgagtaaagaatacataccaaagggcacacgttttggacccctaataggtgaaatctacaccaatgacacagttcctaagaacgccaacaggaaatatttttggaggatctattccagaggggagcttcaccacttcattgacggctttaatgaagagaaaagcaactggatgcgctatgtgaatccagcacactctccccgggagcaaaacctggctgcgtgtcagaacgggatgaacatctacttctacaccattaagcccatccctgccaaccaggaacttcttgtgtggtattgtcgggactttgcagaaaggcttcactacccttatcccggagagctgacaatgatgaatctcacacaaacacagagcagtctaaagcaaccgagcactgagaaaaatgaactctgcccaaagaatgtcccaaagagagagtacagcgtgaaagaaatcctaaaattggactccaacccctccaaaggaaaggacctctaccgttctaacatttcacccctcacatcagaaaaggacctcgatgactttagaagacgtgggagccccgaaatgcccttctaccctcgggtcgtttaccccatccgggcccctctgccagaagactttttgaaagcttccctggcctacgggatcgagagacccacgtacatcactcgctcccccattccatcctccaccactccaagcccctctgcaagaagcagccccgaccaaagcctcaagagctccagccctcacagcagccctgggaatacggtgtcccctgtgggccccggctctcaagagcaccgggactcctacgcttacttgaacgcgtcctacggcacggaaggtttgggctcctaccctggctacgcacccctgccccacctcccgccagctttcatcccctcgtacaacgctcactaccccaagttcctcttgcccccctacggcatgaattgtaatggcctgagcgctgtgagcagcatgaatggcatcaacaactttggcctcttcccgaggctgtgccctgtctacagcaatctcctcggtgggggcagcctgccccaccccatgctcaaccccacttctctcccgagctcgctgccctcagatggagcccggaggttgctccagccggagcatcccagggaggtgcttgtcccggcgccccacagtgccttctcctttaccggggccgccgccagcatgaaggacaaggcctgtagccccacaagcgggtctcccacggcgggaacagccgccacggcagaacatgtggtgcagcccaaagctacctcagcagcgatggcagcccccagcagcgacgaagccatgaatctcattaaaaacaaaagaaacatgaccggctacaagacccttccctacccgctgaagaagcagaacggcaagatcaagtacgaatgcaacgtttgcgccaagactttcggccagctctccaatctgaaggtccacctgagagtgcacagtggagaacggcctttcaaatgtcagacttgcaacaagggctttactcagctcgcccacctgcagaaacactacctggtacacacgggagaaaagccacatgaatgccaggtctgccacaagagatttagcagcaccagcaatctcaagacccacctgcgactccattctggagagaaaccataccaatgcaaggtgtgccctgccaagttcacccagtttgtgcacctgaaactgcacaagcgtctgcacacccgggagcggccccacaagtgctcccagtgccacaagaactacatccatctctgtagcctcaaggttcacctgaaagggaactgcgctgcggccccggcgcctgggctgcccttggaagatctgacccgaatcaatgaagaaatcgagaagtttgacatcagtgacaatgctgaccggctcgaggacgtggaggatgacatcagtgtgatctctgtagtggagaaggaaattctggccgtggtcagaaaagagaaagaagaaactggcctgaaagtgtctttgcaaagaaacatggggaatggactcctctcctcagggtgcagcctttatgagtcatcagatctacccctcatgaagttgcctcccagcaacccactacctctggtacctgtaaaggtcaaacaagaaacagttgaaccaatggatccttaagattttcagaaaacacttattttgtttcttaagttatgacttggtgagtcagggtgcctgtaggaagtggcttgtacataatcccagctctgcaaagctctctcgacagcaaatggtttcccctcacctctggaattaaagaaggaactccaaagttactgaaatctcagggcatgaacaaggcaaaggccatatatatatatatatatatatctgtatacatattatatatacttatttacacctgtgtctatatatttgcccctgtgtattttgaatatttgtgtggacatgtttgcatagccttcccattactaagactattacctagtcataattattttttcaatgataatccttcataatttattatacaatttatcattcagaaagcaataattaaaaaagtttacaatgactggaaagattccttgtaatttgagtataaatgtatttttgtcttgtggccattctttgtagataatttctgcacatctgtataagtacctaagatttagttaaacaaatatatgacttcagtcaacctctctctctaataatggtttgaaaatgaggtttgggtaattgccaatgttggacagttgatgtgttcattcctgggatcctatcatttgaacagcattgtacataacttgggggtatgtgtgcaggattacccaagaataacttaagtagaagaaacaagaaagggaatcttgtatatttttgttgatagttcatgtttttcccccagccacaattttaccggaagggtgacaggaaggctttaccaacctgtctctccctccaaaagagcagaatcctcccaccgccctgccctccccaccgagtcctgtggccattcagagcggccacatgacttttgcatccattgtattatcagaaaatgtgaagaagaaaaaaatgccatgttttaaaaccactgcgaaaatttccccaaagcataggtggctttgtgtgtgtgcgatttgggggcttgagtctgggtggtgttttgttgttggtttttgttgctttttttttttttttttttttaatgtcaaaattgcacaaacatggtgctctaccaggaaggattcgaggtagataggctcaggccacactttaaaaacaaacacacaaacaacaaaaaacgggtattctagtcatcttggggtaaaagcgggtaatgaacattcctatccccaacacatcaattgtattttttctgtaaaactcagattttcctcagtatttgtgtttttacattttatggttaatttaatggaagatgaaagggcattgcaaagttgttcaacaacagttacctcattgagtgtgtccagtagtgcaggaaatgatgtcttatctaatgatttgcttctctagaggagaaaccgagtaaatgtgctccagcaagatagactttgtgttattctatcttttattctgctaagcccaaagattacatgttggtgttcaaagtgtagcaaaaaatgatgtatatttataaatctatttataccactatatcatatgtatatatatttataaccacttaaattgtgagccaagccatgtaaaagatctactttttctaagggcaaaaaaaaaaaaaaaaaaaaaagaacactcctttctgagactttgcttaatacttggtgacctcacaatcacgtcggtatgattgggcacccttgcctactgtaagagaccctaaaaccttggtgcagtggtggggaccacaaaacaaccagggaggaagagatacatcattttttagtattaaggaccatctaagacagctctattttttttttgccactttatgattatgtggtcacacccaagtcacagaaataaaaaactgactttaccgctgcaatttttctgttttcctccttactaaatactgatacattactccaatctattttataattatatttgacattttgttcacatcaactaatgttcacctgtagaagagaacaaatttcgaataatccagggaaacccaagagccttactggtcttctgtaacttccaagactgacagctttttatgtatcagtgtttgataaacacagtccttaactgaaggtaaaccaaagcatcacgttgacattagaccaaatacttttgattcccaactactcgtttgttctttttctccttttgtgctttcccatagtgagaatttttataaagacttcttgcttctctcaccatccatccttctcttttctgcctcttacatgtgaatgttgagcccacaatcaacagtggttttattttttcctctactcaaagttaaaactgaccaaagttactggctttttactttgctagaacaacaaactatcttatgtttacatactggtttacaatgttatttatgtgcaaattgtcaaaatgtaaattaaatataaatgttcatgctttaccaaaat

SEQ ID NO: 1179 - DNA, 1313 bp, Homo sapiens
ggggaggaggaggcgggctcccaatccggttccatccggttctcccaccgcccccgctgtgggtctcagcagctcgggcggcgggaggagtggcagcggcaaggcagcccagtttcgcgaaggctgtcggcgcgccgcggcccgcaggcacccggcacgcgccttccccgcaggcacccggcacgcgccttccccgccgccacgatgcccaagaggaaggtcagctccgccgaaggcgccgccaaggaagagcccaagaggagatcggcgcggttgtcagctaaacctcctgcaaaagtggaagcgaagccgaaaaaggcagcagcgaaggataaatcttcagacaaaaaagtgcaaacaaaagggaaaaggggagcaaagggaaaacaggccgaagtggctaaccaagaaactaaagaagacttacctgcggaaaacggggaaacgaagactgaggagagtccagcctctgatgaagcaggagagaaagaagccaagtctgattaataaccatataccatgtcttatcagtggtccctgtctcccttcttgtacaatccagaggaatatttttatcaactattttgtaaatgcaagttttttagtagctctagaaacatttttaagaaggagggaatcccacctcatcccattttttaagtgtaaatgcttttttttaagaggtgaaatcatttgctggttgtttattttttggtacaaccagaaaatagtgtgggatattgaattatgggaggctctgactgtctcgggtgtcagcttaacattccacagatggggggttagtttttatatcctataatacaaagcatattaaatggcaatatggagtcagtcctgcatttaatgtcttgaacattttaaattacttctattaccatgttgttttttagtagaattgtttcctaaagaaaaccactctttgatcatggctctctctgccagaattgtgtgcactctgtaacatctttgtggtagtcctgttttcctaataactttgttactgtgctgtgaaagattacagatttgaacatgtagtgtacgtgctgttgagttgtgaactggtgggccgtatgtaacagctgaccaacgtgaagatactggtacttgatagcctcttaaggaaaatttgcttccaaattttaagctggaaagtcactggaataactttaaaaaagaattacaatacatggctttttagaatttcgttacgtatgttaagatttgtgtacaaattgaaatgtctgtactgatcctcaaccaataaaatctcagttatgaaaataaaaaaaaaa

SEQ ID NO: 1180 - DNA, 2426 bp, Homo sapiens
ccgccgagaaatagggggcgcgtgtttggaaattgatagaaaagataaagggaccgagctgctgtcagcctggcttactgatctgcgtccgtttcaccacggattcagttactaagcatttttttctttttttggttctttgcaacgtgagtggcattggctcagtgatttccatgagcatctctaccagaaaacattgcctcgatgaggtgtggtggaagcccggcagccccttctaatcggctaggcttgagaaagcgtgtacctctgcatttccgaaattaactcagcgtgatcggcaagattttcctcagcatctggtgtcaagacactcgtcactattaattcggaaagaaaaaaaaaaacaaaacaccgttttccagcatttctcttggtggagaactaaacaacaggaaaaatgtctattttccctaagatatctttgagacctgaggttgaaaactatcttaaggaaggctttatgaataaggagattgtgactgctttaggtaaacaagaagcagaaaggaagtttgaaactttgttaaagcacctgtcacatcctccatcatttacaactgtcagagtgaatacacatttagcctcagtacaacatgtgaaaaatctgttacttgatgaacttcagaagcagtttaatggattaagtgttcctattcttcaacatccagaccttcaagatgtgttacttattcctgttattggacccagaaagaatattaaaaaacaacagtgtgaagccattgttggagcccagtgtggcaatgcagttttaagaggagcccatgtctatgccccaggaattgtgtcagcatcacaatttatgaaagctggagatgttatttctgtatactctgatattaaaggaaaatgtaagaaaggagccaaagaatttgatggaacaaaagtatttcttggaaatgggatttctgaactaagccgcaaagaaatcttcagtggattacctgaactgaaaggcatgggcataagaatgacagaaccagtatatctcagcccttcatttgacagtgtactgccccgttacttatttttacaaaatttgccatctgccttagtaagtcatgtactaaatcctcaacctggagagaagattctagacttgtgtgcagcacctggagggaaaacaacacacattgcagcactaatgcatgatcagggagaagttatagcactggataaaatcttcaacaaagtagaaaaaatcaaacagaatgccttattgttagggctgaattccatcagggcattttgttttgatggaacaaaggcggttaaacttgatatggtggaggacacagaaggagaacctccatttctaccagaatcctttgaccgaattcttctggatgcaccctgtagtggaatgggacagagaccaaacatggcctgtacttggtctgtgaaggaagtggcatcatatcagccattacagcgaaaactcttcactgcagcggttcagctgctgaagccagagggtgtgctggtttatagcacgtgcactataacactggccgaaaatgaagaacaggttgcctgggccctgacaaaatttccttgccttcagcttcagccccaggaaccgcagattggaggagaaggaatgaggggagctgggctctcatgtgaacagttgaaacagctgcagcgatttgatccatcggctgtgccattaccggacactgacatggactctcttagagaggccagaagagaagacatgttgcgtctggctaataaggactctataggtttttttattgcaaaatttgtaaaatgcaaaagcacataggagagggatggatgctcagaaatgaaaattccaaacatttgctgtctgtggtttttttttttttaaccaaagtgttgtcaggccaactgaatgatgatgtggttgctatggaaacagaaaaggctgccagctgttttaccagggatccagagacatagaggaagtagggggtggtatgagattatattttctgtttttaaaagattttttttttttatgtatttagtagagtataaagaaaagcagatgcctatagatgtctggagcatattttcatttgtgatctaatgttttaatttgtaaagtgtacaagtcatttttaatgttaaaaattagtgaatctaacaaaaggaataaattagcaatatttgatgtggttatgaaaagttgtttttgtttctaggttcctagtttcttaaggattcagggcatgggaagtaaaacattgactatgtgccaataatggaggtaagtattttacctgactctctgtctgcttatttagtaagtcaaccccctttcaaatgaagtctggacctcctctgaatgatagtgtgaagtgatagtctaaagactatcgtagtctaaatggtagtct

SEQ ID NO: 1181 - DNA, 4420 bp, Homo sapiens
ggcggccccctagcgtcgcgcagggtcggggactgcgcggcggtgccaggccgggcgtgggcgagagcacgaacgggctgcctgcgggctgagagcgtcgagctgtcaccatgggtgatcacgcttggagcttcctaaaggacttcctggccgggggcgtcgccgctgccgtctccaagaccgcggtcgcccccatcgagagggtcaaactgctgctgcaggtccagcatgccagcaaacagatcagtgctgagaagcagtacaaagggatcattgattgtgtggtgagaatccctaaggagcagggcttcctctccttctggaggggtaacctggccaacgtgatccgttacttccccacccaagctctcaacttcgccttcaaggacaagtacaagcagctcttcttagggggtgtggatcggcataagcagttctggcgctactttgctggtaacctggcgtccggtggggccgctggggccacctccctttgctttgtctacccgctggactttgctaggaccaggttggctgctgatgtgggcaagggcgccgcccagcgtgagttccatggtctgggcgactgtatcatcaagatcttcaagtctgatggcctgagggggctctaccagggtttcaacgtctctgtccaaggcatcattatctatagagctgcctacttcggagtctatgatactgccaaggggatgctgcctgaccccaagaacgtgcacatttttgtgagctggatgattgcccagagtgtgacggcagtcgcagggctggtgtcctacccctttgacactgttcgtcgtagaatgatgatgcagtccggccggaaaggggccgatattatgtacacggggacagttgactgctggaggaagattgcaaaagacgaaggagccaaggccttcttcaaaggtgcctggtccaatgtgctgagaggcatgggcggtgcttttgtattggtgttgtatgatgagatcaaaaaatatgtctaatgtaattaaaacacaagttcacagatttacagtgaacttgatctacaagttcacagatccattgtgtggtttaatagactattcctaggggaagtaaaaagatctgggataaaaccagactgaaaggaatacctcagaagagatgcttcattgagtgttcattaaaccacacatgtattttgtatttattttacatttaaattcccacagcaaatagaaaataatttatcatacttgtacaattaactgaagaattgataataactgaatgtgaaacatcaataaagaccacttaatgcacgctttctattttattgaactcttattaactgtaaaatgcatttttaaaagatcaaaaatgcatattttctagcatgattcatgtatcagtcagcagccaagcttctaaatgccagatattatattgagaatgtattatatgagaacgtacaatgcttaaagttccggttttcaaacttaggcaggtcatattctatctatcttatccagcattactgtaggctagaaagtgataatggctttcataatcctgccttgtcttaggcactttcctgcagtctttagaaattctaagattctgctaaaagttttaaatcacaatctggagaattttctatgattaggaagtgctctgttttcatccctttagataactgtgacacctagaattttatgttaagtagagagtattcattgaaaatcaaggccaggtgcagtggctcacacctgtcaccccagcactttgggaggcagaggtgggcgtatcacttcaggccaggagtttgagaccagcctggccaaccgagcgaaaccccatctctaataaaaatacaaaaaattagctgggtgtggtggcgcacacctgtaatcccaactactcaggaggctgaggcatcagaatcacttgaacccgagaggcagaggttgcagtgagctgagatggcatgccaccacatccatcctaagcgacagggcaagactctgtctcaaaaaaaaaaaaaagaaagaaaatcagttgtcttagtttaagctactataacaaggtactgtagactgatggcttataagcaacagaaacttatttctcagttctgtagtctggaggtccaagatcaaggtgacactgtggtcaggttctgatgagggccctcttctgggttataaactacggacttcttgtatccttacatggcagaaagagcgacagagctctctgtagtcccttttataagctcactaatcccattcatgagggccctaccctcatgacccaattacctcccaaatgcccctcctccaaacaccaccactttgggggttaagatttcaacagatgaattttgaagggacacaaacattcagtccatagcatcacttatcaagctagtatttaatacctcttaggccccgtggaagggaaaatagataggaacctgccctgaaagatgcttcagttggggagaaaaggtgaaattccattgttagacaatttgtttaagacaatacatcttgcttgagaaggaatagaagggaaatgaaatggggggagggagtggtaggagatggaggctttgaaagaaaataaccagatttagaaacatgggtatagaaagcatcctccagtacttctgtaacaatttatcaagacctacaggaagtcagttttggatttgctcctccgagatttgcgagccagaggaaaatacttagactatcaggttggaaagttcacacttggaccaggaaaagaccaagcagttgctatagtctcctggattgtgactaatctggaggaagcaagtccctgtatccttggcaaagcttgaaaggcaggcaaatgtcttctctgtgttttctgacaggtggttgggtggtgggggttggtctctgtacctcctgttctttaccttgcttaccaagcccttccaccgactcactcctgcctccccagctaaaaattggctgtgttgcttttaccacagttaccaaggtctgagttttataaaatccaggatcacatctgacctcacctggtagatatctaggccaataaagtctaaagggctaaaaagaaggtacctctccatcctgtctcctcgaggccaggcagcacatgtgcagttaagaggcctcctggatccattgtcctcctgttgcttttcgttctaagtgatccaaactctattgctgatagggaataaaagcagggcaggctagtagtgggcaagtgctttgatggagcgtatctccaagcagggcccaagtttaggaggaggaagacctgatacaatgaatgaacagtgcgtcctcccaacccaaccaagaagtgtaattgtgttccgtctttaaccctggcatggaatggggagggaagaggcatggacatttattacatagtgcacattatctacattctctgcatgtgacccagatgtcagcccttccgcttcctgcgaaggttacctctaatgcacgttgccccaggccctgctgagctagttcctcaccgcagctacttaactcaccatgaattcctagaaccctcagcctctgagagtgctgggatctggcgggagaacaggcagtacttccctcactaacctacccgcacgccataccatcattgtgcaaagctgcctcatgctggaaggtctggtttacgtaaaagtgacaagttggaattgagcgtccgactctcgggtacctgccccaggcatttctcatcagccccatttcccacacagctctctcctaggcgcagccctccttcaccaccaccacccccaccccaatcacctttaggtattttctcccctaaagcctcacctgttggcattttacatctttttaagaccttattttgtattttaaatgtatgagaaaaattatggaggatgatgcaagatgagtgagtccataatggtaataattggacactaaaaacaatgaaaacttgtctcaagtatttgtgttgaaatctcaattaactgggcgactgctcccgttccattttattctgtaaaatatgtggcatcctttgtgttgaggcggcatttactaaacacccccaaggtgcaaggctgcaagagaatcgagcgccgcaaggcgagcttatcttccacacctggtacagtgcccaggacagagaaggtgtttagcaagtttctgctgaatggaagagtgagcgagaagggaaagtgcatctaaaaagcacagggaacctacaaaatatttgggaaagggtttcatcagttcgggtgaaatcttgaacgtgcaaagcaccatgggggtggctggacaggcttgttggagtcgtataatgcaatgaataaaaacttacggctgccttaaatgcaaatgtcaagcccttaaataaaatttaacaaagtcta

SEQ ID NO: 1182 - DNA, 6352 bp, Homo sapiens
aaagctgtcgcccctctctcggatgctcaggctgggcagcgctggacagatgggtacaccccgggcctgacggatgaacagtcgggcaagtgaactctcacctccaaactggctctgcgcccggcgggggcggcggcggcgtctgcagccccgcggtgggggcagccccctcggtctacgcccgactgctgcgcgccgcctctgctcttggcatagtaatttcagttcctgaacgcacggagctcgctccgggaccgggctgagaaggacctcagctcgcgggcccgccggagccatcggtgtggcgccgagagacggtgcttgggatatgcgacgggaagcccccgccacagcgcaggcagtggccccgccgcgccgcggagccgggcagagcaggctggttcttcagaggaatcatccctgactgtgtcatcactctgagctctgactgcgctcccctcccccaccagtgggaccagtactcaagagagctctggagtgctcctgaagagaaattccatggggactgtacctgaccctctgagatcagctaaaacttccctgattgcagcttccggaaaagaagacgatctaggagagccacaggctgcctcacctcggcatcgaccagctctcctgtgtaagaatgccaatggcttttcaggtgcccctgcagaaccagacctcagccccagggcagctgccgaagccctgatgcaggtttgtgagcatgagaccacccaaccagatatgtcttctcctggtgtgttcaatgaagtgcagaaagcacctgccacattcaactctcccggcaatccccagctgccagggagcagccagcccgcagcatcagccccgagttctgcagcaggaagggatcttatacacacaccattgacaatgcccgccaatcagcacacctgccagtccatcccaggtgatcagcccaatgccatcacctcatccatgcctgaagattccctgatgagatcacagagaacctcaaatagagagcaacctgagaaaccaagttgtcctgtgggaggcgtcctcagtagcagcaaagatcaggtgtcctgtgagtttccttctccagaaacaatccagggaacagtgcagactccagtgacagcagccagggtggtcagtcactcatcctctcctgtaggtggacctgaaggggaaaggcagggagccatctgtgactctgaaatgaggtcctgtaaacctctaactagagaatctggatgttcagagaacaagcagccctctgtcactgcctcgggcccccaaggcacaacttctgtgacacctcaaccaacccccctcactagcgaaccttcggcatgtcccccaggtccagagaaggtgccgctgccagcacagcgtcagatgtcaaggttcaaagaagccagtacgatgaccaaccaagctgaaagtgaaatcaaggaagttcccagcagggcttggcaagatgcggaggtgcaggcagtggcgagtgtcgagagcagatccgtctccaccagccccagtatcctcactgcatttctgaaggaaagccgtgctcctgagcattttgaacaagagcagctgcgtgtcatttgccacagcagtgggagccacacactggagctctctgacagcacgctagccccccaggagtccagccagtgccctggcatcatgccacaggtgcacattcaggcagctgcagctgagtctacagctttccaacgggaaaataaacttgcgagcctaccaggtggggtccttaaaacctcatcaatcaatttggtctccagtaatgcccagcatacgtgtaaagaagatgggaggttagcaggaatgactccagtgagggaagagtcaactgctaaaaagctcgcaggtactaattctagctccctgaaagctaccgccattgaccagatttctatcagtgcatgcagtcaagctgaaacaagttatggattggggaaatttgaaaccaggccatctgagtttgcagagaaaacgacaaacggccacaaaacagacccagattgcaaactatctgactcttgtggctctatcagcaaagctgatcattctgggagcttggatcccactaataaaggagatgcaagggaaaagaagcctgcatctcctcaggtagtaaaagaaaaagagtctactggcactgatacctcggatgccaaaaccctactgctcaatcctaaatcccaagaaagtggaggcacagaatcagctgctaatcctacaccctccccaattaggaagaaccaggagagcaccttagaagaaaacagacagaccaagacagccaccagcctgagcctgccatctgatcccatgggtgactccagcccaggttctggcaagaagaccccatctcgctccgtcaaagccagcccacgcaggcccagccgcgtcagcgagttcctcaaggagcaaaagttaaatgtgacagcagctgctgctcaggtaggactcactccaggagataagaaaaagcagcttggcgcagactccaagctccagctgaaacagtccaagcgtgtcagggacgtcgtgtgggatgagcagggaatgacctgggaagtgtatggtgcatccttggacgcagagtccctgggaatcgcgatccagaaccatttgcaaagacaaatcagggaacatgagaaattaatcaaaactcaaaatagccagacccggagatccatttcctcagatacttcttcaaataagaagctcagaggaaggcagcacagtgttttccagtccatgctgcagaacttccgacgccccaactgctgcgtccgtcctgccccgtcttctgtgttagattgaaagggagtatttatgggagtttgtgtataaatttacggtattcacatgcgtccctctatgtcaaagcttgcttagttttttgctgcaagactaggaagaaaaagcaagtattcactataggaaattgctattaaaaattgttagatcctttgacctggagctctataaacaaaaatgtcatttcaatttgaaagaaggaacaagaaaagagaaacaagcttcactgaaggtttgcaaccttaacaaattgaaaataatactcactgggtttttaaaaatatgatgttgttcatagaaatagcattattgtatcattatacatgtattattttgtataactgcctcaatttatcacacagtagtagttccattaaaatccctgcttcatattgaaagtagcaaaaacactattggcgaaaacattgttataatttctagtcttattgcagtaagaatgctgtaaccacacaaattataaataggtgataagaaccataatgaaaaaaatgagaacatatttgattcattcctaggccagataacattaaataaaaacagttaaatgtgtaaaatatgaaatatgaattaatgtttataaacatctgcagacaactctttttataaaccttcttattgctgttaataaatataagaaagttatattaggaacattagctaagcttttgactatgaaaactgcctacattaaacatggatttatatagacccattttcctgcactgaaggcaaggcgcatctctgtgattctgaccagacatattcatattttcttaccctagaggaagtacatgggactgaattcttgaaaagagccatcaaattagggataatactaaattgatactgtgcaggtgttctccagtgatattctactgagaatgctaaggttctggtcaggaactataaatagcagattaccaaacactgctttttctgtgatgataaaagcctcataagtaacaaaaacaatgtttaatttagactcctgtaaacaggatgcaattagtgattttttttaattgggttcagtaacttccagtaacaaatgtagtcaacaccaaattagaatgtgagcttccttacaatttttgtacatagactactatcatctaattgcttaaatatatatgctggagtaaaaaggtaacttctgcaaacttattgattttaagagaaatacccataatatccttcaaacccaatgaaagaagaggcctttacgaaaacatggcttgtgatttgggtggattatacttcctgggaccttggccctcccgtgtctccagaagagacgtgtgtcccgagacacatgagtatcctccaaggcactggcctggatgagcagcatcgccttgagaattggggtagtgtggaaaggaagaatgaacaacggccctgggaagccttcccttcctgcagatattgttgggggagtgctggtctccattttgcgtttagaaaaccagacttagatgctggaggggcaccggttgtcttctttgaactcattccccgtaatgagctagaaaagagtacctaaccataggtattctctctagagactcatgtgtcccgtgggtacagtcaattcacagtatctgttctggcttttttcactttaattctgttctgcacattctgaacatatgcaggaaaaaaaatcattcctgaacttagcacaagctacactcgacacaacctaaattagtaaaaagcctttgatttattttgaagcaatttaactgtagacaaagcttgcatatatggaacagtattctcagagcctgagagttgttacagttgttctatttggaaattagaaggaattttttaataaggcacatttttcagtttcttacccattggtgtctattaagaatactatgtaatgttgaaatttccatcaaattaccaagcaaattactattaatgattagagatttagcctaacactctctctttgggccttaaatacccatttgtagttgtgttcgtgtcacttctgtctcagatgcctctgccaggacataatctctctaactcttgctagctggcttctccctcccacatgggcatacatgctgtgtatacacagagtacagcctgtgtacacagtagcagctgtcaacagggcctactccagatgggtggccccaggtaatcctctgctgtaaagtggctagaacaggctgtccctgcattaaaataggtgagaataaggaatttcgcctctgataataatatttattttcatgactttagagtaaccacatgatttgtaaacagttaaatgaagcagaggcctgagagagttgttggcatttgtctcacattaaatacattaaaattgctagatttgctattgtggttatgtctatcaaaactttaagaaaatttgtttaatgtactgagtttaactgattttctttggtgctgggaccaaattcttcacttctacaacactcaagagattgtcacaaaatattacaaaaatattgtttgttttgtggctcattaaaccctatataactaacagcttttaaggacattaacagaaatatatcttcagatggataaataagatagggacctattcaagacagcagcatttttgtattgtgatacctcccctaagttactctcacaataaaaccttatttgagaattttccttcacttcaatctgtgacatagcattaggcatttagtataccttatttgtgaaacctaaggttcattcaacagatgaagctgcaaaacagttttcttggtagactcttggaacttgctcagttttttccttactttacctgcatgacacacattgggttgaaagttgtttggttttacccttcatttctcttagatatgatttggttctttttcatgcattatatttttgaaatatatggaggaaatattttattgaatcaagaaatagaaaatattccttaaaccagtagtaaaaaggtgagttagaactccatgtctggaagacaattcaacatttaaaatattaagatgctataccacttaacaagtgaatactaaaatttttaatttaaagattgattgttctgtttttatgaccatgagaaaaatgtgacagcttcagctgtcatatgtttatcttgaatgcttttctaattatgtatttctggattattgactttgaatgccacagaccaactactttacatagagtaaaatattgattaacctttgtgctttgggtcactggcaaaagttgaacatcctgataagtcaatgttaaccagaaacctttttgttcacgtctgaaattgaatatttataaaatgtgttagtatgtttcctgccttgataagttcacctatattgaatgtaatttgatctttgataattttttttaatcttgagaattctctgatactgttttgaataccagtgttcaccatgttataaagttaaacataaaaattgaaataaattgaactaaatat

SEQ ID NO: 1183 - DNA, 4373 bp, Homo sapiens
ttttggcgtagattccccactgatcgaggcattttttttccctttttttttcctttttttttttcttttaaaaattttggccatcgttctccgtacgggggctttttctgtctgtctgtctggctggcaggctggctttccccctctttcccacggagcccgagccgggcgcccggtggggagtggggagtgggtggggggagccagcagagttccattttggaacgcccgtgccgcgtctccgcgttcccagcccgggtccccgcgttcacagccccagcgcaggtctggatgtaccgactgcttttggaataaaaagattcccaggatgtgagcaacacgggaccgatatgatgcttcctggtgtgtttagtggttggtgccattccaattttctgtgctgaaatcattctgaaaactcaaacagtagacttcagcacacaaggaaagccaaagccatttgagggggaataaagccaaaagcctttcaccttattcgttccaagaatctcaccgccccctccttatccccctccaaaaataagccattgcacacagacaggcagcatggctagcaaacgaaaatctacaactccatgcatggttcggacatcacaagtagtagaacaagatgtgcccgaggaagtagacagggccaaagagaaaggaatcggcacaccacagcctgacgtggccaaggacagttgggcagcagaacttgaaaactcttccaaagaaaacgaagtgatagaggtgaaatctatgggggaaagccagtccaaaaaactccaaggtggttatgagtgcaaatactgcccctactccacgcaaaacctgaacgagttcacggagcatgtcgacatgcagcatcccaacgtgattctcaaccccctctacgtgtgtgcagaatgtaacttcacaaccaaaaagtacgactccctatccgaccacaactccaagttccatcccggggaggccaacttcaagctgaagttaattaaacgcaataatcaaactgtcttggaacagtccatcgaaaccaccaaccatgtcgtgtccatcaccaccagtggccctggaactggtgacagtgattctgggatctcggtgagtaaaacccccatcatgaagcctggaaaaccaaaagcggatgccaagaaggtgcccaagaagcccgaggagatcacccccgagaaccacgtggaagggaccgcccgcctggtgacagacacagctgagatcctctcgagactcggcggggtggagctcctccaagacacattaggacacgtcatgccttctgtacagctgccaccaaatatcaaccttgtgcccaaggtccctgtcccactaaatactaccaaatacaactctgccctggatacaaatgccacgatgatcaactctttcaacaagtttccttacccgacccaggctgagttgtcctggctgacagctgcctccaaacacccagaggagcacatcagaatctggtttgccacccagcgcttaaagcatggcatcagctggtccccagaagaggtggaggaggcccggaagaagatgttcaacggcaccatccagtcagtacccccgaccatcactgtgctgcccgcccagttggcccccacaaaggtgacgcagcccatcctccagacggctctaccgtgccagatcctcggccagactagcctggtgctgactcaggtgaccagcgggtcaacaaccgtctcttgctcccccatcacacttgccgtggcaggagtcaccaaccatggccagaagagacccttggtgactccccaagctgcccccgaacccaagcgtccacacatcgctcaggtgccagagcccccacccaaggtggccaaccccccgctcacaccagccagtgaccgcaagaagacaaaggagcagatagcacatctcaaggccagctttctccagagccagttccctgacgatgccgaggtttaccggctcatcgaggtgactggccttgccaggagcgagatcaagaagtggttcagtgaccaccgatatcggtgtcaaaggggcatcgtccacatcaccagcgaatcccttgccaaagaccagttggccatcgcggcctcccgacacggtcgcacgtatcatgcgtacccagactttgccccccagaagttcaaagagaaaacacagggtcaggttaaaatcttggaagacagctttttgaaaagttcttttcctacccaagcagaactggatcggctaagggtggagaccaagctgagcaggagagagatcgactcctggttctcggagaggcggaagcttcgagacagcatggaacaagctgtcttggattccatggggtctggcaaaaaaggccaagatgtgggagcccccaatggtgctctgtctcgactcgaccagctctccggtgcccagttaacaagttctctgcccagcccttcgccagcaattgcaaaaagtcaagaacaggttcatctcctgaggagcacgtttgcaagaacccagtggcctactccccaggagtacgaccagttagcggccaagactggcctggtccgaactgagattgtgcgttggttcaaggagaacagatgcttgctgaaaacgggaaccgtgaagtggatggagcagtaccagcaccagcccatggcagatgatcacggctacgatgccgtagcaaggaaagcaacaaaacccatggccgagagcccaaagaacgggggtgatgtggttccacaatattacaaggaccccaaaaagctctgcgaagaggacttggagaagttggtgaccagggtaaaagtaggcagcgagccagcaaaagactgtttgccagcaaagccctcagaggccacctcagaccggtcagagggcagcagccgggacggccagggtagcgacgagaacgaggagtcgagcgttgtggattacgtggaggtgacggtcggggaggaggatgcgatctcagatagatcagatagctggagtcaggctgcggcagaaggtgtgtcggaactggctgaatcagactccgactgcgtccctgcagaggctggccaggcctagacagggaagtctgttagaactgctgtgctgatcaacgggacgctccgtctttgaagaaagaagagatggtctctccccagccatgggccacccttgccagtgactccaagtggaactacttagctcgcgtgtgcctggagggtgcgggaagtccagcgactctcagacgcacctcccagaggaccggtgggaattgttcatagtgccaaagtcctactactgcgttttcaatgggtccttgtacatagtttgctcctctgccctagccctcacctcttgctatactggaaccgatttgtacaatgtgggaattttgttacctttttaatcaagggcaacttccttttccagcactaccattgtaaggtttttttcaggagggagggctaaccaccttgcttttctcttttctctttttcttttttttatttttgttttattaatttggggaaaggggtgttagcattagtgccatgatatctactggattttaagtagggagactttatttttaaaggtaggttgaaatttgggagatttctcggcaggaagggctgaaatccaggcccctgtctcaacttggagagaggtgacagacggcagatcttccaaatcaaattcctttccagttcttcccctggctgcctttttgggggtccctgccttagccccacacaaggctttctgaactgccaagaggggatctggcttctcaactgctcggcctcttgggccaggctgtgcccagccagccctgggagaactgggtagcaggtggctgacttctttaagcacctttctaaataccagcagaagaggctcccgcctctgttagcatgatcagtactattgtgacattaaaacaacaacaataagatcttcctatctggagggtacagaggtgaatggctttggttttcatttctcttcttcactgccttttctcggtgtggtatttgacaagattttagctcaaagcctcaccatgaattgattttttttgtttgtgtgtgtgtttgttttgggacaattttagatacctgagtgcactttttcagttagtcctaacttttaaaagaaggaaaaccaagagacatatctggtgtacgtgttgcagtatgaactctggttgcaatccctccccgtcccacactgccccccatttgagtacaccgcacaagtcaaacgctaggaagtttgaataaaaccaatttttctaacttgttgctcatttgttgtaactcaataaagcaaagactaaacatttttataacctttaaaaaaaaaaaaaa

SEQ ID NO: 1184 - DNA, 2643 bp, Homo sapiens
acacaacgcgcaggcgccgcctagaagtgacttctccaaaaagtgtgttagttcccggtcacctgagctccgggtgacgcggctgcggtagctgcggatacaagccttccgcgggtcctgcctggcgaccccgacctcctcctgctgtctctccgctccgccaccccgaacccgccaaggtcctgtccttttcctcctgtcctttgccagcgttgggccggaccgggccgagccgggccgcccgggcgcagtctttaaccatggcgtccctcttcaagaagaaaaccgtggatgatgtaataaaggaacagaatcgagagttacgaggtacacagagggctataatcagagatcgagcagctttagagaaacaagaaaaacagctggaattagaaattaagaaaatggccaagattggtaataaggaagcttgcaaagttttagccaaacaacttgtgcatctacggaaacagaagacgagaacttttgctgtaagttcaaaagttacttctatgtctacacaaacaaaagtgatgaattcccaaatgaagatggctggagcaatgtctactacagcaaaaacaatgcaggcagttaacaagaagatggatccacaaaagacattacaaacaatgcagaatttccagaaggaaaacatgaaaatggaaatgactgaagaaatgatcaatgatacacttgatgacatctttgacggttctgatgacgaagaagaaagccaggatattgtgaatcaagttcttgatgaaattggaattgaaatttctggaaagatggccaaagctccatcagctgctcgaagcttaccatctgcctctacttcaaaggctacaatctcagatgaagagattgaacggcaactcaaggctttaggagtagattagtcaaaagaagtcatactattttgcttacttataattatgtagtataaaccaagcacagtgcagatttcttttacaaaacacatgtattttgcaaaaaaaaaaaaaatgaagaccatgagtgaacagttgtttcctaacccatggctatttagaatcttttgccaaagaatgacaatgatgcaaaaatgggaacagtttggattttaattagaactgtttaggagtgatgatgtgtaaaaagttgacttctcttttgcatggcacagagaaattatattccttacttcatgtcagtttatgttctaaatctttttcactgaatataaaaatcttgttaaatgccattaggcaccaacttaaagagggttgtaaaaatattaaaagtatatcgttaattctgtatctgttgcttgtcttttgtaagtgattatgtgttatgaccataggtggttacagctgccaaattatttttaaatggtcaaaaagaagagtgctatttaaacatctgtcttaaacaaaaactgtcataacttttcttttttctttttccattaggagaacattctagttggtaaatttcaaaatgtgcttgacacctgccttaaatagcacagacctattgtgcacatctttaaattatttcagctggcagaaaagaattacatttaaaactgaaatcaaggcctcaatacaaagattatcctggctcttttctatctctgtgggcctaattgaaatatgtactcttattttagacacgcctctgttaaaacagaccaggttttcctggtctcagacctatgatgacttgtccctttgatgtcactactgtgaattgaatataattagtaaaaatagacgatgaataaataacactttatagtaagaaaacaatatattttggccatctaaaaatgagaattataattatatgaattataatttaaactgtttaattttgtttaatgtgtatattgaatcttccaaattgaagccattattctcaattaagtactacaactatgacaatgcttgacctacatttctaaaataaaaattcacattttttgataaataaactacagttttaccagaaattactatctaaatgtgtattagcagtattttttaaggtgaaattgccttggtatctaatgaatgtgtagacagggagataaaatgaaggattgccagactagttagaatagaatttaggattaggttagttttgaaaaatgatgttgtaatatatgggttctaacacatcctaccataaaaactggaggagatatgtgtaacctggttaatttgggatggtggacattttgggctaatactgacaaaatacatcttaggactagtatacatgtgacacggattgctaggaggaatgaaaaactaaactgtatagtttatattccgtaaaccattttataatgttcaaagattaggttttgttattgatagtattaaatacacagtttctcttaacagtgatgggtgaaaacattttaccggattatggaatgtttaccagaacatgttttgattcttgaatgtacataataatgccatctaacttatttacgttcttgtttacatgtgggagcttttgttttcaaaaattattttgttaaaaaatctcaataaagatttattattgttgttcttttcttaccttttttgctctttttggttcctgctaaaattaaaaattttatgcataaaaaaaaaaaaaaaa

SEQ ID NO: 1185 - DNA, 1219 bp, Homo sapiens
agacacgtgatgcgggggagggggggggggcgtggcaggagcaagcgtctgccgcggtggccgggtgccgatttgacaagatcaaagctgcaggaaaatggacagtgaggttcagagagatggaaggatcttggatttgattgatgatgcttggcgagaagacaagctgccttatgaggatgtcgcaataccactgaatgagcttcctgaacctgaacaagacaatggtggcaccacagaatctgtcaaagaacaagaaatgaagtggacagacttagccttacagtacctccatgagaatgttccccccattggaaactgacgcttggctcctttcttgtggatggattttctcaaagtacacagataaagcatggtttgtttcagtctccaaattcaaacctttgagtaataaatcagcactcaaaaatgtacacccatttagtttgtggtagcaaagtgcaatgcgaaattgaatgagaaactgagatttctcagtaatggtgaatatttcgctctttaaacctaaaactcttcattgagtagcttatatttgaacatgattggttaaacatttgcctctacctctgattttgctttgctgtcaaagtttaacaccttccaactacttatgtgtgtcctgtaacacaggtgattgaacgtatgagagggaaaggcaaagaaaaaggaagccagacactaggagaattattaacttctcatacttccccacattgagaagcattcggagtgtatttagcctgtagatgttgtgatatgcaaatatcccattccctggttactggcattcctaagattcttcatggtattttcaaactttggataaatttacagattagaaagatatctgacagttaatctctgttctccttacaaattccttttgtgctgctggaaaggatctttggctaggtggatgactagttttattcaaagccttttctcaaagccctttcagttacaaccaccccactatggaatcagtatttagttatacatttgtataagaacctgtattttgaaaaacacattcatgtatatttattcctggaattatttgcctgttaaacagtgtctttcatgttctctccccagattgtaaactctgtaagaagctgcttgtatctgtatcccttgttgaaactctgaaaacactgaataactaaaatctcttctcatcctttttaaaaaaaaaaaa

SEQ ID NO: 1186 - DNA, 3435 bp, Homo sapiens
tgccctcccgcggctgcagccggagccgaaggtggtggctgcacagtagacgccccctcacggcttcccccacacgctcccgccccctcgctcgcccatcgcgcttccctcacaggctctgcagtcctcccccacagacgccttcccccttggactctcattcccttttccacggagccccgcgctttcgtgagccccctcgaggaacctggtctccgcatccagttaccacctcctgcctcagaggccatctgagcccttcgcacctcgcccctcagtccccccttccccccccgcccgcgtcgcctcgctccctcccgcccccccatcatcccttccctcgcagttcccctgtcctgaggggagccccgccacgggcagcgcggcggcggcggcaggagggagaaagtgaagcggtagctcgcgcacactcgcgccctcactcccggctaggcggcacccaccgccgggaggaggaggaggagccgagaggagctgagcgagcgcggaagtagctgctgctggtggtgacaatgtcaaataacggcctagacattcaagacaaacccccagcccctccgatgagaaataccagcactatgattggagccggcagcaaagatgctggaaccctaaaccatggttctaaacctctgcctccaaacccagaggagaagaaaaagaaggaccgattttaccgatccattttacctggagataaaacaaataaaaagaaagagaaagagcggccagagatttctctcccttcagattttgaacacacaattcatgtcggttttgatgctgtcacaggggagtttacgggaatgccagagcagtgggcccgcttgcttcagacatcaaatatcactaagtcggagcagaagaaaaacccgcaggctgttctggatgtgttggagttttacaactcgaagaagacatccaacagccagaaatacatgagctttacagataagtcagctgaggattacaattcttctaatgccttgaatgtgaaggctgtgtctgagactcctgcagtgccaccagtttcagaagatgaggatgatgatgatgatgatgctaccccaccaccagtgattgctccacgcccagagcacacaaaatctgtatacacacggtctgtgattgaaccacttcctgtcactccaactcgggacgtggctacatctcccatttcacctactgaaaataacaccactccaccagatgctttgacccggaatactgagaagcagaagaagaagcctaaaatgtctgatgaggagatcttggagaaattacgaagcatagtgagtgtgggcgatcctaagaagaaatatacacggtttgagaagattggacaaggtgcttcaggcaccgtgtacacagcaatggatgtggccacaggacaggaggtggccattaagcagatgaatcttcagcagcagcccaagaaagagctgattattaatgagatcctggtcatgagggaaaacaagaacccaaacattgtgaattacttggacagttacctcgtgggagatgagctgtgggttgttatggaatacttggctggaggctccttgacagatgtggtgacagaaacttgcatggatgaaggccaaattgcagctgtgtgccgtgagtgtctgcaggctctggagttcttgcattcgaaccaggtcattcacagagacatcaagagtgacaatattctgttgggaatggatggctctgtcaagctaactgactttggattctgtgcacagataaccccagagcagagcaaacggagcaccatggtaggaaccccatactggatggcaccagaggttgtgacacgaaaggcctatgggcccaaggttgacatctggtccctgggcatcatggccatcgaaatgattgaaggggagcctccatacctcaatgaaaaccctctgagagccttgtacctcattgccaccaatgggaccccagaacttcagaacccagagaagctgtcagctatcttccgggactttctgaaccgctgtctcgagatggatgtggagaagagaggttcagctaaagagctgctacagcatcaattcctgaagattgccaagcccctctccagcctcactccactgattgctgcagctaaggaggcaacaaagaacaatcactaaaaccacactcaccccagcctcattgtgccaagccttctgtgagataaatgcacatttcagaaattccaactcctgatgccctcttctccttgccttgcttctcccatttcctgatctagcactcctcaagactttgatccttggaaaccgtgtgtccagcattgaagagaactgcaactgaatgactaatcagatgatggccatttctaaataaggaatttcctcccaattcatggatatgagggtggtttatgattaagggtttatataaataaatgtttctagtcttccgtgtgtcaaaatcctcacctccttcataaccatctcccacaattaattcttgactatataaatttatggtttgataatattatcaatttgtaatcaattgagatttctttagtgcttgcttttctgtgactcaactgcccagacacctcattgtacttgaaaactggaacagcttgggaatgccatggggtttgataatctgccagggacatgaagaggctcagcttcctggaccatgactttggctcagctgatcctgacatgggagaacaaccacatttttctttgtgtgtgcttctagcagctgttcgggaggaccttgacccaatagtgttcccatgctgtttcttgtgaaatgctctcggctatgtagcagcttttgattccctgcataccctaggctgctgcccctatcctgtcccttgtttataacattgagaggttttctagggcacatactgagtgagagcagtgttgagaagtcggggaaaatggtgactacttttagagcaaggctgggcatcagcacctgtccagctctacttgtgtgatgtttcaggaactcagcccctttttctgcctaggataaggagctgaaagattaacttggatcttctaatggtccaaatcttttggtcacaataaagagtctccaaattagagactgcatgttagttctggatggatttggtggcctgacatgataccctgccagctgtgaggggaccccgtttttaagatgcatggccaagctctctgcaaatggaaatgcttacactgggtgttggggatgtttgctacctcctgctatttttgtggttttggttctcccactatggtaggacccctggccagcattgtggcttgtcatgtcagccccattgactaccttctcatgctctgaggtactactgcctctgcagcacaaatttctatttctgtcaataaaaggagatgaaaatattctaaaaaa

SEQ ID NO: 1187 - DNA, 4716 bp, Homo sapiens
gaagaactggaactggtctggccatagggggaagcggcgcgttaaatccgccccctctccataccctactttcaaggggtgggcggtagaggggaggttggggttggagcagcggcgagggggcccctcccttgcacctccccccaccggacttggtcgcgcccgaagtgtaacactttctctttgtcggaggagctcctctgtttcctgtgcagtagctcccgttgcggcggcacccgtggcagccctggcggacgcaggagcgatggcagcgaccgatatagctcgccaggtgggtgaaggttgccgaactgtccccctggctggacatgtggggtttgacagcttgcctgaccagctggtgaataagtccgtcagccagggcttctgcttcaacatcctgtgcgtgggagagacaggtttgggcaagtccaccctcatggacaccctgttcaacaccaaattcgaaggggagccagccacccacacacagccgggtgtccagctccagtctaatacctatgacctccaagagagcaacgtgaggctaaagctcacgatcgttagcacagttggctttggggaccagatcaacaaagaggacagctacaagcctatcgtggaattcatcgatgcacaattcgaggcctacctgcaggaagagctaaagatccgaagagtgctacacacctaccatgactcccgaatccatgtctgcttgtatttcattgcccccacgggtcattccctgaagtctctggacctagtgactatgaagaagctggacagtaaggtgaacatcatccccatcattgccaaagcagatgccatttcgaagagtgagctaacaaagttcaaaatcaaaatcaccagcgagcttgtcagcaacggagtccagatctatcagtttcctacagatgatgagtcggtggcagagatcaatggaaccatgaacgcccacctgccgtttgctgtcattggcagcacagaagaactgaagataggcaacaagatgatgagggcgcggcagtatccttggggcactgtgcaggttgaaaacgaggcccactgcgactttgtgaagctgcgggagatgctgattcgggtcaacatggaggatctgcgggagcagacccacacccggcactatgagctgtatcgccgctgtaagctggaggagatgggcttcaaggacaccgaccctgacagcaaacccttcagtttacaggagacatatgaggccaaaaggaacgagttcctaggggaactccagaaaaaagaagaggagatgagacagatgttcgtccagcgagtcaaagagaaagaagcggagctcaaagaggcagagaaagagctgcacgagaagtttgaccgtctgaagaaactgcaccaggacgagaagaagaaactggaggataagaagaaatccctggatgatgaagtgaatgctttcaagcaaagaaagacggcggctgagctgctccagtcccagggctcccaggctggaggctcacagactctgaagagagacaaagagaagaaaaattaactctgctgtttgctgcatgctgcatgagacccagggtcctgtttgggcttcctgtagacacccttttcctgcgcaacagagctgggcctccctttctctaatttcccccttaacatgcctggggggcatacaatccaacccgcgccctctcctctcttcctgccaaggtttatagaaacctgagaatctgagggtgatgtctggccgctggtcaagaagccaacagtcatgtggctcgcagatgcatcctgcatcccagtccccctcccagcacccccagccatcccccctgtcttcccccacatctttgccagaggtgtgacatggtcagggggcccatctgctactctttcccaccagctcccctgttccagttctggttgctgttagtttccctgaggtatttgcaaccaccatggctgggtaaccaccgatcagcacagctgtccccttggtctcctgtatcccagtcactagtcctccctggtccaccccaccctcatcctcaggagccacagccatttcttagagggtttcaaaaggacagcctttggcgccttttccttctaacctttgagtccagccctttccagttttcattcactcgaagtaactgcactcaagctgtgctcaaaatcggcaacgcatttatttacaccaagcccttcccataaaacacaactgctgaagaaaatagcagacgtttcccctctctctaactctgggtatcccacagatgcaaaagggagaataaacctgaatattattaccagcctagagtcttgaatgatagccttaccgaattcttcttgtgaggtatttcagcatctcggggggtaatttccggaagggctccatactgtcccaataaggtgaggccagtagcaggaataataaatcccactttgtaggctggaaaactgagctgtcaaaagaatcaagtgtttgggggtttgctctgatgagtcttctagttcatttggtgaatgtcatgatgatttttaacatgcattttgcatgcatcccccaataagaagagatgagactcggccggagagaagaaaaggcccttaactttctttccaatttaaggagttgagagtttaaaaatattccagccctaagtttttatcatgggtcccatctgatagtggctttgggaacctctgtgaagtagagagccctcccttgtcagggttatgaggcacagtggcctttggtgtttggccagtgacagtgtgagagatggagttgacctggcaatgatctgtggctaacatgccgtctctctgcccttcctttgcagtaatccatggctgtgtactgaatagtattccccgctacagctggactggactccatttagccttttaagccgaggttcctattttaactgacagctttcctttggggtgccaggcagcgaggccccccacccctatcctgccatgtacttcaagctcacttcttctttttgagttccgcaacttgctcctgcctcccagccccactggcactgaccatgaccacctacttctattttttttttagagtttctttttttgatcacttactttcaaagcacacagtcaaacaaggttatgccaaatttccaggcctttttgaagtattgagaaggggaaggggatttctcacttcaattatagatcataataggaagcaaaaagaaaaaaatgaaaagcaaacatatgcacgcacttttcttgttgacaaagcaagaatataggtttgctgtgtaggtttggtgctctattgattggtgagtgaccagagcaagtatgaaggtgatgctgccaaagcacaagccagtttcttgggaaaattcaagttacagtggagtatttttttgaagaccatatgcttggaggtagaaacaaaccaacgaccaaaaaaaaaaaaaaaaaaatctgctcagatactcagccagtagctcagagagatgctgagttaggcctgtcaggtctccttgggaaaggcttcatatttgcaactttgatgattctatgtccagcttcagagctgctttcccagaaattcacgcttaaacaaccaaccggtaaccaccacttccccacaccgccgcccggtaattatttgcattacaaaccggaggcgccctcatttgcatttgtgtacagattaactagttaaggcttgagaagctctgaataattcaaaagtattagacccacacagccttggagagaccttcagaaactaaggaggagttttatattaagggagacattttagtcagtaagacgatataacctacttactccgtaaggggaaatgaaggcccagagaagggaagggacttgaccgaggtcccacttctgtttcgaggcagaagccagactaattttcatgcctcctgactcccaatcagtttcacaaagggattcaatctgtttatatacgttacattcctggatacgaggtcttttgatgttcagagtaactgactagttagtattagaagaccctcgaggtttttttccacagaaaaacatctgaagatggattgggtgagggctggcaaaacgaaggcatgccgggccagctccttaacccaatgacccagtgatgctgcaaggctggaacggggtccaggagactgtgtgtaacaggtgccctaggtgacccttataatcagggaagtttggtgaacaaaaatcgaacccatgagtgaacataaattaaaaagttgatcaacctattaaaatgtgtatttcattgggtagcttttctcactgtagacagattttttccttcttcaatgaaaaggcttttaaattagtacaactgttactatttaaaaaaaaaataccctaagtactctgtttacttctggtgaaacaaaaccagtcattagaaatggtctgtgcttttattttcccagactggagtggcttttctgaaacacacacacacacacacacacacacacacacacacacacacacacacacgtacacacatccctcacttctcttaagccaagaagtttgctttccctagctgcagtgtagatggctcttgtttttgtttttttgttttaatcatttggcattcacatgtggctgttaatatgtgcttgtttttaattaaaacaagaagctttaaaaaaaaaaaaaaaaaaaaaa

SEQ ID NO: 1188 - DNA, 2168 bp, Homo sapiens
ggagttagcctcgctcagggcgcggctaaggcgcccagatggcctgcgggcgccaccacgtccctggtcccagctcgggagcacatcagaggcttagaggcgagtgggaagggactcagacagtgcaggacgagaaacgcccgcggcaccaaagcccctcagagcgtcgcccccgcctctagttctagaaagtcagtttcccggcactggcaccccggaacctcaggggctgccgagctgggggggcgctcaagctgcgaggatccgggctgcccgcgagacgaggagcgggcgcccaggatggggtgcatgaagtccaagttcctccaggtcggaggcaatacattctcaaaaactgaaaccagcgccagcccacactgtcctgtgtacgtgccggatcccacatccaccatcaagccggggcctaatagccacaacagcaacacaccaggaatcagggaggcaggctctgaggacatcatcgtggttgccctgtatgattacgaggccattcaccacgaagacctcagcttccagaagggggaccagatggtggtcctagaggaatccggggagtggtggaaggctcgatccctggccacccggaaggagggctacatcccaagcaactatgtcgcccgcgttgactctctggagacagaggagtggtttttcaagggcatcagccggaaggacgcagagcgccaactgctggctcccggcaacatgctgggctccttcatgatccgggatagcgagaccactaaaggaagctactctttgtccgtgcgagactacgaccctcggcagggagataccgtgaaacattacaagatccggaccctggacaacgggggcttctacatatccccccgaagcaccttcagcactctgcaggagctggtggaccactacaagaaggggaacgacgggctctgccagaaactgtcggtgccctgcatgtcttccaagccccagaagccttgggagaaagatgcctgggagatccctcgggaatccctcaagctggagaagaaacttggagctgggcagtttggggaagtctggatggccacctacaacaagcacaccaaggtggcagtgaagacgatgaagccagggagcatgtcggtggaggccttcctggcagaggccaacgtgatgaaaactctgcagcatgacaagctggtcaaacttcatgcggtggtcaccaaggagcccatctacatcatcacggagttcatggccaaaggaagcttgctggactttctgaaaagtgatgagggcagcaagcagccattgccaaaactcattgacttctcagcccagattgcagaaggcatggccttcatcgagcagaggaactacatccaccgagacctccgagctgccaacatcttggtctctgcatccctggtgtgtaagattgctgactttggcctggcccgggtcattgaggacaacgagtacacggctcgggaaggggccaagttccccatcaagtggacagctcctgaagccatcaactttggctccttcaccatcaagtcagacgtctggtcctttggtatcctgctgatggagatcgtcacctacggccggatcccttacccagggatgtcaaaccctgaagtgatccgagctctggagcgtggataccggatgcctcgcccagagaactgcccagaggagctctacaacatcatgatgcgctgctggaaaaaccgtccggaggagcggccgaccttcgaatacatccagagtgtgctggatgacttctacacggccacagagagccagtaccaacagcagccatgatagggaggaccagggcagggccagggggtgcccaggtggtggctgcaaggtggctccagcaccatccgccagggcccacacccccttcctactcccagacacccaccctcgcttcagccacagtttcctcatctgtccagtgggtaggttggactggaaaatctctttttgactcttgcaatccacaatctgacattctcaggaagcccccaagttgatatttctatttcctggaatggttggattttagttacagctgtgatttggaagggaaactttcaaaatagtgaaatgaatatttaaataaaagatataaatgccaaagtctttaccaaaaaaaaaaaaaaaaa

SEQ ID NO: 1189 - DNA, 2999 bp, Homo sapiens
gagtactgtgaagatgtggtccccaaggctagagctgaaaagaggcttagggccgggtgagccttccagccagggcctgcctccaagtgatgctcccccagggcagggggcataaggatggcacccagccaggtgggagcctgggccctgcccagcctcaaagctttgagctcaggaaatccggaggcaggggagggggacatcgttgccacattccccagccctttaagacccccaaggcaggaaggctgcccgggcctcaccagcttccctcacaggctccttcctgggaggaaggggctgcctgtgccctcgaaggcgcaagggagggcaggagggaggctcggaaggtgttgcaatccccagcccccgggcctgtcagaggctgagccattaacgacagagctcggggagagaagctggactgcagctggtttcaggaacttctcttgacgagaagagagaccaaggaggccaagcaggggctgggccagaggtgccaacatggggaaactgaggctcggctcggaaaggtgaagtaacttgtccaagatcacaaagctggtgaacatcaagttggtgctatggcaaggctgggaaactgcagcctgacttgggctgccctgatcatcctgctgctccccggaagtctggaggagtgcgggcacatcagtgtctcagcccccatcgtccacctgggggatcccatcacagcctcctgcatcatcaagcagaactgcagccatctggacccggagccacagattctgtggagactgggagcagagcttcagcccgggggcaggcagcagcgtctgtctgatgggacccaggaatctatcatcaccctgccccacctcaaccacactcaggcctttctctcctgctgcctgaactggggcaacagcctgcagatcctggaccaggttgagctgcgcgcaggctaccctccagccataccccacaacctctcctgcctcatgaacctcacaaccagcagcctcatctgccagtgggagccaggacctgagacccacctacccaccagcttcactctgaagagtttcaagagccggggcaactgtcagacccaaggggactccatcctggactgcgtgcccaaggacgggcagagccactgctgcatcccacgcaaacacctgctgttgtaccagaatatgggcatctgggtgcaggcagagaatgcgctggggaccagcatgtccccacaactgtgtcttgatcccatggatgttgtgaaactggagccccccatgctgcggaccatggaccccagccctgaagcggcccctccccaggcaggctgcctacagctgtgctgggagccatggcagccaggcctgcacataaatcagaagtgtgagctgcgccacaagccgcagcgtggagaagccagctgggcactggtgggccccctccccttggaggcccttcagtatgagctctgcgggctcctcccagccacggcctacaccctgcagatacgctgcatccgctggcccctgcctggccactggagcgactggagccccagcctggagctgagaactaccgaacgggcccccactgtcagactggacacatggtggcggcagaggcagctggaccccaggacagtgcagctgttctggaagccagtgcccctggaggaagacagcggacggatccaaggttatgtggtttcttggagaccctcaggccaggctggggccatcctgcccctctgcaacaccacagagctcagctgcaccttccacctgccttcagaagcccaggaggtggcccttgtggcctataactcagccgggacctctcgtcccactccggtggtcttctcagaaagcagaggcccagctctgaccagactccatgccatggcccgagaccctcacagcctctgggtaggctgggagccccccaatccatggcctcagggctatgtgattgagtggggcctgggcccccccagcgcgagcaatagcaacaagacctggaggatggaacagaatgggagagccacggggtttctgctgaaggagaacatcaggccctttcagctctatgagatcatcgtgactcccttgtaccaggacaccatgggaccctcccagcatgtctatgcctactctcaagaaatggctccctcccatgccccagagctgcatctaaagcacattggcaagacctgggcacagctggagtgggtgcctgagccccctgagctggggaagagcccccttacccactacaccatcttctggaccaacgctcagaaccagtccttctccgccatcctgaatgcctcctcccgtggctttgtcctccatggcctggagcccgccagtctgtatcacatccacctcatggctgccagccaggctggggccaccaacagtacagtcctcaccctgatgaccttgaccccagaggggtcggagctacacatcatcctgggcctgttcggcctcctgctgttgctcacctgcctctgtggaactgcctggctctgttgcagccccaacaggaagaatcccctctggccaagtgtcccagacccagctcacagcagcctgggctcctgggtgcccacaatcatggaggaggatgccttccagctgcccggccttggcacgccacccatcaccaagctcacagtgctggaggaggatgaaaagaagccggtgccctgggagtcccataacagctcagagacctgtggcctccccactctggtccagacctatgtgctccagggggacccaagagcagtttccacccagccccaatcccagtctggcaccagcgatcaggctgggcctcccaggcgatctgcatactttaaggaccagatcatgctccatccagccccacccaatggccttttgtgcttgtttcctataacttcagtattgtaaactagtttttggtttgcagtttttgttgttgtttatagacactcttgggtgtaaaaaaaaaaa

SEQ ID NO: 1190 - DNA, 1231 bp, Homo sapiens
agtacctgacattccaggcgcgagccacggcgccggctcctgttggttttagtatctgtcttgttccactagaatctcaaccccacaaggacaagaatttttatctgttttgttcactgctgttttttcagcatttatagcagctccaggcgcgtagcagagaatcattaaatatttatagaaagattaaatacgctcttccggaagcaccgacaaacaagattaaatgagcttggattgaacctcgtagcggcccgtagtactcctccttcccgccatcctatagatgaaaggaagaaaaggaaaagccccgcccctcgctcggctgctggaggcgagggcttcggaagtcttcatgctagtctcgtggggttccgcggtgtcgtcgctggctgtgcgcgtcatttccgggcgtcacgtaacggagtggccaacggcctgcagagcaacatgcccaagttttattgtgactactgcgatacatacctcacccatgactctccatctgtgagaaagacacactgcagtggaaggaaacacaaagagaatgtgaaagactattatcagaaatggatggaagagcaggctcagagcctgattgacaaaacaacggctgcatttcaacaaggaaagatacctcctactccattctctgctcctcctcctgcaggggcgatgataccacctccccccagccttccgggtcctcctcgccctggtatgatgccagcaccccatatggggggccctcccatgatgccaatgatgggccctcctcctcctgggatgatgccagtgggacctgctcctggaatgaggccgcccatgggaggccatatgccaatgatgcctgggcccccaatgatgagacctcctgcccgtcccatgatggtgcccactcggcccggaatgactcgaccagacagataaggatagaggggaggccttattgtatcggttttatattacctgttctgcttcaccaggagatcatgctgctgtgatactgagttttctaaacagcataaggaagacttgctcccctgtcctatgaaagagaatagttttggaggggagaagtgggacaaaaaagatgcagttttcctttgtattgggaaatgtgaaaataaaattgtcaactctttcagttaaaagtgtgttccctttttcctcctctctgtgttctctgtgtattataaaagaaatgaaacattccaaaaaaaaaaaaaaa

SEQ ID NO: 1191 - DNA, 543 bp, Homo sapiens
gaccttgagggagttaatgtgtaatattctaggatataagcttgaccacgagttgagaccctgagcacaggcctccaggagccgctgggagctgccgccaggagctgtcaccatgacgggggaacttgaggttaagaacatggacatgaagccggggtcaaccctgaagatcacaggcagcatcgccgatggcactgatggctttgtaattaatctgggccaggggacagacaagctgaacctgcatttcaaccctcgcttcagcgaatccaccattgtctgcaactcattggacggcagcaactgggggcaagaacaacgggaagatcacctgtgcttcagcccagggtcagaggtcaagttcacagtgacctttgagagtgacaaattcaaggtgaagctgccagatgggcacgagctgacttttcccaacaggctgggtcacagccacctgagctacctgagcgtaaggggcgggttcaacatgtcctctttcaagttaaaagaataaaagacttccagccgagaaaaaaaaaaaaaaaa

SEQ ID NO: 1192 - DNA, 3475 bp, Homo sapiens
agagccgagcggactgcgcggaggctgcggagccggcggccgcgggagctgaccctgcggggtcccggggggggagggggagccgcgaagcccccactgaggccgccgctgccgggcctcccctcccccccgggcgggcgccatgcgggggagcccgggcgacgcggagcggcggcagcgctggggtcgcctgttcgaggagctggacagtaacaaggatggccgcgtggacgtgcacgagttgcgccaggggctggccaggctgggcgggggcaacccagaccccggcgcccaacagggtatctcctctgagggtgatgctgacccagatggcgggctcgacctggaggaattttcccgctatctgcaggagcgggaacagcgtctgctgctcatgtttcacagtcttgaccggaaccaggatggtcacattgatgtctctgagatccaacagagtttccgagctctgggcatttccatctcgctggagcaggctgagaaaattttgcacagcatggaccgagacggcacaatgaccattgactggcaagaatggcgcgaccacttcctgttgcattcgctggaaaatgtggaggacgtgctgtatttctggaagcattccacggtcctggacattggcgagtgcctgacagtgccggacgagttctcaaagcaagagaagctgacgggcatgtggtggaaacagctggtggccggcgcagtggcaggtgccgtgtcacggacaggcacggcccctctggaccgcctcaaggtcttcatgcaggtccatgcctcaaagaccaaccggctgaacatccttggggggcttcgaagcatggtccttgagggaggcatccgctccctgtggcgcggcaatggtattaatgtactcaagattgcccccgagtcagctatcaagttcatggcctatgaacagatcaagagggccatcctggggcagcaggagacactgcatgtgcaggagcgcttcgtggctggctccctggctggtgccacagcccaaaccatcatttaccctatggaggtgctgaagacgcggctgaccttgcgccggacgggccagtataaggggctgctggactgcgccaggcgtatcctggagagggaggggccccgtgccttctaccgcggctacctccccaacgtgctgggcatcatcccctatgcgggcatcgacctggccgtctacgagactctgaagaactggtggcttcagcagtacagccacgactcggcagacccaggcatcctcgtgctcctggcctgcggtaccatatccagcacctgcggccagatagccagttacccgctggccctggtccggacccgcatgcaggcacaagcctccatcgagggtggcccccagctgtccatgctgggtctgctacgtcacatcctgtcccaggagggcatgcggggcctctaccgggggatcgcccccaacttcatgaaggttattccagctgtgagcatctcctatgtggtctacgagaacatgaagcaggccttgggggtcacgtccaggtgagggacccggagcccgtccccccaatccctcaccccccacacctcagccactggagactgatgatccaaccacaggatccctactctttggccacgagatcccagtacccagatcctggatcctagactcctatgccccaaccattgggtcatgggatcccagcatccagatcctggatcctagactcctatgccccaaccactgggtcatgcgatccccacccttcagccactagatcccagatccccctgtaaccataactgtggatcccttacttcagcaactcaagtctgctaccctaaccacaagattcaagattatccacaccccagcccttaatccccatcccccaaatcactggatcctgcagccccacatcctaaggtggatcccacgcttccctgtgccccctactggatcctggacctctacgtcttaaccactggatcccacacaaatcagtgaatggatcccaacaccccaaccacaggagcacggattccctgtacctcaacacccagaccctgcctccctcaggcaccagatccagtgtcctagtgaaacgctggatcctagatccccaaccccagatccccatgcctcgagccctggatctccaagctcagctgctggattctggatgtcaacaaacctcaccactggatcctgacaaccacaatgcctggatcctggggcccccatcactggatcccagatcccctcactccacccactggattcctgcattggtttttggttttttgtttttttttaacctcgacactgggtctcagatccttctgctgactgccagatccctgcatttcaagcactacgccttccacccccaggcactggatcccagattcccaagccttcacccaccagattctggctcctaaaacaagtgcgggggccccagtggcacagcaagtggatcctggcaactgcagctgctggattccagattctgggtccccaatccctctgcccagtccctcaatgttgaaacctcatctcttgaaggcagatcctgatattccaaggcactgaatcccaagccctgaatccccggtttctgatctgaatcttccaggcgccgggtcccaaatgttcaggccccaagtctagatcctggcagcccagtcacagagtatcccacacacactggtgcccagagccggcttctcatgacatgaaattgcatggtcgagggagtctgtggggaaggaagcccaggtcctggctgcaacctgcacggatgctggattccccctcaccccacctctgcatggccaccccctcccagccctgtggggaaactgttccctggaaccactccactccctgcatccccacacttcacagcatcttccatccccctcccaccttctaggcgaatagtccccagagctgtgttcctccaaggggtccgaggaatcactcactcctggaggctggcaaggagacagtctgaggccagggacacatgaagggatgtccccaccccagcactatcagggcctccccaggcttccagagttgaaagccaggagaaaatcggcaaagaccacccttccctaaacccaagcacccaatgatgcaaaaaacaaaaacaaaaaaaaaccaccaaatccccaaattcattccagatctatttttctaccagagagaggagcaaagtcctcctcccctgcgcccttacattctgcacttcatagttggattctgagcttaggatcatctggagaccccatggagggacttggaaaggggaactgggatttggggaggggctggaggacttccgcacgcttccacctccttcgacctccactgcgccccacctccctgcctgtgtgtgttatttcaaaggaaaagaacaaaaggaataaattttctaagctctttaaaaaaaaaaaaaaa

SEQ ID NO: 1193 - DNA, 3201 bp, Homo sapiens
aaggcgcgggccccggcgcggcggggagggctcggccggaggggaggctgcggcgcgcggccggtcgctgcgggcccgggccccaagccgtgccgctccgctcgcccgggccccgccgaggccgctgcgcccccgcctcctcgcgggaggactcgctccaaactccctgaacttcggggacagtcccccgaagcggcgaaactctcagggttggcaaccctgcccagggacccccatcccgggcggcgctccggacgccctcccctcaccgcgcccccgcagacacgtgcctggactccgagggcttctggagccaccggccgggccacgatgctcatgaggaaagtgcccggcttcgtcccggcctccccgtgggggctgcggctgccgcagaagttcctcttcctcctcttcctctcgggcctggtcaccctgtgcttcggggccctcttcctgctgccccactcctctcgcctcaagcgcctcttcctggccccccggacccagcagcctggtctggaagtggtggctgaaatcgccggccatgccccggcccgcgagcaggagccgcctcccaacccggcccccgccgcgccggccccgggcgaggatgaccccagcagctgggccagtccccgccgcaggaaaggggggctgcggcgcacccgccccactggaccccgcgaggaggccacggcggcccggggcaatagcatcccggcctccaggcccggggacgagggcgtccctttccgctttgacttcaacgcattccggagccgtctccgccacccggtcctgggaacgagggccgatgagagtcaggagccccagagccaagtgcgagcccagcgggagaaaatcaaggagatgatgcagtttgcttggcagagctataagcgttatgcaatggggaaaaacgaactccgtccactaacaaaagatggctacgagggtaacatgttcggaggcctcagcggggcaacagtcattgactccctcgataccctctacctcatggagctgaaggaggagttccaggaggccaaggcctgggtgggagagagcttccacctgaacgtgagcggagaagcatccttgtttgaggtgaacatccgctacatcgggggactcctctcagccttctacctgacaggagaagaggtgttccgaataaaggccatcaggctgggagagaagctcctgccggcgttcaacacccccacgggaatcccaaagggcgtggtgagcttcaaaagtgggaactggggctgggccacagccggcagcagcagcatcttggcggagtttggatccctgcacttggaattcttacacctcactgaactctctggcaaccaggtcttcgctgaaaaggtcaggaacatccgcaaggtcctcaggaagatcgaaaagccctttggcctctaccccaacttcctcagcccagtgagtgggaactgggtgcaacaccatgtctcagttggaggactcggggacagtttttatgaatatttgatcaaatcctggttgatgtcgggcaagacagatatggaggctaaaaatatgtactacgaagccttggaggcgatagagacctacttgctgaatgtctctcccggggggctgacctacattgccgagtggcgaggggggattctggaccacaagatggggcacctggcctgtttctccgggggcatgatcgcccttggcgccgaggatgccaaggaagaaaagagggcccactaccgagagctcgcagcccagatcaccaagacgtgtcacgagtcatacgcccgctcagacaccaaacttgggcctgaggccttctggtttaactccggcagagaggccgtggccacccagctgagcgagagctactacatcctccggccagaggtggtggagagctacatgtacctgtggcgacagacccacaaccccatctacagggagtggggctgggaggtggtgctggccttggagaaatactgtcggacagaagccggtttctctgggatccaagacgtgtacagtagcacccccaaccacgacaacaagcagcagagcttctttctagcggagacactaaagtatctctatcttctgttctctgaagatgacttgctctccctggaagactgggtgttcaacaccgaggcccacccactcccggtgaaccactcagacagctccggcagagcctggggcagacactgaccccatctcctgccgccgccctggggccgccgcagggatgccttgccttttcaggatttgagactgttctcaaagggattgggaacgaaggccccatctcgggcagacccccagcagatgtgtcggacaagcaacttcttttcctctgtgaggagacaagacttggagactcagcgatgtcaggccagggccatggccacactggcccacacattcctttctacagagaatttctatgaagcccactcacttgccattccagggccaaaggaccggaggtttgcatatccgccccttgtatttgatttgcttccttttggtttcttggtttttgtttttgcttgattttgtcttttctctacagtttagttttgtcacaattacacatatagttttcaaaatcatgcactttctaaaatggtgtcatcctgaaaaacaaaacccagtgtttgcacacacacaaaatcttgaccccgttatctatattttaaatgctttttgcccaacactgaccctatgttcaactttgtgtcatttaccttataatttgaggaggggtttccctttgggcctcagtgttacaaattactagtgctattttcattattattgtaatggaaaaatctgtggactagaataaaagagtttattgaataagaaatatgattgggctcattgcacatcagtgactcctagaaaaaccattgcaatgttaccatcagaaataataatcagccagcagttgatttaaggtataatttagtaaacgattccaacttctattacctcccctgaaatcggtcctgatatattcgagaagcatgaggccagcccttcagatgcagttgtttatttatactcaggtttagattgggaagaggcccagggaggagcagcaacttgcctgaggtcacacagcccaaaaaaggcaaaggagagtctcgcccctgccgtctcctggccaccccagttgagtgt

SEQ ID NO: 1194 - DNA, 2344 bp, Homo sapiens
ggtgcgtccgcgggtggctgccccgcaggtgcgcgcggccggggctggcggcgactctctccaccgggccgcccgggaggctcatgcagcgcggctgggtcccgcggcgcccggatcggggaagtgaaagtgcctcggaggaggagggccggtccggcagtgcagccgcctcacaggtcggcggacgggccaggcgggcggcctcctgaaccgaaccgaatcggctcctcgggccgtcgtcctcccgcccctcctcgcccgccgccggagttttctttcggtttcttccaagattcctggccttccctcgacggagccgggcccagtgcgggggcgcagggcgcgggagctccacctcctcggctttccctgcgtccagaggctggcatggcgcgggccgagtactgagcgcacggtcggggcacagcagggccggggggtgcagctggctcgcgcctcctctccggccgccgtctcctccggtccccggcgaaagccattgagacaccagctggacgtcacgcgccggagcatgtctgggagtcagagcgaggtggctccatccccgcagagtccgcggagccccgagatgggacgggacttgcggcccgggtcccgcgtgctcctgctcctgcttctgctcctgctggtgtacctgactcagccaggcaatggcaacgagggcagcgtcactggaagttgttattgtggtaaaagaatttcttccgactccccgccatcggttcagttcatgaatcgtctccggaaacacctgagagcttaccatcggtgtctatactacacgaggttccagctcctttcctggagcgtgtgtgggggcaacaaggacccatgggttcaggaattgatgagctgtcttgatctcaaagaatgtggacatgcttactcggggattgtggcccaccagaagcatttacttcctaccagccccccaatttctcaggcctcagagggggcatcttcagatatccacacccctgcccagatgctcctgtccaccttgcagtccactcagcgccccaccctcccagtaggatcactgtcctcggacaaagagctcactcgtcccaatgaaaccaccattcacactgcgggccacagtctggcagctgggcctgaggctggggagaaccagaagcagccggaaaaaaatgctggtcccacagccaggacatcagccacagtgccagtcctgtgcctcctggccatcatcttcatcctcaccgcagccctttcctatgtgctgtgcaagaggaggagggggcagtcaccgcagtcctctccagatctgccggttcattatatacctgtggcacctgactctaatacctgagccaagaatggaagcttgtgaggagacggactctatgttgcccaggctgttatggaactcctgagtcaagtgatcctcccaccttggcctctgaaggtgcgaggattataggcgtcacctaccacatccagcctacacgtatttgttaatatctaacataggactaaccagccactgccctctcttaggcccctcatttaaaaacggttatactataaaatctgcttttcacactgggtgataataacttggacaaattctatgtgtattttgttttgttttgctttgctttgttttgagacggagtctcgctctgtcatccaggctggagtgcagtggcatgatctcggctcactgcaacccccatctcccaggttcaagcgattctcctgcctcctcctgagtagctgggactacaggtgctcaccaccacacccggctaattttttgtatttttagtagagacggggtttcaccatgttgaccaggctggtctcgaactcctgacctggtgatctgcccacccaggcctcccaaagtgctgggattaaaggtgtgagccaccatgcctggccctatgtgtgttttttaactactaaaaattatttttgtaatgattgagtcttctttatggaaacaactggcctcagcccttgcgcccttactgtgattcctggcttcattttttgctgatggttccccctcgtcccaaatctctctcccagtacaccagttgttcctcccccacctcagccctctcctgcatcctcctgtacccgcaacgaaggcctgggctttcccaccctccctccttagcaggtgccgtgctgggacaccatacgggttggtttcacctcctcagtcccttgcctaccccagtgagagtctgatcttgtttttattgttattgcttttattattattgcttttattatcattaaaactctagttcttgttttgtctctccgaaaaaaaaaaaaaaaaaaaaaa

SEQ ID NO: 1195 - DNA, 2184 bp, Homo sapiens
ctatgctttctcatccggccggcttgctttcccctgcggtcgtccagactattgggcgctagcgagacgaactattggtacggggctagagaggaaggctttgggattgccggggagcagcgagcgaccgacttccgtttccagttaccaaggcacgaggatccggtgttccaacccagggggaaaaatgcggcctttgactgaagaggagacccgtgtcatgtttgagaagatagcgaaatacattggggagaatcttcaactgctggtggaccggcccgatggcacctactgtttccgtctgcacaacgaccgggtgtactatgtgagtgagaagattatgaagctggccgccaatatttccggggacaagctggtgtcgctggggacctgctttggaaaattcactaaaacccacaagtttcggttgcacgtcacagctctggattaccttgcaccttatgccaagtataaagtttggataaagcctggtgcagagcagtccttcctgtatgggaaccatgtgttgaaatctggtctgggtcgaatcactgaaaatacttctcagtaccagggcgtggtggtgtactccatggcagacatccctttgggttttggggtggcagccaaatctacacaagactgcagaaaagtagaccccatggcgattgtggtatttcatcaagcagacattggggaatatgtgcggcatgaagagacgttgacttaaaacgaagccattccaaggacagacggctgtatggaaaggccgagctttgtttcctgtgtttgtgtggactccaccatcatgttgaattttgtcaacactctggcctcttcagggacttcttatttactgtactctctatcactgacaaatgcaggctggattcttattatatacagagatggctcaaaaatggggtttcagatctttgtgacgaaatagaatactgtttcatatttgaatcagagggcttcttgttctgagaaataggttcaaaatcattggaaccaggaacaagaatagcttattgttatctgtgataacactgttttctaaacacaaggattttcttttttattaatatgcaacatagacattgccataacagaataataaaccacatgtggggttttaaaaatgaaatttggctaataggagcaattcagctatttttctatacagtaattggtgtgtggtatagaagaaaaacgggttcaaaccccacttctgccacctaccagctatatggccttgaatgagtcattcagctttaataaggttcattttcttctgtttaaaaagacacaaaacttgaaaatcagctttggccatctacctgagaattagaaagtctgatttttggaattagaaatcatgattgtaggctgggcacagtggctcgcgcctgtaatcccagcactttgggaggccaaggcggacggatcacttgaggttaggagtttgagaccagcctggccaacatggtgaaaccccatctctactaaaaaaaaaaaaaaaattaggtgtggtgacacatggctgtggtcctagttacttgggaggctgaggcaggagaatggcttgaactggggaagcagagcttgcagtgagccaagatggtgccattgcactccagcctgggcgtgacagagtgagactccatctgattgtaaagcatctagtacagtgtacagtgccttggaaatgataggtatggaataaatggtaattatttttatattatatatattatgtattcctgttattaagtgtagagttttatgagtataatttgattttattaccttcttttttacaagctgttttctcagtatttttcttggatgggatgacgctaggctggaaagtttttttcatcactatgattttataaaacaattttttctatgaacctttacttacttgactggattggactaaaagcactgatcagaggccacgacataaaaattcagtccctttgtccttccccgtgcctcccaaagttactttaagatccttagaatatttctttaaatattttatagacaaaaaatttaaagactatctgtattgcaaaattaaactatttctttaatgaatatattgcttattttaagttccaaaggtgaagtctttaagaataaaacattaccaactcctgcttttatatgtaa

SEQ ID NO: 1196 - DNA, 2197 bp, Homo sapiens
attcttcctcttgccacacccacagggcccgcactaagagcctaactgaaatcccgcgaggatcaaccgagctcgccgaaaggagggaggaacgtatcccttctggaggctgtctcagggggcagagggaccggaccggaagtgacgtgagcgggttccggttgtctggagcccagcggcgggtgtgagagtccgtaaggagcagcttccaggatcctgagatccggagcagccggggtcggagcggctcctcaagagttactgatctatgaaatggcagagaatggaaaaaattgtgaccagagacgtgtagcaatgaacaaggaacatcataatggaaatttcacagacccctcttcagtgaatgaaaagaagaggagggagcgggaagaaaggcagaatattgtcctgtggagacagccgctcattaccttgcagtatttttctctggaaatccttgtaatcttgaaggaatggacctcaaaattatggcatcgtcaaagcattgtggtgtcttttttactgctgcttgctgtgcttatagctacgtattatgttgaaggagtgcatcaacagtatgtgcaacgtatagagaaacagtttcttttgtatgcctactggataggcttaggaattttgtcttctgttgggcttggaacagggctgcacacctttctgctttatctgggtccacatatagcctcagttacattagctgcttatgaatgcaattcagttaattttcccgaaccaccctatcctgatcagattatttgtccagatgaagagggcactgaaggaaccatttctttgtggagtatcatctcaaaagttaggattgaagcctgcatgtggggtatcggtacagcaatcggagagctgcctccatatttcatggccagagcagctcgcctctcaggtgctgaaccagatgatgaagagtatcaggaatttgaagagatgctggaacatgcagagtctgcacaagactttgcctcccgggccaaactggcagttcaaaaactagtacagaaagttggattttttggaattttggcctgtgcttcaattccaaatcctttatttgatctggctggaataacgtgtggacactttctggtacctttttggaccttctttggtgcaaccctaattggaaaagcaataataaaaatgcatatccagaaaatttttgttataataacattcagcaagcacatagtggagcaaatggtggctttcattggtgctgtccccggcataggtccatctctgcagaagccatttcaggagtacctggaggctcaacggcagaagcttcaccacaaaagcgaaatgggcacaccacagggagaaaactggttgtcctggatgtttgaaaagttggtcgttgtcatggtgtgttacttcatcctatctatcattaactccatggcacaaagttatgccaaacgaatccagcagcggttgaactcagaggagaaaactaaataagtagagaaagttttaaactgcagaaattggagtggatgggttctgccttaaattgggaggactccaagccgggaaggaaaattcccttttccaacctgtatcaatttttacaacttttttcctgaaagcagtttagtccatactttgcactgacatactttttccttctgtgctaaggtaaggtatccaccctcgatgcaatccaccttgtgttttcttagggtggaatgtgatgttcagcagcaaacttgcaacagactggccttctgtttgttactttcaaaaggcccacatgatacaattagagaattcccaccgcacaaaaaaagttcctaagtatgttaaatatgtcaagctttttaggcttgtcacaaatgattgctttgttttcctaagtcatcaaaatgtatataaattatctagattggataacagtcttgcatgtttatcatgttacaatttaatattccatcctgcccaacccttcctctcccatcctcaaaaaagggccattttatgatgcattgcacaccctctggggaaattgatctttaaattttgagacagtataaggaaaatctggttggtgtcttacaagtgagctgacaccattttttattctgtgtatttagaatgaagtcttgaaaaaaactttataaagacatctttaatcattccaaaaaaaaaaaaaaaaaaaaaaaaa

SEQ ID NO: 1197 - DNA, 1678 bp, Homo sapiens
aagaaggaggccgcgcgagggctgacgaaccggaagaagaggaactgggcctgaaagggtaccggtgaccgctactgctgccggtgtttgcgtgtggcagggagccaggcctggcgagcggggtgtgtcgcgatgccggagctggcagtgcagaaggtggtggtccaccccctggtgctgctcagtgtggtggatcatttcaaccgaatcggcaaggttggaaaccagaagcgtgttgttggtgtgcttttggggtcatggcaaaagaaagtacttgatgtatcgaacagttttgcagttccttttgatgaagatgacaaagacgattctgtatggtttttagaccatgattatttggaaaacatgtatggaatgtttaagaaagtcaatgccagggaaagaatagttggctggtaccacacaggccctaaactacacaagaatgacattgccatcaacgaactcatgaaaagatactgtcctaattccgtattggtcatcattgatgtgaagccgaaggacctagggctgcctacagaagcgtacatttcagtggaagaagtccatgatgatggaactccaacctcgaaaacatttgaacacgtgaccagtgaaattggagcagaggaagctgaggaagttggagttgaacacttgttacgagatatcaaagacacgacggtgggcactctgtcccagcggatcacaaaccaggtccatggtttgaagggactgaactccaagcttctggatatcaggagctacctggaaaaagtcgccacaggcaagctgcccatcaaccaccagatcatctaccagctgcaggacgtcttcaacctgctgccagatgtcagcctgcaggagttcgtcaaggccttttacctgaagaccaatgaccagatggtggtagtgtacttggcctcgctgatccgttccgtggtcgccctgcacaacctcatcaacaacaagattgccaaccgggatgcagagaagaaagaagggcaggagaaagaagagagcaaaaaggataggaaagaggacaaggagaaagataaagataaggaaaagagtgatgtaaagaaagaggagaaaaaggagaaaaagtaaaacatgtattaaatagcttttttaatttgtaaattaaaatcttacaaactaaatcagtgtgctgctagagggttctttttcacttgacatgcttattagaaagctgacccaacaagagctctctgcctccggtcactcttgctgtggtgctacgtggaagtgaatggagactgatctcaaatctgaactgcagctttcgctgctgtgagttggggatatgatagtcagctcaggcttcagattgtatgagaaaaatgaagagaagtcaacaaatattttggtactcttcattcatttatctctaaaaccaggagttgaattttcctcatcttgaaagactcttggggtctgtttctggtattttacaaaattgctaagtggaatgcatgaattgcattatgttctctggtaacacgtagagttcagacccttctgaactctgttgataataccacaccatgttctggacccatagctctggcatcctcaggggttgtgatccagctccatatattgtttaccttcaaagatacaattaaatggcttgatttttaaaaaaaaaaaaaaaaaa

SEQ ID NO: 1198 - DNA, 924 bp, Homo sapiens
gctccgctgaatccgcccgcgcgtcgccgccgtcgtcgccgccccccgtcccggcccccctgggttccctcagcccagccctgtccagcccggttcccgggaggatgaagttcgtgtacaaagaagagcatccgttcgagaagcgccgctctgagggcgagaagatccgaaagaaatacccggaccgggtgccggtgatagtagaaaaggctcccaaagctcggataggagacctggacaaaaagaaatacctggtgccttctgatctcacagttggtcagttctacttcttgatccggaagcgaattcatctccgagctgaggatgccttgtttttctttgtcaacaatgtcattccacccaccagtgccacaatgggtcagctgtaccaggaacaccatgaagaagacttctttctctacattgcctacagtgacgaaagtgtctacggtctgtgaagctgctgcccctgagctggaggggggtctcattctacaaagagagaggtggcccccctttcttgacctcctcctccttcaagctcaaacaccacctcccttattcaggaccggcacttcttaatgtttgtggctttctctccagcctctcttaggaggggtaatggtggagttggcatcttgtaactctcctttctcctttcttcccctttctctgcccgcctttcccatcctgctgtagacttcttgattgtcagtctgtgtcacatccagtgattgttttggtttctgttccctttctgactgcccaaggggctcagaaccccagcaatcccttcctttcactaccttcttttttgggggtagttggaagggactgaaattgtggggggaaggtaggaggcacatcaataaagaggaaaccaccaagctgaaaaaaaaaaaaaaaaaaaaaaaaaaaaaaaaa

SEQ ID NO: 1199 - DNA, 1485 bp, Homo sapiens
tccctgggactgcgtcactggtgcgcgccgcgggtcagggcgcaatggcggcgctgggcggggatgggctgcgactgctgtcggtgtcgcggccggagcggccgcccgagtcggcggcgctgggcggcctgggccccgggctgtgctgctgggtgtcagtgttctcctgcctcagcctcgcctgctcctacgtgggcagcctctacgtctggaagagcgaactgcccagggaccatcccgcggtcatcaagcgacgcttcaccagcgtcctggtggtgtccagtctctcacccctgtgcgtgctgctctggagggaactcacaggcatccaggcacatccctgctcaccctgatgggcttcaggctggagggcattttcccagcggcgctgctgcccctgttgctgaccatgattcttttcctgggcccactgatgcagctctctatggattgcccttgtgacctggcagatgggctgaaggttgtcctggccccccgctcctgggcccgctgcctcacagacatgcgttggctgcggaaccaagtgatcgccccgctgacagaggagctggtgttccgggcctgtatgctgcccatgttagcaccgtgcatgggcctgggccctgctgtgttcacctgcccgctcttttttggagttgcccattttcaccatattattgagcagctgcgtttccgccagagcagcgtggggaacatcttcttgtctgctgcgttccagttctcctacacagctgtcttcggtgcctacactgctttcctcttcatccgcacaggacacctgattgggccggttctctgccattccttctgcaattacatgggtttcccagctgtttgcgcggccttggagcacccacagaggcggcccctgctggcaggctatgccctgggtgtgggactcttcctgcttctgctccagcccctcacggaccccaagctctacggcagccttcccctttgtgtgcttttggagcgggcaggggactcagaggctcccctgtgctcctgacctatgctcctggatacgctatgaactctcaccggctccccagccctccccaccaaggggtactgcaggggaagggctggctggggtccccgagatctcaggaatttttgtaggggattgaagccagagctagttgcgtcccagggaccaagagaaagaagcagatatccaaagggtgcagccccttttgaaaggggtgtttacgagcagctgtgagtgaggggacaaggggcaggtcccaggagccacacactcccttcctcactttggactgctgcttctcttagctcctctgcctctgaaaagctgctcggggttttttatttataaaacctctccccaccccccaccccccaacttcctgggttttctcattgtctttttgcatcagtactttgtattgggatattaaagagatttaacttgggtaacatggcaaaaaaaaaaaaaaaaaa

SEQ ID NO: 1200 - DNA, 1687 bp, Homo sapiens
tgctttctcaaaggccccacagtcctccacttcctggggaggtagctgcagaataaaaccagcagagactccttttctcctaaccgtcccggccaccgctgcctcagcctctgcctcccagcctctttctgagggaaaggacaagatgaagtggaaggcgcttttcaccgcggccatcctgcaggcacagttgccgattacagaggcacagagctttggcctgctggatcccaaactctgctacctgctggatggaatcctcttcatctatggtgtcattctcactgccttgttcctgagagtgaagttcagcaggagcgcagacgcccccgcgtaccagcagggccagaaccagctctataacgagctcaatctaggacgaagagaggagtacgatgttttggacaagagacgtggccgggaccctgagatggggggaaagccgagaaggaagaaccctcaggaaggcctgtacaatgaactgcagaaagataagatggcggaggcctacagtgagattgggatgaaaggcgagcgccggaggggcaaggggcacgatggcctttaccagggtctcagtacagccaccaaggacacctacgacgcccttcacatgcaggccctgccccctcgctaacagccaggggatttcaccactcaaaggccagacctgcagacgcccagattatgagacacaggatgaagcatttacaacccggttcactcttctcagccactgaagtattcccctttatgtacaggatgctttggttatatttagctccaaaccttcacacacagactgttgtccctgcactctttaagggagtgtactcccagggcttacggccctggccttgggccctctggtttgccggtggtgcaggtagacctgtctcctggcggttcctcgttctccctgggaggcgggcgcactgcctctcacagctgagttgttgagtctgttttgtaaagtccccagagaaagcgcagatgctagcacatgccctaatgtctgtatcactctgtgtctgagtggcttcactcctgctgtaaatttggcttctgttgtcaccttcacctcctttcaaggtaactgtactgggccatgttgtgcctccctggtgagagggccgggcagaggggcagatggaaaggagcctaggccaggtgcaaccagggagctgcaggggcatgggaaggtgggcgggcaggggagggtcagccagggcctgcgagggcagcgggagcctccctgcctcaggcctctgtgccgcaccattgaactgtaccatgtgctacaggggccagaagatgaacagactgaccttgatgagctgtgcacaaagtggcataaaaaacatgtggttacacagtgtgaataaagtgctgcggagcaagaggaggccgttgattcacttcacgctttcagcgaatgacaaaatcatctttgtgaaggcctcgcaggaagacccaacacatgggacctataactgcccagcggacagtggcaggacaggaaaaacccgtcaatgtactaggatactgctgcgtcattacagggcacaggccatggatggaaaacgctctctgctctgctttttttctactgttttaatttatactggcatgctaaagccttcctattttgcataataaatgcttcagtgaaaatgcaaaaaaaaaa

SEQ ID NO: 1201 - DNA, 1729 bp, Homo sapiens
gcggaaggggttcgcacgccaagaaccgccatgcctggggatcaccgccgcatccgcggccctgaagaatcgcagccgccgcagctgtacgcggccgacgaggaggaggcgcccggcacccgcgacccaacgcggctacggcccgtgtacgcgcgcgccgggctgctgagccaggccaagggctcggcctacctggaggcgggaggcaccaaggtgctgtgtgccgtgtcgggcccgcgacaggccgagggcggcgagcgcggcggcggcccggccggagcaggcggcgaggccccggccgcgctgcgcggtcgcctgctctgcgacttccgccgcgcacccttcgcgggccgccggcgccgcgctcccccgggcggctgcgaggagcgtgagctggcgctggcgctgcaggaggcgctggagccggctgtgcgcctgggccgctacccgcgcgcgcagctcgaggtgtcggcgctgctgctggaggacggtggctcggccctggccgccgcgctcaccgccgccgcgctcgccctggccgacgcgggcgtggagatgtacgacctggtggtgggctgcggcctcagcctcgcgccggggcccgcgcccacctggctcctggaccccacgcggctcgaggaagagcgcgccgccgccggcctcaccgtggcgctcatgcctgtgctgaatcaggtggccgggctgctgggcagcggcgagggcggcctgacagagagctgggcggaggccgtacgcctgggcctcgagggctgccagcgcctctaccccgtgctgcagcagagcctggtgcgggccgcccgccgcaggggcgccgccgcccagccctgaaccagaagcctgagcaactacggacgcaagccgaggaccgtgctgccgccgtccacgaaaagacccgcgccatcggcctccagtttgcgtcgagaattcctggaagggccctgatatgactgtggttggactgacctgactgccagatggtgggacttggtctggagcagggactacttggaatgataaaggcaaaactcaacagcccctggagctgcgcttgtggtggagctggaccctgaaattacctggaccttttttttagagacagggtttctttctgcagtctcaaactcctagccttgattgatcctcctgccttggcctcccaaagtgctgggactacaggtgcatgcaaccacacctggctaattttcttttcttctttctttcttttttttttttttttttttttgatggagtcttgttctgttgcccaggctggagtgcaatggtgcaatcttggctcactgcaacctctgcctcctgggttcaatccattctcctgcctcagcctcccaagtagctgggattacaggcacatgcctccataccgggctaatttttgtatttttagtagagatggggtttcgccatgtgggccaggctgttctcgaatgcctgacctcaggtgatccacccgccttggcctcccaaagtgctggaattacaggtgtgagccactgtgcccagctgagtaaatttcttgattgcacagaatgtacggtgatattggcggacttaaggacatcgaattgtttatcaggaataaagtattatgtgtgttttctgcggccctggataatgctgtagcattcagggtcgattgagtaaaaaaaatgtagagatggaaaaaaaaaaaaaaaaaaaaaaaaaaaaa

SEQ ID NO: 1202 - DNA, 3231 bp, Homo sapiens
cccggccgggtctgggggcggggcgtttgcccggcctttccagggccggggaaccccaggaggaagctgctgagccatgggcgcctacgcgcgggcttcgggggtctgcgctcgcggctgcctggactcagcaggcccctggaccatgtcccgcgccctgcggccaccgctcccgcctctctgctttttccttttgttgctggcggctgccggtgctcgggccgggggatacgagacatgccccacagtgcagccgaacatgctgaacgtgcacctgctgcctcacacacatgatgacgtgggctggctcaaaaccgtggaccagtacttttatggaatcaagaatgacatccagcacgccggtgtgcagtacatcctggactcggtcatctctgccttgctggcagatcccacccgtcgcttcatttacgtggagattgccttcttctcccgttggtggcaccagcagacaaatgccacacaggaagtcgtgcgagaccttgtgcgccaggggcgcctggagttcgccaatggtggctgggtgatgaacgatgaggcagccacccactacggtgccatcgtggaccagatgacacttgggctgcgctttctggaggacacatttggcaatgatgggcgaccccgtgtggcctggcacattgaccccttcggccactctcgggagcaggcctcgctgtttgcgcagatgggcttcgacggcttcttctttgggcgccttgattatcaagataagtgggtacggatgcagaagctggagatggagcaggtgtggcgggccagcaccagcctgaagcccccgaccgcggacctcttcactggtgtgcttcccaatggttacaacccgccaaggaatctgtgctgggatgtgctgtgtgtcgatcagccgctggtggaggaccctcgcagccccgagtacaacgccaaggagctggtcgattacttcctaaatgtggccactgcccagggccggtattaccgcaccaaccacactgtgatgaccatgggctcggacttccaatatgagaatgccaacatgtggttcaagaaccttgacaagctcatccggctggtaaatgcgcagcaggcaaaaggaagcagtgtccatgttctctactccacccccgcttgttacctctgggagctgaacaaggccaacctcacctggtcagtgaaacatgacgacttcttcccttacgcggatggcccccaccagttctggaccggttacttttccagtcggccggccctcaaacgctacgagcgcctcagctacaacttcctgcaggtgtgcaaccagctggaggcgctggtgggcctggcggccaacgtgggaccctatggctccggagacagtgcacccctcaatgaggcgatggctgtgctccagcatcacgacgccgtcagcggcacctcccgccagcacgtggccaacgactacgcgcgccagcttgcggcaggctgggggccttgcgaggttcttctgagcaacgcgctggcgcggctcagaggcttcaaagatcacttcaccttttgccaacagctaaacatcagcatctgcccgctcagccagacggcggcgcgcttccaggtcatcgtttataatcccctggggcggaaggtgaattggatggtacggctgccggtcagcgaaggcgttttcgttgtgaaggaccccaatggcaggacagtgcccagcgatgtggtaatatttcccagctcagacagccaggcgcaccctccggagctgctgttctcagcctcactgcccgccctgggcttcagcacctattcagtagcccaggtgcctcgctggaagccccaggcccgcgcaccacagcccatccccagaagatcctggtcccctgctttaaccatcgaaaatgagcacatccgggcaacgtttgatcctgacacagggctgttgatggagattatgaacatgaatcagcaactcctgctgcctgttcgccagaccttcttctggtacaacgccagtataggtgacaacgaaagtgaccaggcctcaggtgcctacatcttcagacccaaccaacagaaaccgctgcctgtgagccgctgggctcagatccacctggtgaagacacccttggtgcaggaggtgcaccagaacttctcagcttggtgttcccaggtggttcgcctgtacccaggacagcggcacctggagctagagtggtcggtggggccgatacctgtgggcgacacctgggggaaggaggtcatcagccgttttgacacaccgctggagacaaagggacgcttctacacagacagcaatggccgggagatcctggagaggaggcgggattatcgacccacctggaaactgaaccagacggagcccgtggcaggaaactactatccagtcaacacccggatttacatcacggatggaaacatgcagctgactgtgctgactgaccgctcccaggggggcagcagcctgagagatggctcgctggagctcatggtgcaccgaaggctgctgaaggacgatggacgcggagtatcggagccactaatggagaacgggtcgggggcgtgggtgcgagggcgccacctggtgctgctggacacagcccaggctgcagccgccggacaccggctcctggcggagcaggaggtcctggcccctcaggtggtgctggccccgggtggcggcgccgcctacaatctcggggctcctccgcgcacgcagttctcagggctgcgcagggacctgccgccctcggtgcacctgctcacgctggccagctggggccccgaaatggtgctgctgcgcttggagcaccagtttgccgtaggagaggattccggacgtaacctgagcgcccccgttaccttgaacttgagggacctgttctccaccttcaccatcacccgcctgcaggagaccacgctggtggccaaccagctccgcgaggcagcctccaggctcaagtggacaacaaacacaggccccacaccccaccaaactccgtaccagctggacccggccaacatcacgctggaacccatggaaatccgcactttcctggcctcagttcaatggaaggaggtggatggttaggtctgctgggatgggccctccaagcccaagcctcctgctccgggggcagaccagactctgactctcctcttggggctgctgccattaaaacgctactactaagactcaggtcaaaaaaa

SEQ ID NO: 1203 - DNA, 2409 bp, Homo sapiens
aagtgtgcagcagatcttcttccgggcggacgtggagccggaagcggaggttccgggctccgggatgaaaggagggaacgcagacagctggcagagagagaagttggctagcatggaatcaccagaggagcctggagcatccatggatgagaactactttgtgaactacactttcaaagatcggtcacattcaggccgtgtggctcaaggcatcatgaaactgtgtctagaggaggagctctttgctgatgtcaccatttcggtggaaggccgggagtttcagctccatcggctggtcctctcagctcagagctgcttcttccgatccatgttcacttccaacctgaaggaggcccacaaccgggtgattgtgctgcaggatgtcagcgagtctgttttccagctcctggttgattatatctaccatgggactgtgaaacttcgagctgaggagttgcaggaaatttatgaggtgtcagacatgtatcagctgacatctctctttgaggaatgctctcggtttttggcccgcacagtgcaagtgggaaactgccttcaggtgatgtggctggcagatcggcacagtgatcctgagctctatacggctgccaagcactgtgccaagacccacctggcccagctgcagaatacagaggaatttctccacttgccccaccgcttactcacagatatcatctcggatggagttccgtgttctcagaacccaacagaggcaatagaagcctggatcaactttaataaagaggaaagagaggcttttgcagagtcactcaggacaagcttgaaggaaattggggagaatgtgcacatttacctgattgggaaagagtcatctcgtacccactcgttggctgtgtccttgcactgtgcagaagatgactccatcagtgtaagtggccaaaacagtttgtgccaccagatcactgcggcctgcaagcatggtggagacttgtatgtggtgggagggtccatcccacggcgcatgtggaagtgcaacaatgccaccgttgactgggagtggtgtgctcctttgcctcgggaccggctccagcacaccctggtgtctgtgcccgggaaagatgccatatattcactgggtggcaagacactgcaagataccctctccaacgcagtcatttattatcgcgtaggtgataatgtgtggacagagacaactcagctagaggtggctgtgtcaggggctgctggtgccaacctcaacgggatcatctacttactagggggggaggagaatgatctggacttctttaccaaaccttcccgactcatccagtgctttgacacagagacagacaaatgccatgtgaagccctatgtgctgccctttgcaggccgcatgcacgcagctgtgcataaagatctggtgttcatcgtggctgaaggggactccctggtgtgctacaatcccttgctagacagcttcacccggctttgccttcctgaggcctggagctctgccccatccctctggaagattgccagctgtaacgggagcatctatgtcttccgggaccgatataaaaagggggatgccaacacctacaagcttgaccctgccacttcagccgtaactgtcacaagaggtattaaggtgctgcttaccaatttgcagtttgtgttggcctaaggctgtggggaggggaggagaactgctcactccttttccctccccatacaaactcaaagtcccctgggccccaattcagagttatgttttttttggcacatactagaaaggcagtgcctcagcccttccctgaatccatggaggtgttctgtttggggctttttagactgctgctgctcagctggttgcttgaactgacagtaggccagcctgttctctgccattccctagtcatcctgtgcctcaccacagcttgcttagagcaagccttttctcagaccttaggcacagcctctcctctttacctgatcaatgttaaatgtaagcacccctgatcccaggacataaggaaagatgcccaattgtacttttgttctatagcctgtgaaatggctagttgatcatttttccacaaagaattaggtgttaagagttttccttcaggctttacttaggagaatggactaagctgaaggtgtacttcaccagcaagagtcaactctagaattcaggatgttccttctattgttttcttatccatctgtcaggaaatgtaactttggttttatttttggcttattccaaggggtaagccagaaaatagaaatgattatttctgattaatagcagaaactttttcaatctcaaatatataaggtgtctgctcttttaaaagctctaagctaagtcaagagctaggaactgttgatacaaataaaagtttttgaagggaaaaaaaa

SEQ ID NO: 1204 - DNA, 1056 bp, Homo sapiens
gtctgcgcggagtctgagcggcgctcgtcccgtcccaaggccgacgccagcacgccgtcatggcccccgcagcggcgacggggggcagcaccctgcccagtggcttctcggtcttcaccaccttgcccgacttgctcttcatctttgagtttatcttcgggggcctggtgtggatcctggtggcctcctccctggtgccctggcccctggtccagggctgggtgatgttcgtgtctgtgttctgcttcgtggccaccaccaccttgatcatcctgtacataattggagcccacggtggagagacttcctgggtcaccttggacgcagcctaccactgcaccgctgccctcttttacctcagcgcctcagtcctggaggccctggccaccatcacgatgcaagacggcttcacctacaggcactaccatgaaaacattgctgccgtggtgttctcctacatagccactctgctctacgtggtccatgcggtgttctctttaatcagatggaagtcttcataaagccgcagtagaacttgagctgaaaacccagatggtgttaactggccgccccactttccggcataactttttagaaaacagaaatgcccttgatggtggaaaaaagaaaacaaccacccccccactgcccaaaaaaaaaagccctgccctgttgctcgtgggtgctgtgtttactctcccgtgtgccttcgcgtccgggttgggagcttgctgtgtctaacctccaactgctgtgctgtctgctagggtcacctcctgtttgtgaaaggggaccttcttgttcgggggtgggaagtggcgaccgtgacctgagaaggaaagaaagatcctctgctgacccctggagcagctctcgagaactacctgttggtattgtccacaagctctcccgagcgccccatcttgtgccatgttttaagtcttcatggatgttctgcatgtcatggggactaaaactcacccaacagatctttccagaggtccatggtggaagacgataaccctgtgaaatactttataaaatgtcttaatgttc

SEQ ID NO: 1205 - DNA, 3320 bp, Homo sapiens
gagatcatggcccgcctcttcagcccccggccgccccccagcgaagacctcttctacgagacctactacagcctgagccagcagtacccgctgctgctgctgctgctggggatcgtgctctgtgcgctcgcggcgctgctcgcagtggcctgggccagcggcagggagctgacctcagacccgagcttcctgaccactgtgctgtgcgcgctgggcggcttctcgctgctgctgggcctcgcttcccgggagcagcgactgcagcgctggacgcgtcccctgtccggcttggtatgggtcgcgctgctagcgctaggccacgccttcctgttcaccgggggcgtggtgagcgcctgggaccaggtgtcctattttctcttcgtcatcttcacggcgtatgccatgctgcccttgggcatgcgggacgccgccgtcgcgggcctcgcctcctcactctcgcatctgctggtcctcgggctgtatcttgggccacagccggactcacggcctgcactgctgccgcagttggcagcaaacgcagtgctgttcctgtgcgggaacgtggcaggagtgtaccacaaggcgctgatggagcgcgccctgcgggccacgttccgggaggcactcagctccctgcactcacgccggcggctggacaccgagaagaagcaccaggaacaccttctcttgtccatccttcctgcctacctggcccgagagatgaaggcagagatcatggcacggctgcaggcaggacaggggtcacggccagagagcactaacaatttccacagcctctatgtcaagaggcaccagggagtcagcgtgctgtatgctgacatcgtgggcttcacgcggctggccagcgagtgttcccctaaggagctggtgctcatgctcaatgagctctttggcaagttcgaccagattgccaaggagcatgaatgcatgcggatcaagatcctgggggactgttactactgtgtctctgggctgccactctcactgccagaccatgccatcaactgcgtgcgcatgggcctggacatgtgccgggccatcaggaaactgcgggcagccactggcgtggacatcaacatgcgtgtgggcgtgcactcaggcagcgtactgtgtggagtcatcgggctgcagaagtggcagtacgacgtttggtcacatgatgtcacactggctaaccacatggaggcaggcggtgtaccagggcgagtgcacatcacaggggctaccctggccctgctggcaggggcttatgctgtggaggacgcaggcatggagcatcgggacccctaccttcgggagctaggggagcctacctatctggtcatcgatccacgggcagaggaggaggatgagaagggcactgcaggaggcttgctgtcctcgcttgagggcctcaagatgcgtccatcactgctgatgacccgttacctggagtcctggggcgcagccaagccttttgcccacctgagccacggagacagccctgtgtccacctccacccctctcccggagaagaccctggcttccttcagcacccagtggagcctggatcggagccgtaccccccggggactagatgatgaactggacaccggggatgccaagttcttccaggtcattgagcagctcaactcgcagaaacagtggaagcagtcgaaggacttcaacccactgacactgtacttcagagagaaggagatggagaaagagtaccgactctctgcaatccccgccttcaaatactatgaagcctgcaccttcctggtttttctctccaacttcatcatccagatgctagtgacaaacaggcccccagctctggccatcacgtatagcatcaccttcctcctcttcctcctcatcctttttgtctgcttctcagaggacctgatgaggtgtgtcctgaaaggccccaagatgctgcactggctgcctgcactgtctggcctggtggccacacgaccaggactgagaatagccttgggcaccgccaccatcctccttgtctttgccatggccattaccagcctgttcttcttcccaacatcatcagactgccctttccaagctcccaatgtgtcctccatgatttccaacctctcctgggagctccctgggtctctgcctctcatcagtgtcccatactccatgcactgctgcacgctgggcttcctctcctgctccctctttctgcacatgagcttcgagctgaagctgctgctgctcctgctgtggctggcggcatcctgctccctcttcctgcactcccatgcctggctgtcggaatgcctcatcgtccgcctctatctgggccccttggactccaggcccggagtgctgaaggagcccaaactgatgggtgctatctccttcttcatcttcttcttcaccctccttgtcctggctcgccagaatgagtactactgccgcctggacttcctgtggaagaagaagctgaggcaggagagggaggagacagagacgatggagaacctgactcggctgctcttggagaacgtgctccctgcacacgtggccccccagttcattggccagaaccggcgcaacgaggatctctaccaccagtcctatgaatgcgtttgtgtcctcttcgcctcagtcccagacttcaaggagttctactctgaatccaacatcaatcatgagggcctagagtgtctgaggctgctcaatgagataattgctgattttgatgagctgctctccaagcccaagttcagtggggtggagaagatcaagaccatcggcagcacctacatggcagccacaggcttaaatgccacctctggacaggatgcacaacaggatgctgaacggagctgcagccaccttggcactatggtggaatttgccgtggccctggggtctaagctggacgtcatcaacaagcattcattcaacaacttccgcctgcgagtggggttgaaccatggacccgtagtagctggagttattggggcccagaagccgcaatatgacatttggggcaacacagtgaacgtggccagccgcatggagagtacaggagtccttggcaaaatccaagtgactgaggagacagcatgggccctacagtccctgggctacacctgctacagccggggtgtcatcaaggtgaaaggcaaagggcagctctgcacctacttcctgaacacagacttgacacgaactggacctccttcagctaccctaggctgagattgcactcgccttctaagaacctcaataaagagactctggggtgtctggaaaaaaaaaaaaaaaaaaaaaaaaaaaaa

SEQ ID NO: 1206 - DNA, 1128 bp, Homo sapiens
gccggaagtggccccagcctcgaggccgggcgtcttcggtcatctccggcgcttctagggctggttcccgtcatcttcgggagccgtggaggtacgaacttaagacatgcctattttattaatttacttccaaacgcaacgaaaggtccatggacaatttgtgggccatttaattcagggcccccaattcgtacgtggagaagtgggaatgcaaaagtactttgacctttaaccttcggtccggcgcggtggagggaaacgcctccgtctctatataaggaattttccggtctcttcgggtcctttttcctctcttcagcgtggggcgcccacaatttgcgcgctctctttctgctgctccccagctctcggatacagccgacaccatgggtttcggagacctgaaaagccctgccggcctccaggtgctcaacgattacctggcggacaagagctacatcgaggggtatgtgccatcacaagcagatgtggcagtatttgaagccgtgtccagcccaccgcctgccgacttgtgtcatgccctacgttggtataatcacatcaagtcttacgaaaaggaaaaggccagcctgccaggagtgaagaaagctttgggcaaatatggtcctgccgatgtggaagacactacaggaagtggagctacagatagtaaagatgatgatgacattgacctctttggatctgatgatgaggaggaaagtgaagaagcaaagaggctaagggaagaacgtcttgcacaatatgaatcaaagaaagccaaaaaacctgcacttgttgccaagtcttccatcttactagatgtgaaaccttgggatgatgagacagatatggcgaaattagaggagtgcgtcagaagcattcaagcagacggcttagtctggggctcatctaaactagttccagtgggatacggaattaagaaacttcaaatacagtgtgtagttgaagatgataaagttggaacagatatgctggaggagcagatcactgcttttgaggactatgtgcagtccatggatgtggctgctttcaacaagatctaaaatccatcctggatcatggcatttaaataaaagattgaaagattacaaaaaaaaaaaaaaaaaa

SEQ ID NO: 1207 - DNA, 4100 bp, Homo sapiens
gtacctcatgtgacaagttccaatttcttttcaagtcaattgaactgaaatctccttgttgctttgaaatcttagaagagagcccactaattcaaggactcttactgtgggagcaactgctggttctatcacaatgaaacggctggtttgtgtgctcttggtgtgctcctctgcagtggcacagttgcataaagatcctaccctggatcaccactggcatctctggaagaaaacctatggcaaacaatacaaggaaaagaatgaagaagcagtacgacgtctcatctgggaaaagaatctaaagtttgtgatgcttcacaacctggagcattcaatgggaatgcactcatacgatctgggcatgaaccacctgggagacatgaccagtgaagaagtgatgtctttgatgagttccctgagagttcccagccagtggcagagaaatatcacatataagtcaaaccctaatcggatattgcctgattctgtggactggagagagaaagggtgtgttactgaagtgaaatatcaaggttcttgtggtgcttgctgggctttcagtgctgtgggggccctggaagcacagctgaagctgaaaacaggaaagctggtgtctctcagtgcccagaacctggtggattgctcaactgaaaaatatggaaacaaaggctgcaatggtggcttcatgacaacggctttccagtacatcattgataacaagggcatcgactcagacgcttcctatccctacaaagccatggatcagaaatgtcaatatgactcaaaatatcgtgctgccacatgttcaaagtacactgaacttccttatggcagagaagatgtcctgaaagaagctgtggccaataaaggcccagtgtctgttggtgtagatgcgcgtcatccttctttcttcctctacagaagtggtgtctactatgaaccatcctgtactcagaatgtgaatcatggtgtacttgtggttggctatggtgatcttaatgggaaagaatactggcttgtgaaaaacagctggggccacaactttggtgaagaaggatatattcggatggcaagaaataaaggaaatcattgtgggattgctagctttccctcttacccagaaatctagaggatctctcctttttataacaaatcaagaaatatgaagcactttctcttaacttaatttttcctgctgtatccagaagaaataattgtgtcatgattaatgtgtatttactgtactaattagaaaatatagtttgaggccgggcacggtggctcacgcctgtaatcccagtacttgggaggccaaggcaggcatatcaacttgaggccaggagttaaagagcagcctggctaacatggtgaaaccccatctctactaaaaatacaaaaaattagccgagcacggtggtgcatgcctgtaatcccagctacttgggaggctgaggcacgagattccttgaacccaagaggttgaggctatgttgagctgagatcacaccactgtactccagcctggatgacagagtggagactctgtttcaaaaaaacagaaaagaaaatatagtttgattcttcatttttttaaatttgcaaatctcaggataaagtttgctaagtaaattagtaatgtactatagatataactgtacaaaaattgttcaacctaaaacaatctgtaattgcttattgttttattgtatactctttgtctttttaagacccctaatagccttttgtaacttgatggcttaaaaatacttaataaatctgccatttcaaatttctatcattgccacataccattcttattcctaggcaactattaataatctatcctgagaatattaattgtggtattctggtgatggggtttagcaactttgatggaagaaaatattaggctataaatgtcctaaggactcagattgtatctttgtacagaagaggattcaaaacgccacgtgtagtggctcatgcctgtaatcccaacactttgggaggctgaagtaggaggatcgtcttgagcccaggagttcaagaccagcctggacaacatagtgagaccttgtctccacaaaaataaaaaagaaactatccaggagtggtggtgtgtgcctgtggtccctgctatgcagatgtctaagacaggaggatcacaagagcccaggaggttgagaatgcagtgagcttgtaattgcaccactgcactccagcctgggtgacagagcaagaccctgtcttaaaaaaagaggattcaacacatatttttatattatgttaaagtaaagaaatgcataaaagacaagcactttggaagaattattttaatgatcaacaatttaatgtattagtccaaattatttttacgtagtcatcaacaatttgaccagggcctttatttggcaaataactgagccaaccagaataaaataaccaatactccactgctcatatttttatctaattcagatggatcttccttacaactgctctagattagtagatgcatctaagcaggcagcaggaactttaaattttttaagttcatgtctatgacatgaacaatgtgtgggataatgtcattaatatatcctaaattaacctaaacgtatttcactaactctggctccttctccataaagcacattttaaggaacaagaattgctaaatataaaaacataaataataccataatacatggctatcatcaaaagtgtatagaatattatagtttaaaagtatttagttgattacttttcagttttgttttgttttttgagacggagtctcactctgttgcccaggctggagtgcagtggcaccatctcagttcactgcaacttctgcctcccgagttcaagcgattctcctgcctcagcctcccgagtagctggaattataggcgtgcaccaccacgcccagctaatttttgtatttttagtaaagacagggttttgccacattagccaggctggtctcaaactcctgacctcaggtgatccacccaccccagcctcccaaagtgctaagattacaggcgtgagccactgagcccagcctacttttcagtttttaacataatttttgttttatccacaacttttcaagtattgaaagtagaataaaaacatgggttcttagtctttagctatctgttaaagcctatgaatgccttcttaaaatcatgtttttaaatgcataaaatatataggattacaaaggaatctaattatatcgaaatacagttattaaaatgttaaaagataagtttgttatatattaatatgcatgcttctttataaatgcattaaataagagttaatagctatcctaaatttgaaatagtgataagcataatgaaaatagatgcaaaaaactaatgtgatatgaaaatatctgggtttttcttttgatgatgaagtattgctaatattaccgtggtttatgaactatgttcagaattgaagaaaatcctaactttcagttagaggttagtgacggggttcaggacaccctacacaaaatacagcactttgacatattgaatattttaagctgaaggcatttgaggaaattgcagaagcaggaaggtgactctgaccttctgcctgctgttctccccagaagcagccataaaacctgggaaggattttctgaccttcccctgaagtagatcataagactgtcatgtaagaggtgctctcctggcacccagagaaaaggagcatccttacctccaaaagcacagggacacaaagaggaatctaaacaaacaggcctctcagtttcccccagtttattacatttagcttgttcacactttgccctatgacatttctacatcactggctgctcttcatcaaacctactataaaaaacattcaagttcaactgtttctttgggcctttatttccttatggagcccctcgtgtcgtgtaaaacttatattaaataaatgtgcatgcttttctcttgctaatctctcttttgttatagagatctcagccctaaacctaggatggatagaaggaaacatatgttctcccctacattagtaaaaataaaaatggaattttttacccatacaaa

SEQ ID NO: 1208 - DNA, 4616 bp, Homo sapiens
gctgttggctgggctcgggagggaacgctccaggtaaagcgctgggggaggaagcgacgccgaggagctacggtttcctccagaggtctccgcccctctgcccctatattcccagagctcgagtctgatccgggccttgccgggcaccctggaaaggcgggggtgatagtacagatggagacgcaactgcagagcattttcgaagaggtggtgaaaacggaagttatagaagaggcttttcctggcatgtttatggatactcctgaagatgagaaaacaaaactaattagctgtttgggggccttcagacagttttggggtggtctttctcaggagtctcatgaacagtgtatccagtggattgttaagtttattcatggtcagcatagtcctaaaagaatttcttttctttatgactgcttagcaatggcagttgagactggtctccttccacccaggctggtttgtgaatccctgataaactctgacactcttgagtgggaaagaacacagctttgggccttaacatttaaactggttcggaaaataattgggggagtggattacaagggtgttcgagatctcttaaaagtgattttggagaagattttgacaattcctaatacagtgagctctgctgttgtacagcagcttctggcagcaagagaggttatagcatatatcttggaaagaaatgcctgcttattaccagcctattttgcagtcactgagatcaggaaactgtatcctgaaggcaaacttccacactggttacttggaaacctagtatcagactttgtggataccttcaggcccacagcaaggataaactccatttgtggtcgctgtagtcttctgccagttgtaaataattcgggtgccatttgtaattcatggaaactggatcctgctactcttcgttttcctttgaaaggccttttgccatatgataaggatctgtttgaaccacagactgctttgttgagatatgtattggagcagccttattccagggatatggtctgcaatatgctaggtttaaataagcagaccttgaacattgctcagcacaagcagcgctgccctgtgctggaggaccagttggtggatctggttgtttatgccatggagcgatctgagaccgaggagaagtttgacgatgggggaacaagccaactcctgtggcagcatctctcaagtcagctcattttctttgtgcttttccagtttgcaagttttccacatatggtgctttctcttcatcagaagttagcagggcgaggactgattaaaggcagagatcatcttatgtgggttctcctgcaattcatttctggaagtattcagaaaaatgcactagctgattttctccctgtgatgaagctcttcgacttgctatacccagaaaaagaatatatcccagttcctgatattaacaaaccccagtcaacccatgcctttgcaatgacctgtatttggattcatctcaatagaaaagctcaaaatgacaactccaagctacagattccaatacctcattccctaagacttcaccatgagttcctgcagcagagtctaagaaataaaagtttacagatgaatgactataagattgctctattgtgtaatgcatactctacaaattcagaatgttttacattacccatgggagctctggtagaaactatttatggaaatggaattatgaggatacctctccctggaacaaactgtatggcttcaggatctattacccccttacctatgaacctcctggattcactgacagttcatgccaaaatgagccttattcacagcattgcaaccagggtgataaaacttgctcatgcaaagtccagtgtggccttggctccagccctagtggaaacttacagtcgtttattggtctatatggaaatagagtctttgggcatcaaaggatttatcagtcagcttttgccaactgttttcaaatcacatgcatgggggatcttacacacactccttgagatgtttagctaccggatgcatcatattcagcctcattacagagttcagctcctgagtcatcttcatactttggctgcagttgcacaaacaaaccagaaccagctccatctttgtgtcgagagcactgctctcaggcttataacagcattaggtagctcagaggtacaaccgcagtttacacgcttccttagtgatcccaaaacagtgctctcagcagaatctgaagaactgaaccgagccttgatattgaccttggctagagcaactcatgtaacagatttttttacaggctctgattcaattcagggaacttggtgtaaagacatacttcagaccatcatgagtttcactcctcataattgggcttcacacaccctgagctgttttccaggcccactacaggcattcttcaaacaaaataatgtgcctcaggaaagccgttttaatctgaaaaaaaatgtggaggaggagtataggaagtggaagtcaatgagcaacgaaaacgacattattacccacttctctatgcagggctcccctcctctctttctttgtcttctctggaaaatgctcttggaaacagatcatattaatcagattggctatagagtattagagagaattggagccagggccttggtagcccatgtgaggacatttgcagatttcctggtatatgagttttctacatcagcagggggtcagcaactcaataaatgcattgaaattcttaatgacatggtatggaagtataacattgttacactggacagattaattctctgcctggccatgcgtagtcacgaaggaaatgaagcccaggtttgttatttcataattcagttgctgttactcaaaccaaacgattttagaaatcgagtaagtgactttgtgaaggaaaattccccagagcactggttacagaatgactggcacaccaagcacatgaattatcacaagaaatatccagagaagttgtattttgagggcctcgcggaacaggtggatcctcctgtacagatccagtctccctatctgcccatctattttgggaatgtgtgtcttcgattccttccagtatttgatatagtaatccacagatttttagagttgcttccggtatccaaatcactggagactctactggatcatctaggaggcttatataaatttcatgatcgtccagtgacttatctgtataacactctgcactattatgaaatgcacctgagagaccgcgcatttctcaaacgaaaactcgtccatgcgatcattggctctctgaaggataatcgaccgcagggctggtgtctaagtgacacttacctgaaatgcgctatgaatgcacgagaggaaaatccttgggttccagatgacacctactattgcagattgattggcagactagtcgatacgatggctggcaaatctcctggtccctttccaaactgtgactggagattcaatgagtttcccaacccagctgcccatgctctccatgttacttgtgtggagctcatggccttggcagtttcaggcaaagaagttgggaatgcccttctaaatgttgtcctaaaaagtcagcctttagtgccaagagagaacattacagcatggatgaatgcaattggtttgatcatcactgccctaccagagccatattggattgttcttcatgatcgaattgtgagtgtcatcagcagccccagcttgacgtctgaaacagagtgggttggctatccattccgcctctttgatttcactgcctgtcatcagtcctactctgagatgagttgtagctatacgttagctcttgcacatgctgtgtggcaccattctagcatcggacaactttctctcattccaaagtttcttactgaagtacttcttcctatagtgaagaccgaattccagttgctttatgtataccatcttgttggaccatttttacaaagatttcagcaagagagaactcgttgtatgatagagattggtgtggcgttttatgacatgctgctgaatgttgaccagtgtagcacccatttaaattacatggatcccatctgtgacttcctctatcacatgaagtatatgtttactggtgacagcgtgaaagagcaagtagagaagattatctgtaacttaaaaccagctttaaaacttcgtcttcgattcatcacacacattagcaagatggagccagctgcagtgcctccacaagccatgaacagtgggtctccagcacctcagtctaatcagtaaaaagtcagagtacacagcaagggttccaaattaagaggaagcaaaacgctgcccagatcctgagaaacctggagaaaatcaaccttagtagtttcaactcatacattgtcttgtttgattttgttctttgttttttatcctctttaagcacagatgcgtgttgaagtctaaggtgttctgtcatcacactctctttactagaataagtgtgcccaggcagaaaaaaaagtgtattcaatgttgctggcatgtgtggattcacagctcgtggctgtaaggaaatctgggggtttcataaatccattaaaatccttttagagttgccaaaaaaaaaaaaaaaaaaa

SEQ ID NO: 1209 - DNA, 1197 bp, Homo sapiens
ctcccaacctcacatctgccacgatgttgctgctcagcctgaccctaagcctggttctcctcggctcctcctggggctgcggcattcctgccatcaaaccggcactgagcttcagccagaggattgtcaacggggagaatgcagtgttgggctcctggccctggcaggtgtccctgcaggacagcagcggcttccacttctgcggtggttctctcatcagccagtcctgggtggtcactgctgcccactgcaatgtcagccctggccgccattttgttgtcctgggcgagtatgaccgatcatcaaacgcagagcccttgcaggttctgtccgtctctcgggccattacacaccctagctggaactctaccaccatgaacaatgacgtgacgctgctgaagctcgcctcgccagcccagtacacaacacgcatctcgccagtttgcctggcatcctcaaacgaggctctgactgaaggcctcacgtgtgtcaccaccggctggggtcgcctcagtggcgtgggcaatgtgacaccagcacatctgcagcaggtggctttgcccctggtcactgtgaatcagtgccggcagtactggggctcaagtatcactgactccatgatctgtgcaggtggcgcaggtgcctcctcgtgccagggtgactccggaggccctcttgtctgccagaagggaaacacatgggtgcttattggtattgtctcctggggcaccaaaaactgcaatgtgcgcgcacctgctgtgtatactcgagttagcaagttcagcacctggatcaaccaggtcatagcctacaactgagctcaccacaggccctccccagctcaacccattaaagacccaggccctgtcccatcatgcattcatgtctgtcttcctggctcaggagaaagaagaggctgttgagggtccgactccctacttggacttctggcacagaaggggctgagtgactccttgagtagcagtggctcttcctagagtagccatgccgaggccggggcccccacccctcctccagggcaaccccttggtcctacagcaagaagccagaactgttggaatgaatggcagccctccctggagaggcagcctgtttactgaatacagaggatacgtttacaaactgaatacgcataataaataactgcacattctccatccaaaaaaaaaaaaaaaa

SEQ ID NO: 1210 - DNA, 1561 bp, Homo sapiens
aattctaccccccttggtgccaacagatgaggttcacaatctcttccacaaaacatgcagttaaatatctgaggatattcagggacttggatttggtggcaggagatcaacataaaccaagacaaggaagaagtcaaagaaatgaatcaagtagattctctgggatataagaggcagccgaagagttcacaagtgtgaagcctggaagccggcgggtgccgctgtgtaggaaagaagctaaagcacttccagagcctgtccggagctcagaggttcggaagacttatcgaccatggagcgcgcgtcctgcttgttgctgctgctgctgccgctggtgcacgtctctgcgaccacgccagaaccttgtgagctggacgatgaagatttccgctgcgtctgcaacttctccgaacctcagcccgactggtccgaagccttccagtgtgtgtctgcagtagaggtggagatccatgccggcggtctcaacctagagccgtttctaaagcgcgtcgatgcggacgccgacccgcggcagtatgctgacacggtcaaggctctccgcgtgcggcggctcacagtgggagccgcacaggttcctgctcagctactggtaggcgccctgcgtgtgctagcgtactcccgcctcaaggaactgacgctcgaggacctaaagataaccggcaccatgcctccgctgcctctggaagccacaggacttgcactttccagcttgcgcctacgcaacgtgtcgtgggcgacagggcgttcttggctcgccgagctgcagcagtggctcaagccaggcctcaaggtactgagcattgcccaagcacactcgcctgccttttcctgcgaacaggttcgcgccttcccggcccttaccagcctagacctgtctgacaatcctggactgggcgaacgcggactgatggcggctctctgtccccacaagttcccggccatccagaatctagcgctgcgcaacacaggaatggagacgcccacaggcgtgtgcgccgcactggcggcggcaggtgtgcagccccacagcctagacctcagccacaactcgctgcgcgccaccgtaaaccctagcgctccgagatgcatgtggtccagcgccctgaactccctcaatctgtcgttcgctgggctggaacaggtgcctaaaggactgccagccaagctcagagtgctcgatctcagctgcaacagactgaacagggcgccgcagcctgacgagctgcccgaggtggataacctgacactggacgggaatcccttcctggtccctggaactgccctcccccacgagggctcaatgaactccggcgtggtcccagcctgtgcacgttcgaccctgtcggtgggggtgtcgggaaccctggtgctgctccaaggggcccggggctttgcctaagatccaagacagaataatgaatggactcaaactgccttggcttcaggggagtcccgtcaggacgttgaggacttttcgaccaattcaaccctttgccccacctttattaaaatcttaaacaacgggtcaaaaaaaaaaaaa

SEQ ID NO: 1211 - DNA, 1030 bp, Homo sapiens; identical to SEQ ID NO: 330

SEQ ID NO: 1212 - DNA, 1187 bp, Homo sapiens
gggggcgacggccgctgtgacgctgcggcggcggcgggcgggcggcggcgcgtgagacgcgcgatccccggtgtcttgggagcagtgccccggcccccgccgctcccgccgccgccatgtcgggccggtcggtccgggcggagacccgcagccgggccaaggacgacatcaagaaggtgatggcggccatcgagaaagtgcggaaatgggagaagaagtgggtgactgtgggtgacacgtccctgaggatatttaagtgggttcctgtgacagacagcaaggagaaagaaaagtcaaaatcgaacagttcagcagcccgagaacctaatggctttccttctgatgcctcagccaattcctctctccttcttgaattccaggacgaaaacagcaaccagagttccgtgtctgacgtctatcagcttaaggtggacagcagcaccaactcaagccccagcccccagcagagtgagtccctgagcccagcacacacctccgacttccgcacggatgactcccagcccccaacgctgggccaggagatcctggaggagccctccctgccctcctcggaagttgctgatgaacctcctaccctcaccttctagaagagagcgtgcctcaggttacttgaacttgaacggagactgtagactcccggactttcccctaggactgggggccctgtaggctgctgttggaggactgggtagagacattggagggaagggaagggcttttctccacacaagggcagagagtccgtctagatttcttcctgtcctgccagctctgcccatgcctgaggtggtcctacctctcacgggcaccctagctgctgacagccctttgtggccgccgtccccatcccctgccctcagcacacacatctgcacacacgcagctttgttctcacctctacctgtcattccagcatccctgcctcttgtcacaaactgccccagcaagaatttgaggttctgacaacagtacccatcccccacagtaccccttcagctcagtttctagaaagctcccttttctttgaaatctgcatgttgaattgaactttgtgattttattttttgtttcaaaaaagtttaagaaaatggaaatgggcaacagtgagtgaagacatattttagcactgaatagaatatttttaaaattaaactatttgaaatatg

SEQ ID NO: 1213 - DNA, 890 bp, Homo sapiens; identical to SEQ ID NO: 765

SEQ ID NO: 1214 - DNA, 2200 bp, Homo sapiens
gcatcctctcaccgccggaagctgaactgactcgtccgcggccgctctaccccaacaggccgccaccagcgagagtgcggccataaccatcacgtgaccgcccaccgacaccagcgagagtgcagtcgtaaccgtcacgtgaccgcccaccgtcggcccggcgctcccctccgcccgaagctagcaagcggcgcggccaatgagaaaggcgcatgcctggcccccgccggcctgcagtctagccgtagtgcgcctgcgcgcggctaggaggggccgtcaggcggggatacagcctggaaggtaatgcatgtccatggtacacaaattcacaagtttggagaccctgacacacccaccttctcacctgggctctgcgtatcccccagccttgagggaagatgaagcctaaactgatgtaccaggagctgaaggtgcctgcagaggagcccgccaatgagctgcccatgaatgagattgaggcgtggaaggctgcggaaaagaaagcccgctgggtcctgctggtcctcattctggcggttgtgggcttcggagccctgatgactcagctgtttctatgggaatacggcgacttgcatctctttgggcccaaccagcgcccagccccctgctatgacccttgcgaagcagtgctggtggaaagcattcctgagggcctggacttccccaatgcctccacggggaacccttccaccagccaggcctggctgggcctgctcgccggtgcgcacagcagcctggacatcgcctccttctactggaccctcaccaacaatgacacccacacgcaggagccctctgcccagcagggtgaggaggtcctccggcagctgcagaccctggcaccaaagggcgtgaacgtccgcatcgctgtgagcaagcccagcgggccccagccacaggcggacctgcaggctctgctgcagagcggtgcccaggtccgcatggtggacatgcagaagctgacccatggcgtcctgcataccaagttctgggtggtggaccagacccacttctacctgggcagtgccaacatggactggcgttcactgacccaggtcaaggagctgggcgtggtcatgtacaactgcagctgcctggctcgagacctgaccaagatctttgaggcctactggttcctgggccaggcaggcagctccatcccatcaacttggccccggttctatgacacccgctacaaccaagagacaccaatggagatctgcctcaatggaacccctgctctggcctacctggcgagtgcgcccccacccctgtgtccaagtggccgcactccagacctgaaggctctactcaacgtggtggacaatgcccggagtttcatctacgtcgctgtcatgaactacctgcccactctggagttctcccaccctcacaggttctggcctgccattgacgatgggctgcggcgggccacctacgagcgtggcgtcaaggtgcgcctgctcatcagctgctggggacactcggagccatccatgcgggccttcctgctctctctggctgccctgcgtgacaaccatacccactctgacatccaggtgaaactctttgtggtccccgcggatgaggcccaggctcgaatcccatatgcccgtgtcaaccacaacaagtacatggtgactgaacgcgccacctacatcggaacctccaactggtctggcaactacttcacggagacggcgggcacctcgctgctggtgacgcagaatgggaggggcggcctgcggagccagctggaggccattttcctgagggactgggactccccttacagccatgaccttgacacctcagctgacagcgtgggcaacgcctgccgcctgctctgaggcccgatccagtgggcaggccaaggcctgctgggcccccgcggacccaggtgctctgggtcacggtccctgtccccgcgcccccgcttctgtctgccccattgtggctcctcaggctctctcccctgctctcccacctctacctccacccccaccggcctgacgctgtggccccgggacccagcagagctgggggagggatcagcccccaaagaaatgggggtgcatgctgggcctggccccctggcccacccccactttccagggcaaaaagggcccagggttataataagtaaataacttgtctgtaaaaaaaaaaaaaaaaaaaa

SEQ ID NO: 1215 - DNA, 713 bp, Homo sapiens
ccccacatcggtccgtcctgcttccagctgctgcagcgcgccttcgccgccaaagcatccagcagccccctgctccggcccagcatggcgaccccgacccagacccccacaaaggctcctgaggaacctgacccattttactatgactacaacacggtgcagactgtgggcatgactctggcaaccatcttgttcctgctgggtatcctcatcgtcatcagcaagaaggtgaagtgcaggaaggcggactccaggtctgagagcccaacctgcaaatcctgtaagtctgagcttccctcttcagcccctggtggcggcggcgtgtaacaccttcccgaggaaactccgctgccgaccctgcctgagcgcgggagcctgaggaccgggtggaggcggtggggacccagccgcgcgccgggagcgctccccggaatgagccgccccacccaccccaaggctggagccgctgcaccctgctgtccctctccaggccttggcaatgacgatcccccaaagagcccgtctgcaccccagacccagggcctcaggcctccagctcctgggatccgggagtccatcccggcccagcacccccagcatccccgtgtatggcccccctgcacctccttgtctcatccccgaagatccgtccccctggcccctcagtgtccatgtcttgagcttaataaatgtgcatttggttttttcctctg

SEQ ID NO: 1216 - DNA, 2611 bp, Homo sapiens
aactgagtggctgtgaaagggtggggtttgctcagactgtccttcctctctggactgtaagaatatgtctccagggccagtgtctgctgcgatcgagtcccaccttccaagtcctggcatctcaatgcatctgggaagctacctgcattaagtcaggactgagcacacaggtgaactccagaaagaagaagctatggccgcagtgattctggagagcatctttctgaagcgatcccaacagaaaaagaaaacatcacctctaaacttcaagaagcgcctgtttctcttgaccgtgcacaaactctcctactatgagtatgactttgaacgtgggagaagaggcagtaagaagggttcaatagatgttgagaagatcacttgtgttgaaacagtggttcctgaaaaaaatcctcctccagaaagacagattccgagaagaggtgaagagtccagtgaaatggagcaaatttcaatcattgaaaggttcccttatcccttccaggttgtatatgatgaagggcctctctacgtcttctccccaactgaagaactaaggaagcggtggattcaccagctcaaaaacgtaatccggtacaacagtgatctggttcagaaatatcacccttgcttctggatcgatgggcagtatctctgctgctctcagacagccaaaaatgctatgggctgccaaattttggagaacaggaatggaagcttaaaacctgggagttctcaccggaagacaaaaaagcctcttcccccaacgcctgaggaggaccagatcttgaaaaagccactaccgcctgagccagcagcagcaccagtctccacaagtgagctgaaaaaggttgtggccctttatgattacatgccaatgaatgcaaatgatctacagctgcggaagggtgatgaatattttatcttggaggaaagcaacttaccatggtggagagcacgagataaaaatgggcaggaaggctacattcctagtaactatgtcactgaagcagaagactccatagaaatgtatgagtggtattccaaacacatgactcggagtcaggctgagcaactgctaaagcaagaggggaaagaaggaggtttcattgtcagagactccagcaaagctggcaaatatacagtgtctgtgtttgctaaatccacaggggaccctcaaggggtgatacgtcattatgttgtgtgttccacacctcagagccagtattacctggctgagaagcaccttttcagcaccatccctgagctcattaactaccatcagcacaactctgcaggactcatatccaggctcaaatatccagtgtctcaacaaaacaagaatgcaccttccactgcaggcctgggatacggatcatgggaaattgatccaaaggacctgaccttcttgaaggagctggggactggacaatttggggtagtgaagtatgggaaatggagaggccagtacgacgtggccatcaagatgatcaaagaaggctccatgtctgaagatgaattcattgaagaagccaaagtcatgatgaatctttcccatgagaagctggtgcagttgtatggcgtctgcaccaagcagcgccccatcttcatcatcactgagtacatggccaatggctgcctcctgaactacctgagggagatgcgccaccgcttccagactcagcagctgctagagatgtgcaaggatgtctgtgaagccatggaatacctggagtcaaagcagttccttcaccgagacctggcagctcgaaactgtttggtaaacgatcaaggagttgttaaagtatctgatttcggcctgtccaggtatgtcctggatgatgaatacacaagctcagtaggctccaaatttccagtccggtggtccccaccggaagtcctgatgtatagcaagttcagcagcaaatctgacatttgggcttttggggttttgatgtgggaaatttactccctggggaagatgccatatgagagatttactaacagtgagactgctgaacacattgcccaaggcctacgtctctacaggcctcatctggcttcagagaaggtatataccatcatgtacagttgctggcatgagaaagcagatgagcgtcccactttcaaaattcttctgagcaatattctagatgtcatggatgaagaatcctgagctcgccaataagcttcttggttctacttctcttctccacaagccccaatttcactttctcagaggaaatcccaagcttaggagccctggagcctttgtgctcccactcaatacaaaaaggcccctctctacatctgggaatgcacctcttctttgattccctgggatagtggcttctgagcaaaggccaagaaattattgtgcctgaaatttcccgagagaattaagacagactgaatttgcgatgaaaatattttttaggagggaggatgtaaatagccgcacaaaggggtccaacagctctttgagtaggcatttggtagagcttgggggtgtgtgtgtgggggtggaccgaatttggcaagaatgaaatggtgtcataaagatgggaggggagggtgttttgataaaataaaattactagaaagcttgaaagtc

SEQ ID NO: 1217 - DNA, 1517 bp, Homo sapiens
gtggagcgccagagctgctaagtgcgtcagttgtggagtggcgtagacgagttaagtcctggtctgcgtggaggtcgacgactccgtcgcagactacggacctgtctgggtctcagccgccaaagaccccgtccggaagtactagccggacatcatgagtggctgtcgggtattcatcgggagactaaatccagcggccagggagaaggacgtggaaagattcttcaagggatatggacggataagagatattgatctgaaaagaggctttggttttgtggaatttgaggatccaagggatgcagatgatgctgtgtatgagcttgatggaaaagaactctgtagtgaaagggttactattgaacatgctagggctcggtcacgaggtggaagaggtagaggacgatactctgaccgttttagtagtcgcagacctcgaaatgatagacgaaatgctccacctgtaagaacagaaaatcgtcttatagttgagaatttatcctcaagagtcagctggcaggatctcaaagatttcatgagacaagctggggaagtaacgtttgcggatgcacaccgacctaaattaaatgaaggggtggttgagtttgcctcttatggtgacttaaagaatgctattgaaaaactttctggaaaggaaataaatgggagaaaaataaaattaattgaaggcagcaaaaggcacagtaggtcaagaagcaggtctcgatcccggaccagaagttcctctaggtctcgtagccgatcccgttcccgtagtcgcaaatcttacagccggtcaagaagcaggagcaggagccggagccggagcaagtcccgttctgttagtaggtctcccgtgcctgagaagagccagaaacgtggttcttcaagtagatctaagtctccagcatctgtggatcgccagaggtcccggtcccgatcaaggtccagatcagttgacagtggcaattaaactgtaaataacttgccctgggggcctttttttaaaaaacaaaaaccacaaaaattcccaaaccatacttgctaaaaattctggtaagtatgtgcttttctgtgggggtgggatttggaaggggggttgggttgggctggatatctttgtagatgtggaccaccaaggggttgttgaaaactaattgtattaaatgtcttttgataagccttctgctcacatttttgtgaatgtctgaagtatatagtttgtgtatattgacagagctcttttataactaaagcaaatttaatttttttgtactagaaaaaaatttgaacattttagttcttggttataaaaatgttaattcagaattagtttaatgccttaattaaactaattaatagctttggacacttaaaagagctctaaatttgcttgtacataaaggcttaatttgttttccttgttagggtcaagggtgtcctccactctttaacagctgctggacagacacattagagcagctgtttgttattgataataaaatattataaaacta

SEQ ID NO: 1218 - DNA, 3199 bp, Homo sapiens
tgggcaggaactgggcactgtgcccagggcatgcactgcctccacgcagcaaccctcagagtcctgagctgaaccaagaaggaggagggggtcgggcctccgaggaaggcctagccgctgctgctgccaggaattccaggttggaggggcggcaacctcctgccagccttcaggccactctcctgtgcctgccagaagagacagagcttgaggagagcttgaggagagcaggaaaggacaatgccgtcttctgtctcgtggggcatcctcctgctggcaggcctgtgctgcctggtccctgtctccctggctgaggatccccagggagatgctgcccagaagacagatacatcccaccatgatcaggatcacccaaccttcaacaagatcacccccaacctggctgagttcgccttcagcctataccgccagctggcacaccagtccaacagcaccaatatcttcttctccccagtgagcatcgctacagcctttgcaatgctctccctggggaccaaggctgacactcacgatgaaatcctggagggcctgaatttcaacctcacggagattccggaggctcagatccatgaaggcttccaggaactcctccgtaccctcaaccagccagacagccagctccagctgaccaccggcaatggcctgttcctcagcgagggcctgaagctagtggataagtttttggaggatgttaaaaagttgtaccactcagaagccttcactgtcaacttcggggacaccgaagaggccaagaaacagatcaacgattacgtggagaagggtactcaagggaaaattgtggatttggtcaaggagcttgacagagacacagtttttgctctggtgaattacatcttctttaaaggcaaatgggagagaccctttgaagtcaaggacaccgaggaagaggacttccacgtggaccaggtgaccaccgtgaaggtgcctatgatgaagcgtttaggcatgtttaacatccagcactgtaagaagctgtccagctgggtgctgctgatgaaatacctgggcaatgccaccgccatcttcttcctgcctgatgaggggaaactacagcacctggaaaatgaactcacccacgatatcatcaccaagttcctggaaaatgaagacagaaggtctgccagcttacatttacccaaactgtccattactggaacctatgatctgaagagcgtcctgggtcaactgggcatcactaaggtcttcagcaatggggctgacctctccggggtcacagaggaggcacccctgaagctctccaaggccgtgcataaggctgtgctgaccatcgacgagaaagggactgaagctgctggggccatgtttttagaggccatacccatgtctatcccccccgaggtcaagttcaacaaaccctttgtcttcttaatgattgaacaaaataccaagtctcccctcttcatgggaaaagtggtgaatcccacccaaaaataactgcctctcgctcctcaacccctcccctccatccctggccccctccctggatgacattaaagaagggttgagctggtccctgcctgcatgtgactgtaaatccctcccatgttttctctgagtctccctttgcctgctgaggctgtatgtgggctccaggtaacagtgctgtcttcgggccccctgaactgtgttcatggagcatctggctgggtaggcacatgctgggcttgaatccaggggggactgaatcctcagcttacggacctgggcccatctgtttctggagggctccagtcttccttgtcctgtcttggagtccccaagaaggaatcacaggggaggaaccagataccagccatgaccccaggctccaccaagcatcttcatgtccccctgctcatcccccactcccccccacccagagttgctcatcctgccagggctggctgtgcccaccccaaggctgccctcctgggggccccagaactgcctgatcgtgccgtggcccagttttgtggcatctgcagcaacacaagagagaggacaatgtcctcctcttgacccgctgtcacctaaccagactcgggccctgcacctctcaggcacttctggaaaatgactgaggcagattcttcctgaagcccattctccatggggcaacaaggacacctattctgtccttgtccttccatcgctgccccagaaagcctcacatatctccgtttagaatcaggtcccttctccccagatgaagaggagggtctctgctttgttttctctatctcctcctcagacttgaccaggcccagcaggccccagaagaccattaccctatatcccttctcctccctagtcacatggccataggcctgctgatggctcaggaaggccattgcaaggactcctcagctatgggagaggaagcacatcacccattgacccccgcaacccctccctttcctcctctgagtcccgactggggccacatgcagcctgacttctttgtgcctgttgctgtccctgcagtcttcagagggccaccgcagctccagtgccacggcaggaggctgttcctgaatagcccctgtggtaagggccaggagagtccttccatcctccaaggccctgctaaaggacacagcagccaggaagtcccctgggcccctagctgaaggacagcctgctccctccgtctctaccaggaatggccttgtcctatggaaggcactgccccatcccaaactaatctaggaatcactgtctaaccactcactgtcatgaatgtgtacttaaaggatgaggttgagtcataccaaatagtgatttcgatagttcaaaatggtgaaattagcaattctacatgattcagtctaatcaatggataccgactgtttcccacacaagtctcctgttctcttaagcttactcactgacagcctttcactctccacaaatacattaaagatatggccatcaccaagccccctaggatgacaccagacctgagagtctgaagacctggatccaagttctgacttttccccctgacagctgtgtgaccttcgtgaagtcgccaaacctctctgagccccagtcattgctagtaagacctgcctttgagttggtatgatgttcaagttagataacaaaatgtttatacccattagaacagagaataaatagaactacatttcttgca

SEQ ID NO: 1219 - DNA, 7620 bp, Homo sapiens
gtcattgagctgatgtgcttttgcaaggggtctctttagaagtggtaggggcagggtcgagagaagaaggggatgcagaatctgtacatgaggaaggagccagagtcactcaggaaactcctcattcttcctgcgctggctgtggcacacccaccggtggcacacccctccctcgggtccagttcagcccacagactcctgggaggagagccagggccccagcctctcctttgaggagtgttgcagcctttctgtgtgccagatgcctagtgaagaaaagctgaaaccctggagctttgtgcatgttaatgaccttggaaatgactgagctcacggaccctcatcacaccatgggagactacaaagtggcccaccctcaggaccctcaccacccatcagagaagcctgtcattcactgccataaatgtggggagccttgcaagggtgaagtgcttcgggtccagaccaaacatttccacatcaagtgtttcacctgcaaagtgtgtggctgtgacctggcacaagggggcttcttcataaagaacggagagtatctctgcaccctggactaccagcggatgtacgggacacgctgccatggctgtggggagttcgtggagggcgaagtggtgactgctctgggcaagacctaccatcccaattgctttgcttgtactatctgcaagcgcccgtttccacccggagaccgagtcacattcaatgggagagactgcctttgtcaactctgtgcacagccgatgtcgtccagtccgaaagaaaccaccttctccagcaattgtgccggctgcggaagagatatcaagaatgggcaggcgctgctggcgctggataagcagtggcacttggggtgctttaaatgcaagtcctgcgggaaggtcctcaccggggagtacatcagcaaggatggtgctccgtactgtgaaaaggactaccagggactctttggggtgaaatgtgaggcgtgtcaccagtttatcacagggaaagtcctggaggcaggtgacaaacattaccaccccagctgtgcacgatgcagcagatgcaaccagatgttcacagaaggagaggaaatgtatcttcaaggctccaccgtttggcatcccgactgtaagcaatctacgaagaccgaggaaaagctgcggcctaccaggacatcctcggaaagtatttattctaggccaggctccagtattcctggctcaccaggtcatactatctatgcaaaagtagacaatgagatcctggattacaaggatttagcagccattccgaaggtcaaggcaatttatgacattgaacgtccagatcttattacctatgagcctttctacacttcgggctatgatgacaaacaggagagacagagccttggagagtctccgaggactttgtctcctactccatcagcagaagggtaccaggatgttcgggatcggatgatccatcggtccacgagccagggctccatcaactcccctgtgtacagccgccacagctacactccaaccacgtcccgctctccccagcatttccacagacctggcaatgagccgtccagcggccggaactcccctctcccttaccggccagacagccgccctctaactccaacttacgctcaggcccctaaacatttccatgttccagatcaaggaatcaacatttaccgaaagccacccatctacaaacagcatgctgccttggcagcccagagcaagtcctcagaagatatcatcaagttttccaagttcccagcagcccaggcaccagaccccagcgagacaccaaagattgagacggaccactggcctggtcccccctcatttgctgtcgtaggacctgacatgaaacgcagatctagtggcagagaggaagatgatgaggaacttctgagacgtcggcagcttcaagaagagcaattaatgaagcttaactcaggcctgggacagttgatcttgaaagaagagatggagaaagagagccgggaaaggtcatctctgttagccagtcgctacgattctcccatcaactcagcttcacatattccatcatctaaaactgcatctctccctggctatggaagaaatgggcttcaccggcctgtttctaccgacttcgctcagtataacagctatggggatgtcagcgggggagtgcgagattaccagacactcccagatggccacatgcctgcaatgagaatggaccgaggagtgtctatgcccaacatgttggaaccaaagatatttccatatgaaatgctcatggtgaccaacagagggcgaaacaaaatcctcagagaggtggacagaaccaggctggagcgccacttagcccctgaagtgtttcgggaaatctttggaatgtccatacaggagtttgacaggttacctctttggagacgcaacgacatgaagaaaaaagcaaaactcttctaagtcccactcgtgaatggcaattagagaaaggactgacagtggcggtgccccataggatgtcatattgaggcccaaacttgattggagaatttgcaaactaccgtcgctcagcaacaccaaaaagagaaagtctggttaaaacaccatgagtcaaatgtcgggccagccaacagtaacacttgccaagaagcatggcgtagaaatttctatgttccgaaacacagagtagtgtccacatgtgagcttttcacattaccttatgtatacaacaggagctgcgttgttttcttctttttcttttcctttatctgttgtccaacaacagtgctgactgtccggataagagctggcaagtgcccttaggatgccgcatgggaaaaatcggttatcataatttcaaagtataaatatatttattaagtagcgctgcggctaagaaggaagagtgaggggtctgtccatggggtggcagtgatttcacacccgcctttcttgaatggcttcgtgttactcagccgtgccctggcaggaatggaactccatcagggaacagggcagctctgtttgaatggggtgaaaaacagcaaaattaattcttagcaagctccttgttctctactgttcaccgggacctggctggcaaatgacttagctattagtatatttaaaaactgttcaaaagcaaaagagaaggaacaggaatgaaaggaaaccttcccttaactctttctgcttcccatagcaggtctggttcctgctccccgcctaggacaggagctgtctggagctccacctttgcaaagaaaggaaaaacacaaattgcccccagattggcccagtggcatgccattaggtgattttgcataggggccatatcattcatggccaaaaaaaaccaaaaagcaaaaaacaaaaacaagtcccatgtcctactgactctagttcttccagtcgttatcctctgctgtctctctggcatcctatgaatcagatcaagcccatgctgttgttggtttttaaggtttctttcaataataggctaaggaaagacatgtttttctcttttaaatctctgcaactccaaagtagactccttcgaacgtatttaatttggccttttcagctttcttcttgcccagctctgtcgaattcatgggtgtgtgtgcacatgttggtttcactcacccagagtaattttgtgagcatgcatgtgctttttaatttctgcttgaatgtttgtcctgctgtgttgcagcttctaaagacattgtcaccgagtgtgtgtgactcaaagatcaagagtgaggctaaactgcgaccccaacatcacttccttcatggaaaggtgttggcgctgatgtagctcatggaaggatcagactgggaaccacagaggaaggatgaggtgggatgtggaggtcagagcatctcacgagagtccctcaggctctgcaacactagattcgaatatgagcctagggtttccccaacacgtgcgtgcatatgaaaccacatcatgattcccgacgtgagttagatgagggagagtttgtgtaactccacacccaggagggtaagccactttattatcatgctttggggctgtgcttaagaatttaagctctgttttaaagccgaagaagaaaacatttgaatttaccttcatatgccactaagaacaaaagctctgaagttcttcctgctggcaccaaatattaggattacaagctgtctctctgacaccagtggtaaaaaagcaagtagaatagtttctgagtctgtgttgcagcctctgacacgtggctcaccgctgtcatttgggggatggaatgaacagtcactgttctatagcatcctcctgtgctcttacctaaggaatctaaattgtcctagccttccattgctatgcactgaatgaggactactctcgtgtgtgtgtgtgtgtgtgtgtgtgtgtgtgtgtgtgtgtgtgtgtgtgttggatctactaacatgtttagcaaatggctctgacagggtggccatgagcagatgagaccagctcttgcttggttggaagccacactgcagtttgcagtttagcctttggtgtctcagtggcttcttgcttattccatgctttttctatcccatcctctctctgtgccctcctgcaatggcagccttggcacaatgcctgggtgtcctcatccttgctttactctggaaagtgtggggatggagaggatggtgcatttccagtgcttccttacctgtcaataacaatggtggccacctgggtcccagcacttggctggtggagagatttttttcattatggagctaataaagggtccctacgttttacattgattaatgaattatcacccagacatgtgcagatgaaatgtcaatataagaaaaatcaaggtatttgggaaacatgggcataatcaggtagttttgctaaaattcctcttccttggtctacataaagaagacatgggtctgtcatagaatggggacattagactgaaaactgggacaacccccttccttattttatagagactaggagttaaggggcctgcctaagattgcagtgataaagaactgaaccctaaatcagctcccactaatgaaaccctgctttccttgtatcttttaaactcagttctgcatccaacttgagaagaaaaaaagcttctttccatatcaagtaccatatgagttcatttaaactgcaccttgcagaaatgcattgccagaaagcaccagtagcctcctatctgcaagcagagtagtgctctgctctggggaggggtcattggaaaccataatgcagagtgggccccctactccatttcccagcaaaaggctccagctggagggatgggttgtggggcaacctggttcctgctaactgccagattgaatgtgtgggctagaatgcctgcacatttagttaaactgggctcagcatgcttgtcctcaaaatgtccatcctggtcacagcacacaagatggctattggtctgcttttaccctaccctgtactatacatgaaaattccagttattaacacactcaaactggtggagcttgttcaccctaggaaggggattgtatatatggcaggcttccctggtgccgatgtaaagggctacatttgggaacatttgacttccttgggactcttaagtgcataatgatggcatgaagtaaaaggggcctcaatgatgataggaaaatcagttcttttaaaatttcttcaagaaaatccaggctatcacatagtctttctgtgtgacttattaggagataggaagagcattgggaaacttgcacagctagctatgcatctacattttggtttggggttagttatgaaatgttcttaatatgacgtgttcaataacttcacataaacttcctgttctccaaaacctcaaagagatagagttaatgagttgttgtttttttttaaatgggggtagttttctatctgtcatgggctctagcatctactccgctacccaattctgtcatctccaagctgagtttcctcttctgaggcagaggctggagcagttctttttcagttctcatcctctccatcccaatccagtatatcaatcaactctaactcggagacgtctagctggcaatgtttctaaaactttcactggatttctttagacattgaagcaaacatttttttctaagaattgcttctcagatgatgatatcaaatgtatatgcttttgcaagtttgaaaagttcaaattaaccacttttgactaggtaagtctttctaaaaaccatttaaagctaactgggtcttagcatcctcctgtgtatggaagagacaggtgaccgctccaggttgggtgctcacagaacccttttcctgactctcatggaagatggtggaaggaaaatagactgtctcatcaaccctcctgtgtcctctgaagcaatctcagtttttattaaccacctcttctgtgtttctggtagctatttaacctgtatttaatctgtacttcctatgccagcctcaattttatttgatttttacaattattctcttctaaccaatgaagtgtttgtcagtatgccccaaagcttgctcttttgtgctcccttttgaataactttctatccagaaaaagagattatttgggacttgagatttgcagtgataccaacttatagcaatgatgtactttaagggaactacccaactatgttgtgatagaagaaagagaaaccttcactttggcatttttttttaatcactgtttatttttctgtttgcggcccaggaagcagtgggaggtggtggcagatatgctttgcatatggattgttatgtttttatttgggcaagtttaatcatggaaaactcaaaaagaaggggggaaatggtcagtttaagccaaaagaaactttctaaacaatgtataggtacacagcaaaattaaacaaatccaacaatttctgaagcttagtgtaattgagtggtggttgttattcaataaaattattcccaaaagtgtttctcctaagagtgcagttcccatgagtcacttcctgaacccattgaccaaaggtggacagagacaatcctgtagaccttgacattcagaaagatgtgagctgcttactgatcatatatgcatacgtttctttacagcagaggaaaccattgtccacaaaactgatgttcttttggggttttatgtacagacttgtccaatcatgtgtgtggttcctgcgagttgctgatgactccgcattgaagctctctgagttctttgattttaagttgggtttatggaattttttcaaatgttggaaggtgtgtggttcttcctgccctccctccccttttggaaatatgaaagcaaatgtttagaagaattccttttgaaaagctgtgtcgtgttccctgtgaaactgagcaggtgtgtgttggcgcgctaagtgccacatgcttgtgtgtagaggaggaggtggccctgccggctccgcgctgctgtgcctgtgatccctacctgctccccgctcctgttgccagcagcactcactgcactcctttgtcatatactctgcatcactgtcatactcacaacttcgtgaataaagttgtgtgctttattcgtagaaaaaaaaaaaa

SEQ ID NO: 1220 - skipped

SEQ ID NO: 1221 - DNA, 3760 bp, Homo sapiens
ctttcatactgcctcctcccttgtttttctgtctcagagagatagtctgtcctaaatatcccatgtagcccaggccactgaattaaaacggagcgtattcgttctctgccccaccccgcaactcctgaaagcggcgcaactcaattacttgatccttatatgccccacgcgggactcatactacgtttcccgtgaacacgtgcagtccaaaccccgcccctgatatttatctcagtggacggtggccggaaaaggacaatggtttccatgtcagcggataaacgctctcccctcggctcccggacgcgacggaggtcgtagtagtagtgagtacgtgctgaggagcaaaggagtaaccaagagatccagtgaccgacagagcaagagccatgccgcgccggggcctggtggctgggccagacttggagtattttcagcgtcgctatttcacgccggcggaggtggcccaacataacaggcccgaagacctctgggtatcttacctgggacgcgtgtacgacctaacgtcattggcacaggaatacaaggggaacctgctgctgaaacccatcgtggaagttgcaggccaggatatcagccactggtttgatccaaagaccagagacatccgcaagcacatagatccgctgaccggctgcctgaggtactgcaccccgcggggccgctttgtgcacgttccgcctcagctgccctgttcggactgggccaacgattttgggaagccctggtggcaggggtcgtattatgaggtggggcggctgtctgccaagacccggagcatccgcatcattaacacgctcacgtcgcaggagcacacactggaggtgggggttctggagtccatatgggaaatcctacaccgctatctcccctataactcacatgctgccagctacacgtggaaatatgaagggaagaacctgaacatggattttaccctggaagagaatgggatccgggatgaggaggaagaatttgactatctcagtatggacggtacacttcacacacctgcaatacttctgtacttcaatgatgatctcacggagttgtaggcaaggagatgtacactcgtgtagactcaagacgtatttcgagtttggctttttctgtgccttgaggaaaagtggtggggccgaggggtgcctggacccagatctccactcctctccaggagctagcctgtgcccttctgaagtgtaaaggccctattccctgccttcattacagtttgctctgagaaaattagtgaattaatctttgggaatgatacaagaagatcaagtaccttggtttagggagatgtagaagaggatagtcagagttcaggcagaactgtttgatagttaagagagagtagttctacaggggtgagggatggaaggacttttttggcaatgatggaaatgagatgtctgcaggaagatgggatttacaaagaaataggaaatgtttatcattgaccatacaaagctggcttatcttacttgtagaagagtgtttggcagctgaaacccaagggaaagaaaggaagtgcgtcattataggcaattcaggctagatattatactaggtacttcatataccctcttttttttttttgcccccaacaaagagaaggggtcttgctctgtcacccagtctggagtgcagtggcaaaatcatggctcactgcagcctggagctcctgggcacaagtgatcctcccatctctgccttgagtagctgggacttcaggtgcacgccacaatgcctaattttttaattttttgtagacacagggtctcgctgtgttgcccaggctggtttcaacctcctggcctcaagtgatcctcttgcctcagcctcccaaatagcctcttcaagacaactaccccataaggtggattaccattactatgttacagataagtccttcgaaactttggaaagtttaatagctcaaagccacactaggtagtaaccactagagccagaatgcaaattcaagtctgcccaactccaaagtccatgttctctcaatataaagggaccatctcaatgtctaatctcatgttaacatttgtagccactgctctcagcaagtatttgggatgtggctttgtcctaggatccctgcacaataggaaattgtggtcctattgtatagtttgcagttattgtctctggaagggagtttgcagagttctcctgtggcgaagaggaggcaaggaaggctaagtgtcagttaagcaatagctattggggctacttctttgttaatcccataccccagatttctctcctgaccttttggggcaaagaggtgggtatttactaacttgaaggaaaactagagtggggaaaaggccggcaaattagtgacactttggcgagggagaaaaaggaggcagtttgccacttggagaagatgaggaagacagggttgcaagacggtgactccaaaagagggagctcgacaggggtaatgtaaacagagatgctaactaagtcagaaaactctcctggtgaccaaaagagaaccactattgggggtaatggctagatttggtctcctttaacttaaggaggggagatttgagaatgacagacagttgaacttcctggcagcagcaagcaaaaaacaaatcaggaagagtttagtgtgtcttctggcaggggacaccagggcccagcacaggagaaggtggcccctgtgagatactggtgggctatataggcattttctgaggggctttgggaggcatgaacaaaggtggaaacattgctgttggcttcggcagtatctgaatttactgtgagatggagggtttaaatctaaccccatggaatgcaggagtccatgaattatctaaatcgatcattttgatctttaatcaactctgcaattatgtgtaccttgtttgctcaattaaaccctgaactatttgagaatgaaagctatgctgttcctctagtgcaagcctcagggcctgtcctgtgcctacaggatgtccccattctgccaaaacctgtccctcttccagagactcctacttcaatgtctcttgctagaaacacatccctttcctcacacatccagtcactcatcaagtgtaatctgtctcctaaatatctctggaacctatcttcttttctccaagttaccatcacctcttgtctaaactgctacggaaacttcctaacctgttctcccatttccacttctgacttccatgctgcaatgagagtcagctatgaaaaacaaacctaaacatcgaactttccttagcttcttcagtggcttccaactgcttttggaataaagtcctaaattcaaagatcttgtataaatcaggctcatctcgcaacacccctctttgttctctatggcctagacacactggctttcagttcattacatgtcttgcctcagaccctcacacactgtcctctctgcctgcaacactcttcctttcactttccacctagctgatcctaaatgttccttcctcagggaggtcttttctgatttcttggtgggtcaagactttctgataaatcagttagcaccatgcattttccagagtttttattacaattgtaaaattatggctgtaataggctggctgcgctgctagattgtaagctcacgagggcagagatcttgttcacatcttgctcactgctatattctcattgctgagcacacagttgcagctcaataaattttgaatgaactccaaaaaaaaaaaaaaaa

SEQ ID NO: 1222 - DNA, 777 bp, Homo sapiens
acaaagggccggaaggaagccggggagacaggtggggtactcgggaagctggagcgggccggcggtgcagtcacgggggagcgaggcctgctgggcttggcaacgagggactcggcctcggaggcgacccagaccacacagacactgggtcaaggagtaagcagaggataaacaactggaaggagagcaagcacaaagtcatcatggcttcagcgtctgctcgtggaaaccaagataaagatgcccattttccaccaccaagcaagcagagcctgttgttttgtccaaaatcaaaactgcacatccacagagcagagatctcaaagattatgcgagaatgtcaggaagaaagtttctggaagagagctctgcctttttctcttgtaagcatgcttgtcacccagggactagtctaccaaggttatttggcagctaattctagatttggatcattgcccaaagttgcacttgctggtctcttgggatttggccttggaaaggtatcatacataggagtatgccagagtaaattccatttttttgaagatcagctccgtggggctggttttggtccacagcataacaggcactgcctccttacctgtgaggaatgcaaaataaagcatggattaagtgagaagggagactctcagccttcagcttcctaaattctgtgtctgtgactttcgaagttttttaaacctctgaatttgtacacatttaaaatttcaagtgtactttaaaataaaatacttctaatggaaaaaaaaaaaaaaa

SEQ ID NO: 1223 - DNA, 2072 bp, Homo sapiens
acggcaagagctctgccagggcagtcccagctggcccaggcgccgcagcgctcccgagggccgtcgagcaaaggcgggaggcgcagccgggctgtcggtggacctgtaggtatcagggctccttggtcccctcctgcgggaagcaggcaccgagtggggctgcatgtagacgcatgcgagggtgagagctgcggcggaggacgctgatcgcggagtgcaggcgagggccccagaaaggtcccgcaggtcgcctcgctcgtggcacgggctcggcagcgttgtggttagtgacacggaggaagacagaaagccatatgcacagcacgcagaacaggaggaggggggaagaaagagcaggcacggggcaggcagagccgcagccacgccgccgggatgcagcaggcagggccacccacgagcagggcggggccctaacctccgacccaggctggtcgccgcagatgggggcagagatgtgaaacagctgcagagcgggacaagggtgctgccggcacagggctgaccacagagcacatcaaaagaggcccactgctcagtggagcgtggaggacgaggaggaggccgtccacgagcaatgccagcatgagagagacaggcagcttcaggcccaggacgaggagggaggcggccatgtccccgagcggccgaagcaggagatgctcctcagcctgaagccctcggaggcccctgaactggatgaggacgagggctttggcgactggtcccagaggccagagcagcggcagcagcacgagggggcgcagggcgccttggacagcggagagcccccccagtgcaggagtcctgagggggagcaagaggacaggcccggcctgcatgcctacgaaaaggaggacagtgatgaagtccacctggaggagttgagtctgagcaaggaggggccaggcccagaggacactgtccaggacaacctgggggccgcaggggctgaggaggaacaggaggagcaccagaaatgtcagcagcccaggacacccagccccttggtcttggaggggaccatcgaacagagctcgcctcccctgagccctaccaccaaactcatcgacaggaccgagtccctaaaccgctccatagagaagagtaacagtgtgaagaaatcccagccagacttgcccatctccaagattgatcagtggctggaacaatacacccaggccatcgagaccgctggccggacccccaagctagcccgccaggcctccatagagctgcccagcatggctgtggccagtaccaagagtcggtgggagacgggtgaggtacaggctcagtctgcggccaagactccgtcctgcaaggatattgtggctggagacatgagcaagaaaagcctctgggagcagaagggaggctccaagacctcatcaacaattaagagcaccccatctgggaagaggtataagtttgtggccaccgggcatgggaagtatgagaaggtgcttgtggaagggggcccggctccctaggcgtcccatctcgcttcctgggtctgcaggtccagccggctggcaccctccatgtacccaggggagattccagccagacacccgccccccggccctggctaagaagttgcttcctgttgccagcatgacctaccctcgcctctttgatgccatccgctgccacctccttttgctcctggaccctttagcctctctgcccttccactctctgaccaccgcccccgccctccccacccagctccgcttcttgttacttgggggaggaaagaaactcctgatcattggccaaagggacttacccctggagaggccaagtgccttctaggaagttaggaggttgaggcacagcctgtgcagagagggtgggtcacccccccagatccaaggagaaactgcaggtcaagggctgataacggccatgcaggatgcttgatgctgcgtcccccgctgcttgccgccccccaccccgccattttgtataataaagctccctgtgtattctcaaaaaaaaaaaaaaaaaaaaaaaaaaaaaaaaaaaaaaaaaaaaaaaaaaaaaaaaaa

SEQ ID NO: 1224 - DNA, 4545 bp, Homo sapiens
actctgcgcgccggcgggggctgcgcaggaggagcgctccgcccggctacaacgctccgcgagccggcgcggcaacacctgttcgcggcagcctgggcggcacgcgagctcccggacgcggctctcctcgctcgccgctcgccacccgttctaagccaatggacatctgccgagcctctggagaatcctggatactagctttggacgcctaaagtttcttcttctttttgttttattattattatcattttttggaggggggaccgggaggggagatttgtcgccgccaccaacgtgagatttttttttccccttgaaggattcatgctgatgtctgcagagtcggttagagagtaaaaacagcgcatgccttcctggagtcaggatccgtaaattctgacgtagcccgtgcatcttaaaaatccctataataacgcctaggcatttaagttgctatggtcattctgatctcaaaccaaatggagaaactacggattttttttccttattacggtcggatgggatgaagaccttcctgcctgctaagagctggggatctatctatagagatacatagatatgtttatcaatatgtcagtgtgtgagtataaagtggtggtttcttagactatcagtggtttgaccttgaacctgtgccagtgaaacagcagattacttttatttatgcatttaatggattgaagaaaagaaccttttttttctctctctctctgcaactgcagtaagggaggggagttggatatacctcgcctaatatctcctgggttgacaccatcattattgtttattcttgtgctccaaaagccgagtcctctgatggctcccttaggtgaagttgggaactatttcggtgtgcaggatgcggtaccgtttgggaatgtgcccgtgttgccggtggacagcccggttttgttaagtgaccacctgggtcagtccgaagcaggggggctccccaggggacccgcagtcacggacttggatcatttaaaggggattctcaggcggaggcagctatactgcaggactggatttcacttagaaatcttccccaatggtactatccagggaaccaggaaagaccacagccgatttggcattctggaatttatcagtatagcagtgggcctggtcagcattcgaggcgtggacagtggactctacctcgggatgaatgagaagggggagctgtatggatcagaaaaactaacccaagagtgtgtattcagagaacagttcgaagaaaactggtataatacgtactcatcaaacctatataagcacgtggacactggaaggcgatactatgttgcattaaataaagatgggaccccgagagaagggactaggactaaacggcaccagaaattcacacattttttacctagaccagtggaccccgacaaagtacctgaactgtataaggatattctaagccaaagttgacaaagacagtttcttcacttgagcccttaaaaaagtaaccactataaaggtttcacgcggtgggttcttattgattcgctgtgtcatcacatcagctccactgttgccaaactttgtcgcatgcataatgtatgatggaggcttggatgggaatatgctgattttgttctgcacttaaaggcttctcctcctggagggctgcctagggccacttgcttgatttatcatgagagaagaggagagagagagagactgagcgctaggagtgtgtgtatgtgtgtgtgtgtgtgtgtgtgtgtgtgtgtatgtgtgtagcgggagatgtgggcggagcgagagcaaaaggactgcggcctgatgcatgctggaaaaagacacgcttttcatttctgatcagttgtacttcatcctatatcagcacagctgccatacttcgacttatcaggattctggctggtggcctgcgcgagggtgcagtcttacttaaaagactttcagttaattctcactggtatcatcgcagtgaacttaaagcaaagacctcttagtaaaaaataaaaaaaaataaaaaataaaaataaaaaaagttaaatttatttatagaaattccaaaggcaacattttatttattttatatatttatttattatatagagtttatttttaatgaaacatgtacaggccagataggcattttggaagctttaggctctgtaagcattaaatggcaaagtccgctatgaacctgtggtaaattcatgcaagtagatataatggtgcatggatataagaaattctaatgaccctaatgtactaaaggcgacaatctcttttgtgcccatattattgtaaacttatgcacatcgctcatgacactgagtattcactcttcagactgcttgtttcatagcttatcccagaggattaaagataaactgggtctcaaactttgattctgtgtctgcaatatttcctctctcataagtgactccactattgtaacttcatggttggaaaatatgagggttgatatatgtcttacttgtttaaatctgtcgcagaatataccaaagctaaataataactatgctttcattttagccgatctccagaatgacagtattaacatcaaacattgtattgatttagaattctcaaaaaaggaaaaaaaagtacatagcacagactattttttttaaagacgtaagaatcagattaacaggatcatacttgtaaactttttttggttcacttggctatcaaatatgaaattatagaagtatcataggggtcattgtaacatcttttagagaaaatggctatcagtgtgaactgtcataattacgtggtaatagcacccttagtaaaacttgcaaaatgaaactaataaatcgttatcaataatgacaatgagggggaaagtattatacttgttgactgtgttttgttttttaaaatggtctccacaagcgctcaatttttttagaggggatattactatatagaatatcttttacaaggcttttataacattttatgctgaaaagcataagaatacgtatttctttagtagcaataattttggaacttgcccttgggcaagcgagactatttcttactatatactaaggagaaaagagccaaattcttaaagcaatatttaagaaaaaaggaatttataacaaattctcatctacatatgacactttctagccagttgtgttgagaagtgcaaagtgacggtttaaacatgtgttgggatttattgaactaattttaaaatttactattcaaactttattttgctctgatgcacattctctatgaaaaataaaagtgtgtcactggtgagtgacagctgttatgagctagaagcgcatgacttattgtgacgatgtcttgcctttctgtggtccaagttggagtacatggcaatgccctcctgctgatgtgcattaaggaaaatctaagtctaatatttggaattaagatatattttagggggaggggacagaagcaatgtaaaatagttgatttatgataaagctcagaatgtcctcttcatttattttcttgttttattttcctttctaaacagaaactgcatttaattccaaaaagtagtattcttatttattatttaaccctttgctgctgctaaaatgtgcacatattcaggctttagtttttccaaaaggcattttttttttggctgaaaaatattaaacatttgaccacagggaagaatcaagtttctaggatgtcataggtatactatgtagcactgaaaaaattgattttaggtgacagccaaaagtagtcttaaagtagcatgagaccttagataatcgacctaaaagaaagaaaattgtgaaaaagacaaaaatcttcatgcattcctataaaacgctactttaaggtctacttttggagttaattttgtttggtactttttttttttttaagacgagcaaattgttatatgcttttggcaattgatacaataaactgtaatggtctgtaaataaataaatattgactcatgcgatttatgtaaatagtggaactgggagagtggatggctcagggtttcggtgtgggcattgtctcttgggcagtagagtgagtcatccccagctcatgggtttgcatccagttcttgtcttaagagacccaaagcccagtgaatggcagccctgagccactgtggaatgggggttctggtttcacaaacagatgcttagatagccaaaccactgtcttgttggtgccaacacttgcactgtggtcaaagacttaccgagcatgggctgaacaaccttcccatctgtcatgtgaatgtccccaagcagtggtgaaggacatgctaggtcagtgttggggaacctgccctgccaggtcctgttttgtagataaacaaatggctgccttctggtgtttttattctatttcatctcattaacactacaaccttgtgttatttacttgataatctgtaattgtatgtaaatacatacaggattatgtaatttgtgtaaatacataattacagagttttgaaaactgaaaaaaaaaaaaaaa

SEQ ID NO: 1225 - DNA, 4247 bp, Homo sapiens
ctcatgctccctttttcgctctcttgagtacatgcacttgctttctctctcttgcttttcctctttctcaccttagctcctggcctcgggcgctgtctacaccccaccccatccctcgctctttgagaagcctctgtgcagtgcccaggtcctggcggcccagcttggaagttcctgtggtaccccttgagaggccctagggccacagcatttcctcccaggggtgacttggtagtgatacgctctgtttcttcacttctgcaattgccagacagcatagaggctgaggctggggccaggacccagacagagacacacggtcactgcagctgaagccgctgcccctgctacaggcaccaccaggaccagctgatcattccagcccacagcaatggagccacatgactcctcccacatggactctgagttccgatacactctcttcccgattgtttacagcatcatctttgtgctcggggtcattgctaatggctacgtgctgtgggtctttgcccgcctgtacccttgcaagaaattcaatgagataaagatcttcatggtgaacctcaccatggcggacatgctcttcttgatcaccctgccactttggattgtctactaccaaaaccagggcaactggatactccccaaattcctgtgcaacgtggctggctgccttttcttcatcaacacctactgctctgtggccttcctgggcgtcatcacttataaccgcttccaggcagtaactcggcccatcaagactgctcaggccaacacccgcaagcgtggcatctctttgtccttggtcatctgggtggccattgtgggagctgcatcctacttcctcatcctggactccaccaacacagtgcccgacagtgctggctcaggcaacgtcactcgctgctttgagcattacgagaagggcagcgtgccagtcctcatcatccacatcttcatcgtgttcagcttcttcctggtcttcctcatcatcctcttctgcaacctggtcatcatccgtaccttgctcatgcagccggtgcagcagcagcgcaacgctgaagtcaagcgccgggcgctgtggatggtgtgcacggtcttggcggtgttcatcatctgcttcgtgccccaccacgtggtgcagctgccctggacccttgctgagctgggcttccaggacagcaaattccaccaggccattaatgatgcacatcaggtcaccctctgcctccttagcaccaactgtgtcttagaccctgttatctactgtttcctcaccaagaagttccgcaagcacctcaccgaaaagttctacagcatgcgcagtagccggaaatgctcccgggccaccacggatacggtcactgaagtggttgtgccattcaaccagatccctggcaattccctcaaaaattagtccctgcttccaggcctgaagtcttctcctccatgaacatcatggactgagctgggggaagaagggatatctactgtggtctgggcaccacctctgtgggcactggtgggccattagatttggaggctacctcacctgggcagggatgatggcagagccaggctgttggaaaatccagaactcaaatgagccccttcatccgcctgtgggcgcatactacagtaactgtgactgatgactttatcctgagtcccttaatcttatggggccggaaggaatgtcagggccaggtgcagaccttgggggaagactttaaaccacctagttctccccgatggggcatcggtctaaagctttgggggagtgggcgcagtggctcacacctgtaatcccagcactttgggaggccgaggtgggcagatcatgggtcaagagatcgagaccatcctggccaacattgtaaaaccccatctctactaaaacatacaaaaattagccgggcatggtggcacacgcctgtagtcccagctactcaggaggctgaggcaggagaatcgcttgaacctgggaggcagaggttgcagtgaacctagattgcaccattgcactctagcctggcaacagagcgagattccatctcaaaaaaaaaaaaaaaaaaaaaaaaaaagctttgggcaactactctcaagtgatagaggtagactgggttaggaaaggacactgccctcactgtatggcactaccttggggcagacttttgagctaagatgttgccatcctctctccaccctccggcacaaggtctttgtgacctttctcaggggaaggggcttgatggaaccttctctgactcatctggcaacctgtccctaatggtgaccaaagaagataaaacatgaacagaccaaaagctaggacaagagcttgcttcccaagacagacgtgtctgtctgcaaaggccttgcctctagtccagtcagctctgggggagtgggaaggagatgcccacctcctctttctgtctcaacaatagtccctaattaagtaccttctgtggggcagccacccactgagggtgggcaaaggccccttgaaagcaaaattggggctgggctcagtggctcatgcctataatcccagcactttgggaggccaaggcaggcagatcacctgaggtccggagttcgagaccagcctggccaacgtggtgaaacgccatctccactaagaatacaaaaatatggctcatgcctgtaatcccagtactttgggaggctgaggtgggccgatcatttgaagttaggagtttgagaccagcctgaccaatatggtaaaaccccgtctctactaaaaatacaaaaaaattagcctggcgtggtggcgcatgcctgtagtcccataggctgtagctactgggaggaggcggagcttgcagtgagccgagatcacgccactgctctccagcctgggcgacagagtgagactctgtgtcaaaaacaaacaaacaaacaaaaaaggcaaaattggagctgtccaggccaggacaccccgatgtccaggggcttccatacgaacaggcacatgggctgggaagtacatgaggcccctgggtagaagggtctgtcagttctctcctcccttgccctctgggagggtcctcctaacatagcttccaggaggtgggaggagcagttactgtcagcaggtgtcagccaggtgtcagcttctcctggggatctctagatgtctgcttgtgatttttggcaagtatatgcaaatgagcctcctctcctgccctgagacaagtatctgcagtgtgaacctggcagcctcagacccaaggggctcagaggaaacttctctggtttctagagctctgtgctccttcagagaagtcttccttccttccagtcagtgtccctgtgaagctgggatactcatttcctgtgtaccgggcaaacaccggattgctgattttgagaaatgcctctcgatggacctgtaacctgctggagtctgggatggtagctgtgggctggacttggctgatgggatgacccggtggctagtgcagcatcacacaagcctggttcaagtcttggctgtgtcatttcctgctgagggaccaggcactgaatttcctacctcttagggtcattacctatgaggttaaagctacctcatgggattgttatacgccactaatgttgaggcagacacctcttggcagggtgactgctcatcttagaccctccccttttctgcgaatttgggccccttgatcctctgatgggagctgaaaggatgagaggtgggcatctagatttagggaggctgttcaggctttgcaggtcccttacctgaacacatagaaaccctggagctgtgactgtgtccatgtgtgtgtgtttgtctgtgtgtgttgcgggggatgggcacctgcatgaatgtggtagagaaaatggctctgctcagagggaagatacgcatagcaaggcagggaccagaggaatcacaggcgcctggagagcagccgggcaccgcctccagggacctgccggcttccctcagtcctccaggggcccagcactcttcctttaggccctgtgagcgtcccttgtcaggatacattctctcattttgctgaagctgatttgattgggtgtctgtttctcgcagccaaaagagctctgaatgaggaaagtgcttctgtgctaactccccgcgtctcctgaatttcagtcattcatgtacccgcctcgaaatttttgcaatatctgtgtaccaactgtccatttacttaataaagaagttttctttaaattaa

SEQ ID NO: 1226 - DNA, 1851 bp, Homo sapiens
gtgcaggtgaggcacgtttagcctgagccggccacggactccacttcccctgctcttcccccagtggcaaatccgcgccacctcgcaaacccccaactcaggcacttgggccccttttgggccccctctcgctcctccctttaggcacctccctgggcccgcccacggtctccccccagtttgggactgcgtcataagtatcccagacctcggcttgcagtagtgttagactgaagataaagtaagtgctgtttgggctaacaggatctcctcttgcagtctgcagcccaggacgctgattccagcagcgccttaccgcgcagcccgaagattcactatggtgaaaatcgccttcaatacccctaccgccgtgcaaaaggaggaggcgcggcaagacgtggaggccctcctgagccgcacggtcagaactcagatactgaccggcaaggagctccgagttgccacccaggaaaaagagggctcctctgggagatgtatgcttactctcttaggcctttcattcatcttggcaggacttattgttggtggagcctgcatttacaagtacttcatgcccaagagcaccatttaccgtggagagatgtgcttttttgattctgaggatcctgcaaattcccttcgtggaggagagcctaacttcctgcctgtgactgaggaggctgacattcgtgaggatgacaacattgcaatcattgatgtgcctgtccccagtttctctgatagtgaccctgcagcaattattcatgactttgaaaagggaatgactgcttacctggacttgttgctggggaactgctatctgatgcccctcaatacttctattgttatgcctccaaaaaatctggtagagctctttggcaaactggcgagtggcagatatctgcctcaaacttatgtggttcgagaagacctagttgctgtggaggaaattcgtgatgttagtaaccttggcatctttatttaccaactttgcaataacagaaagtccttccgccttcgtcgcagagacctcttgctgggtttcaacaaacgtgccattgataaatgctggaagattagacacttccccaacgaatttattgttgagaccaagatctgtcaagagtaagaggcaacagatagagtgtccttggtaataagaagtcagagatttacaatatgactttaacattaaggtttatgggatactcaagatatttactcatgcatttactctattgcttatgctttaaaaaaaggaaaaaaaaaaactactaaccactgcaagctcttgtcaaattttagtttaattggcattgcttgttttttgaaactgaaattacatgagtttcattttttctttgaatttatagggtttagatttctgaaagcagcatgaatatatcacctaacatcctgacaataaattccatccgttgttttttttgtttgtttgttttttcttttcctttaagtaagctctttattcatcttatggtggagcaattttaaaatttgaaatattttaaattgtttttgaactttttgtgtaaaatatatcagatctcaacattgttggtttcttttgtttttcattttgtacaactttcttgaatttagaaattacatctttgcagttctgttaggtgctctgtaattaacctgacttatatgtgaacaattttcatgagacagtcatttttaactaatgcagtgattctttctcactactatctgtattgtggaatgcacaaaattgtgtaggtgctgaatgctgtaaggagtttaggttgtatgaattctacaaccctataataaattttactctatacaaaaaaaaaaaaaaaaaaa

SEQ ID NO: 1227 - DNA, 954 bp, Homo sapiens
agacgttcttcgccgagagtggtcggggtttcctgcttcaacagtgcttggacggaacccggcgctcgtcctgcaccccggccggccgcccatagccagccctccgtcacctcttcaccatgccctcggactgccccaaggcccccgccgcagctccagcgccgcgtagccaccactgccgctgccgccgcctctccttagtcgccggcatgacgaccgcgtctacctcgcaggtgcgccagaactaccaccaagactcagaggccgccatcaaccgccagatcaacctggagctctacgcctcctccatttacctgtgcgtggcttactactttgacagcgatgatgtggctttgaagaactttgccaaatactttcttcaccaatctcatgaggagagggaacatgctgagaaattgatgaagctgtagaaccaacgaggtggccgaatcttccttcaggatatcaagaaaccagactgtgcggggagaatgcgatgggagagcgggctgaatgcgatggattacatttggaaaaaattgtgcattttgcattacatttggaaaaaaatgtgaatcagtcactactggaactgcacaaactggccactgacaaaaatgacccccatttgtgtgacttcattgagacacattacctgaatgaacaagtgaaggccatcaaagaattgggtgaccacgtgaccaacatgcacgagatgggagcgcccgaatctggcgtggcagaatacctctttgacaagcacaccctgggagacagtgataatgaaagctaagcctcaggctaatttccccatagccatagggtgacttaccttgtcaccaaggcagcgcatgtatgttggggtttcctttaccttttctataagttgttccaagacacccacttaagttctttgatttgtaccattccttcaaataaataaatttggtaccc

SEQ ID NO: 1228 - DNA, 1871 bp, Homo sapiens
cgggcctgggcggatgtctccggcgcgtcggtgcagggggatgagggccgcggtggctgccagcgtggggttgagcgaggggcctgctggctcccggagcggtcgcctcttccgcccgccgagtcccgctccggcggcccccggcgcccggctgttgcggctcccggggagcggggccgtgcaggccgcgagcccggagcgcgccggctggaccgaggcgctgcgggccgccgtggccgagctgcgcgccggcgccgtggtggccgtccccaccgatacgctgtacggcctggcctgcgcggcgagctgctcggcggctctgcgcgctgtgtaccgcctcaagggtcgcagcgaggccaagcctctggccgtatgcctcggccgcgtggccgacgtctacagatactgccgtgtgagagtacctgaggggctcctgaaagacctactgccaggaccagtgaccctggtgatggaacgctcggaggagctcaacaaggacctaaacccttttacgcctcttgtaggcattcggattcctgatcatgcttttatgcaagacttggctcagatgtttgagggtccgcttgctctcactagtgccaacctcagctcccaggccagttctctgaatgtcgaggagttccaggatctctggcctcagttgtccttggttattgatgggggacaaattggggatggccagagccccgagtgtcgccttggctcaactgtggttgatttgtctgtgcccggaaagtttggcatcattcgtccaggctgtgccctggaaagtactacagccatcctccaacagaagtacggactgctcccctcacatgcgtcctacctgtgaaactctgggaagcaggaaggcccaagacctggtgctggatactatgtgtctgtccactgacgactgtcaaggcctcatttgcagaggccaccggagctagggcactagcctgacttttaaggcagtgtgtctttctgagcactgtagaccaagcccttggagctgctggtttagccttgcacctggggaaaggatgtatttatttgtattttcatatatcagccaaaagctgaatggaaaagttaagaacattcctaggtggccttattctaataagtttcttctgtctgttttgtttttcaattgaaaagtaattaaataacagatttagaatctagtgagagcctcctctctggtgggtggtggcatttaaggttcaaaccagccagaagtgctggtgctgtttaaaaagtctcaggtggctgcgtgtggtggctcatgcctgtaatcccaacattctgggaggcccaggcgggagaactgcttgagcccaggagttcagaatcagcctgggcaacatagcaatactccgtctcataaaaattaataaataaaaagtctcaggtgaccaaaggctcctgaagctagaaccaggtttggataaagattgaagagccacaggccactcttccctctgagccattgggcctagtggtgtcatgtattgtaattgctcgcagggagagcagtctttttggtgtaatagtgggatgtctgcttagttggcaggggttcagtccaaatggaagaatattgggaaataaacctccactatcctttatagccagggacttttttcttatttattcataaaataaattatagttaattatacccataacacctttatttaaatccagtgttctccgcagccttttgtctatttatatgtgtaccaagtgttaaacataattattattgggcatttgaactttgtttttctttaaagaaatgctgctattaaacatatttgtaaatggtttaaaaaaaaaaaaaaaaaaaaaaaaaaaaaaaaaaa

SEQ ID NO: 1229 - DNA, 4233 bp, Homo sapiens
agacgtcgggtcggcgggtggatgaacgcggccctctgtaatggcggagcgtggcggggacgggggcgagagtgaacgattcaacccgggggagctcaggatggcccaacagcaggccttgaggttccgaggtccggctcccccaccaaatgcagtgatgcgaggcccaccacctctgatgcgacctcctccaccttttggtatgatgcgaggccctcctccaccaccacggccgccctttggacgtcctccttttgatcctaatatgccgccaatgcctcctccaggagggatacctccacctatgggccctccacacctccagagaccacctttcatgcctcctcccatgagttccatgcctcctcctccgggtatgatgtttccaccaggaatgcctcctgtgactgctcctggtactccagcactacctcctacggaggagatatgggttgaaaataaaactccagatgggaaggtttattattataatgctcggacacgtgaatctgcatggaccaagccagatggagttaaggttattcagcaatcagaactgacacctatgcttgcagcccaggcacaggttcaggctcaggcccaggcgcaggctcaggcccaggcgcaggctcaggcccaggcacaagctcaggcccaggctcaggctcaggcccaggcccaggcccaggcccaggcccaggcccaagcccaagcccaggcccaggctcaggctcaggcacaagctcaggcccaggcccaggctcaggtccaggcccaggtccaggcacaagtgcaagcacaagcagttggagcttccacccctacgaccagtagcccagcacctgcagtatccacttcaacatcatcatccaccccttcctctaccacttctaccacaacaactgctacttcagttgcgcagacagtatcaacacccacaacacaagatcagaccccaagttctgctgtttcagttgccacgcctacagttagtgtttcaactcctgctcctacagccacacctgtgcaaaccgttccccagccgcaccctcagacgttacctcctgctgttcctcattcagtacctcagccaacaacagcaatacctgcttttccaccagtaatggtacctccgtttcgtgttccccttcctggcatgccaattccacttccaggtgtagcaatgatgcaaatagtcagctgcccgtatgtaaagacagtcgctaccaccaagaccggtgtattgccaggaatggcccctcctatcgtacccatgatacatccccaggttgctattgcagcttcacctgctaccttagctggagcaacagcagtttctgaatggactgaatataaaacagcagatgggaagacatattattataataatagaacattagaatcaacctgggaaaaaccccaagaactaaaggaaaaagaaaagttagaagagaagattaaagagccaattaaagaaccctctgaagagcctctgccaatggagacggaggaggaggatcctaaagaagagcctataaaggagataaaggaggagcccaaagaagaggagatgactgaagaagaaaaggctgcccagaaggcaaagccagttgctactgctcctattcctggtactccatggtgtgtcgtttggactggtgatgagcgggtcttcttttataatcccaccactcgtctttctatgtgggaccgacctgatgatctgattggcagggcagatgttgacaaaattattcaggagccccctcataaaaaaggaatggaggaattgaagaaactaaggcacccaactccgacaatgctgtcgatccaaaagtggcaattctctatgagtgcaattaaagaggaacaagaattaatggaagaaattaatgaagatgagcctgttaaagcaaaaaaacggaagagagacgataataaagacattgactcagagaaagaagctgccatggaagctgaaattaaagctgcccgagaaagggccattgtccctctggaggctcgaatgaagcagttcaaggacatgctgctagagagaggggtgtctgctttttcaacgtgggagaaggagttgcacaagatagtttttgatccccggtacttacttctcaatcctaaagagagaaaacaggtgtttgatcagtatgtaaagaccagggcagaggaagaacgcagggaaaagaaaaataaaataatgcaagccaaggaagatttcaaaaaaatgatggaagaagcaaaatttaatccaagagcaacttttagtgaatttgcagccaagcatgctaaagattcaagattcaaagcaattgaaaagatgaaagaccgagaagccttgtttaatgagtttgtggccgctgctaggaagaaagagaaagaagattcgaagaccagaggtgagaagattaaatcggatttctttgaactattatctaatcatcacttggacagtcagtctcgatggagcaaagtaaaagacaaagtagaaagtgatccacgttacaaagcagtagatagttcatcaatgagagaagaccttttcaaacagtacattgaaaaaatagccaagaatttagactcagaaaaagaaaaggagcttgaaaggcaagcccgcattgaggcaagccttcgagaacgagaaagggaggttcaaaaggcccgttcagaacaaacaaaagaaatagatcgagagagagagcagcacaaacgagaagaagctatccagaatttcaaagctcttctgtctgacatggtacgttcttcagatgtgtcatggtctgatactcgtaggaccctccgaaaagatcaccgctgggaatctggatccttattggaaagagaggagaaagagaagctttttaatgaacacattgaagcacttaccaaaaaaaagagagagcactttaggcaacttctggatgaaacttctgcaattaccttaacatccacgtggaaagaagtaaaaaaaatcattaaggaagatcctcgatgtattaagttctcctccagtgacaggaaaaaacaaagagaatttgaagaatatatcagagacaaatatatcacagccaaagctgacttcaggacgcttttgaaagagaccaaatttataacatatagatccaaaaaattaatccaagaatcagatcagcacctgaaagatgtagaaaaaattttacagaatgacaaacggtatctagtactggactgtgtgccagaggagaggcgtaaactgattgtggcatatgttgatgacctggatcgccggggtccacccccacctcccacagcatcggagcccacgagacgatcaacaaaataattctaaatactcttccataggggcatctattcaaaatgcttgcatgagccaattttcaggtttttacatatatgtgcattagtcaacctattgcgaaaccatctgacaaacagaaggagaagcatttgtgaacagtttctgaacagaacactttggaaatatttatgcttttctttgtgtggcatgactgacatacatactcaaatataggctgtctctagtaaatcttaaaatcttgaagctaaaattcatccttttatgaggtgtggaagtcagtgacttggtgacgttcttcctagcagtgttaatacatgcaagaagtaagagcatttgtggcttgaacttgccagatgcaaataccacagactccaagaaaacccgagttggggtttgttttgttttgattttttttttttaaagcgggtaaaagagaaaacactgaaaattgaattcttatcttccagaggctacaattattataatggacaatacttttacctttgtctctaaagatcagattagttttatttgttcacttacgtgctttgattatcccctctgaattatagaccgagtcttgttgtttagcctaagagaagatttatgtagtaatttcttctcaggtatggaaccacggtcataactaacatgttggccagaatagaaccactggttaaacatattttattcaccattaagtgatctttatcaatattctggattagacaacaaattacctttctgggtgtttcttgtaaactatactcctgtttgaatgttaaactttgttgctaaagtttaattttaagatgtttgaatgttcagtttatgtatttgaactacaataaaccaaccctttttataaaaaaaaaaaaaaaaaaaaaaaaaaaaaaaaa

SEQ ID NO: 1230 - DNA, 3511 bp, Homo sapiens
ggggatttggggctgggtcggccggggtcggggaggggggtggtgaaaaggtgacagggagctgcccccgctcaagagccggtggttgggggtctgagaagaagtcaccaatatgaagttattcggcttcgggagccgcaggggccagacggcccagggctccatagaccacgtctacacgggttccggataccgaatccgggactccgaactgcagaagatccacagggcagctgtcaaaggcgacgccgcggaggtggagcgctgcctggcgcgcaggagcggagacctggacgccctggacaagcagcacagaactgctctacacttggcctgtaccagtggccatgtgcaagtggtcactctcctggttaacagaaaatgccagattgatgtctgtgacaaagaaaacagaacgcctttgatacaggctgtccattgccaggaagaggcttgtgccgttattctgctggaacatggcgccaatccaaaccttaaggatatctacggcaacactgctctccattatgccgtgtatagtgagagcacctcactggcagaaaaactgctttcccatggtgcacatattgaagcactggacaaggacaataataccccacttttatttgctataatttgcaagaaagagaaaatggtggaatttttattgaaaaagaaagcaagttcacatgccgttgataggctgagacggtcagctctcatgcttgctgtatactatgactcaccaggtattgtcaatatccttcttaagcaaaatattgatgtcttcgctcaagacatgtgtggacgagatgcagaagattatgctatttctcatcatttgacaaaaattcaacaacaaattttggaacataaaaagaagatacttaaaaaggagaaatcagatgttggaagttctgatgaatctgcagtcagcattttccatgaactgcgtgtggattcattgcctgcatcggatgacaaagacttgaatgttgctactaagcagtgtgtccccgagaaagtgtcagagcctttacctggatcttcgcatgaaaaaggaaacagaatagtcaatggacaaggagaagggcctcctgcaaaacatccttccttgaagcctagcactgaagtggaagatcctgctgtgaaaggagcagtacaaagaaagaatgtacagacattgagagcagaacaagccttaccagtggcttcagaggaagagcaagaaaggcatgaaagaagtgaaaagaagcaaccacaggtcaaagaaggaaataatacaaacaaaagtgaaaaaatacaactttcagaaaatatatgtgatagtacatcttctgctgctgctggcagattaacccaacaaagaaagattgggaaaacgtatcctcagcaatttcccaagaagctgaaggaagagcatgatagatgcaccttaaaacaagaaaatgaagaaaaaacaaatgttaatatgctgtacaaaaaaaatagagaagaattagaaaggaaagagaaacaatataagaaagaagttgaagcaaaacaacttgaaccaactgttcagtcactagagatgaaatcaaagactgcaagaaatactccaaattgggattttcataatcatgaagaaatgaaaggtctgatggatgaaaattgcattttgaaggcagatattgctatactcagacaggaaatatgtacaatgaaaaatgacaacttggaaaaagaaaataaatatcttaaggacattaaaattgttaaagaaacaaatgctgcccttgaaaagtatataaaactcaatgaggaaatgataacagaaacagcattccggtatcaacaagagcttaatgatctcaaggctgagaatacaaggctcaatgccgaactgttgaaggaaaaagaaagcaagaaaagactggaagctgacattgaatcttatcagtctagactggctgctgctataagcaaacacagtgaaagtgtgaaaacagaaagaaacctaaaacttgctttagagagaacacgagatgtttctgtacaagtagaaatgagttctgctatttccaaagtaaaagctgagaatgagtttcttactgaacaactttctgaaacacaaattaaattcaatgccttaaaagataagttccgtaagacaagagatagtctcagaaaaaagtcattggctttagaaactgtacaaaacgacctaagccaaacacagcagcaaacacaggaaatgaaagagatgtatcaaaatgcagaagctaaagtgaataattccactggaaagtggaactgtgtagaagagaggatatgtcacctccaacgtgaaaatgcgtggcttgtacagcaactagatgacgttcatcagaaagaggatcataaagagatagtaactaatatccaaagaggctttattgagagtggaaagaaagacctcgtgctagaagagaaaagtaagaagctaatgaatgaatgtgatcatttaaaagaaagtctctttcagtatgagagagagaaaacagaaggagtagtaagtatcaaggaagataaatattttcaaacttctagaaagacaatttaaacatttggttctggatacatgttgaacttagttgaatataaaaatctagattaaaagtgtgtttaccatactgtataattccatttacatgaagcatccagaaaagataaatgtatagggacaaaaagtagattcatgtttgcaaggggctggggctggaagctggtagtgactgctaatgggcatgaggaatcttacagtgatggaaatgctctaaagttggattgtagagatggctgcacaactcagtaaatgtactaaaaatcttttaacttaaaacagatacattctatagtatgtaaattatatttcaacaaagctgttttaataaaaaaaggaaaaatgtgtttactatatcggcttagaaacatgcctcatttctaggaaataaaagatagaggtgagagatgatttactttgagaaaagacattgtgtcacctatgaaattttattaggcacagagtcatattttaaggtagatagttctgtattgctgaaatagtaattttaatgtctttatgttgccacatgttaagaccataatgtagttataaatggaaatgtttacacctgaagtgagtattttcaaattaaaatttaattaagtgattttcttcgacacttaattctagattccccagatgaattgaagtgtattgctgtgtcttgtaataccttgctttaactagctttttatgtattttagttggtatagctttgttattattcatattaacaaatctgaaaatatgtcaaattacgtgtttttatgaccatgtaatgttttaaaggcacctacttgttataaaatcataatttaggataaatgtggtaaaacttagcaaaactatatttggtttagttttcccactggtatttatagtttactttgaatatttatattaataattagctcataattttta

SEQ ID NO: 1231 - DNA, 1415 bp, Homo sapiens
gaggagagcaggccaaggggctatataacccttcagctttcagcttccctgaacaccacccagtgtggagcagcccagccaagcactgtcaggaatcctgtgaagcagctccagctatgtgtgaagaagaggacagcactgccttggtgtgtgacaatggctctgggctctgtaaggccggctttgctggggacgatgctcccagggctgttttcccatccattgtgggacgtcccagacatcagggggtgatggtgggaatgggacaaaaagacagctacgtgggtgacgaagcacagagcaaaagaggaatcctgaccctgaagtacccgatagaacatggcatcatcaccaactgggacgacatggaaaagatctggcaccactctttctacaatgagcttcgtgttgcccctgaagagcatcccaccctgctcacggaggcacccctgaaccccaaggccaaccgggagaaaatgactcaaattatgtttgagactttcaatgtcccagccatgtatgtggctatccaggcggtgctgtctctctatgcctctggacgcacaactggcatcgtgctggactctggagatggtgtcacccacaatgtccccatctatgagggctatgccttgccccatgccatcatgcgtctggatctggctggccgagatctcactgactacctcatgaagatcctgactgagcgtggctattccttcgttactactgctgagcgtgagattgtccgggacatcaaggagaaactgtgttatgtagctctggactttgaaaatgagatggccactgccgcatcctcatcctcccttgagaagagttacgagttgcctgatgggcaagtgatcaccatcggaaatgaacgtttccgctgcccagagaccctgttccagccatccttcatcgggatggagtctgctggcatccatgaaaccacctacaacagcatcatgaagtgtgatattgacatcaggaaggacctctatgctaacaatgtcctatcagggggcaccactatgtaccctggcattgccgaccgaatgcagaaggagatcacggccctagcacccagcaccatgaagatcaagatcattgcccctccggagcgcaaatactctgtctggatcggtggctccatcctggcctctctgtccaccttccagcagatgtggatcagcaaacaggaatacgatgaagccgggccttccattgtccaccgcaaatgcttctaaaacactttcctgctcctctctgtctctagcacacaactgtgaatgtcctgtggaattatgccttcagttcttttccaaatcattcctagccaaagctctgactcgttacctatgtgttttttaataaatctgaaataggctactggtaaaaaaaaaaaaaaaaaa

SEQ ID NO: 1232 - DNA, 2014 bp, Homo sapiens
agcggagagcgggcggccgtgcgggcggcggcggcggcacccccaggccgagccggcgcggaaggagttccagggcgatggggccgcggccggggctgacgctttgacagctggaaagagcgcggagccagcgcctgggggggagggaggggagcgcggcgaggagagcgccagcgagcgagagagcgagcgagcgccggggagggggccgggagcgaggggcagctcgggagagccggagcggtagcggcggcggcggcggcggcggcgaggctcggcgccctcttccctgcaaaccatgtttgccaaaggcaaaggctcggcggtgccctcggatgggcaggctcgggaaaagttagctttatacgtctacgaatatttactgcacgtaggagcacagaaatctgcacagaccttcttatcggagattcgatgggaaaaaaacatcacgttgggagaaccgcctgggtttttgcactcgtggtggtgtgtattttgggacctttactgtgcagctcctgaaaggagagacacttgtgaacattcaagtgaagcaaaagcctttcatgattatagtgcagcagctgccccgagccccgtgcttggcaacattccccccaacgatgggatgccgggaggccccatcccgccaggtttctttcagggtcctccggggtcacagccctcgccgcacgcacagcctccacctcacaatcctagcagcatgatgggaccccacagtcagcctccgggaggagttcctgggacacagccattgctgcccaattctatggatcccacacgacaacaaggccaccccaacatgggaggatcaatgcagagaatgaaccctccccgaggcatggggcccatgggtcccggcccacagaattacggcagcggcatgagaccaccacccaactccctcggccccgccatgcccgggattaacatgggcccgggagctggcagaccctggcccaatcctaacagtgctaactcaattccatactcctcctcatcacctggtacctatgtgggaccccctggtggtggcggtcctccaggaacacccattatgcccagtcccgcagattcaacaaattccagtgacaacatctacacaatgattaatccagtgccgcctggaggcagccggtccaacttcccgatgggtcccggctcggacggtccgatgggcggcatgggtggcatggagccacaccacatgaatggatcattagggtcaggcgacatagacggacttccaaaaaattctcctaacaacataagtggcattagcaatcctccaggcacccctcgagatgacggcgagctaggagggaacttcctccactcctttcagaacgacaattattctccaagcatgacgatgagtgtgtgatccccccttctccgagacgctgagagagcaggcattgcaggcgggaagatgccagaaattatgcaagaagtgaggtgtcattatccaggagctggtggggagggcatctccctgctcccctcaaccccctcccaccccatccacgccccctacctttcccaattttagtttcatgcaataaaaaggccaaactttttattccataaaacaagaaggacaaaactctcaaaaatgtatttcaagtcagtgaccagaaaaatcccaccccttgccctttccccaaaggaccttttctgtacatgacacttttttgttgttttttgtttggggttttaccattgttgggatttttttatttgttttcaggggggttttttgggggaaaatttttttaaatggaagcttctagcaagccccccaccccaatcaacctctatgctttcttcttaaaaaaaaaaaaaaaggaaaaaggaaaaaaaaaaaaggaaaaccagaagccctgctgtctgtctgtgcccaagcccttccaccagaaaagctagtctaggtgtgagagcccacattgtctgtagccatcaaaaataataataataaactggacagtttaca

SEQ ID NO: 1233 - DNA, 1948 bp, Homo sapiens
ggcttagccgccaccgcgcgcttcggaaggccagagggagggggaggcctgtcagtctcgcgcgttgcctgggcgaagggggcggagctttggcgtggggcggccaatagtgggggtggctgcgtgggtcgccatggggacggggctgttcccggggaggctgtgatgggttgacaggtgcgtgacagtgggagctgctctcggcacaagcatgtacggcaaaggcaagagtaacagcagcgccgtcccgtccgacagccaggcccgggagaagttagcactctacgtatatgaatatctgctccatgtaggagctcagaaatcagctcaaacatttttatcagagataagatgggaaaaaaacatcacattgggggaaccaccaggattcttacattcttggtggtgtgtattttgggatctctactgtgcagctccagagagacgtgaaacatgtgaacactcaagtgaagcaaaagccttccatgattacagtgctgcagcagctcccagtccagtgctaggaaacattcccccaggagatggcatgccagtaggtcctgtaccaccagggttctttcagccttttatgtcacctcggtaccctggaggtccaaggcccccattgaggatacctaatcaggcacttggaggtgtcccaggaagtcagccattactccccagtggaatggatccaactcgacaacaaggacatccaaatatgggtgggccaatgcagagaatgactcctccaagaggaatggtgcccttaggaccacagaactatggaggtgcaatgagacccccactgaatgctttaggtggccctggaatgcctggaatgaacatgggtccaggtggtggtagaccttggccaaacccaacaaatgccaattcaataccatactcctcagcatctcctgggaattatgtaggtcctccaggaggtggagggccaccaggaacacccatcatgcctagtccagcagattcaaccaactctggtgataacatgtatactttaatgaatgcagtacctcctggacctaacagacctaattttccaatgggtcctgggtcagatggtcccatgggtggattaggaggaatggagtcacatcacatgaatggctctttaggctcaggagatatggacagtatttccaagaattctcccaataatatgagcctgagtaatcaaccgggcactccaagggatgatggcgaaatggggggaaatttcttaaatccttttcagagtgagagttactcccctagcatgacaatgagcgtgtgatccattaccaagtctcctcatgaaaaccacagtgagtcagcccttcacagaactactacggaagaaaattattcatcacagtgtacagttaaacaaaggaatctcagtcacaccaaaccaacctttttatttcctgctctctcccctcttttgtgaagaaagcgggtccaaatgtgattcaaacaactgtacggagtggcatattagaattgccctaaactgaactgcaaataattatgtgtgtatgtatatgtgtgggaaagagaatgtactgtatatgtgtatgttatacagacatatacacatacatacattgacccacaggacattgtaaaatattatcacatgacatcttaagtagaaataagtagggacttttattccatcctttttttcacgtttacattttaattattacaagttgctcctgccccctccctgaactattttgtgctgtgtatatcactgctttatataagttattttttaaggtgaactcagatgttatggttttgtaaatgtctgcaatcatggataggaataaaatcgcttatttgagagctttcattaaattgcgtctgatgcaagttatcctgtgaatcacaaagtgtactgtctcaaaaaatagaagaaaatgtgtcttcgtcttta

SEQ ID NO: 1234 - DNA, 4216 bp, Homo sapiens
agtttctcttctcggccacctcctgcatagagggtaccattctgcgctgctgcaagttacggaatgaaaaattagaacaacagaaacatggaaaacatgttccttcagtcgtcaatgctgacctgcattttcctgctaatatctggttcctgtgagttatgcgccgaagaaaatttttctagaagctatccttgtgatgagaaaaagcaaaatgactcagttattgcagagtgcagcaatcgtcgactacaggaagttccccaaacggtgggcaaatatgtgacagaactagacctgtctgataatttcatcacacacataacgaatgaatcatttcaagggctgcaaaatctcactaaaataaatctaaaccacaaccccaatgtacagcaccagaacggaaatcccggtatacaatcaaatggcttgaatatcacagacggggcattcctcaacctaaaaaacctaagggagttactgcttgaagacaaccagttaccccaaataccctctggtttgccagagtctttgacagaacttagtctaattcaaaacaatatatacaacataactaaagagggcatttcaagacttataaacttgaaaaatctctatttggcctggaactgctattttaacaaagtttgcgagaaaactaacatagaagatggagtatttgaaacgctgacaaatttggagttgctatcactatctttcaattctctttcacacgtgccacccaaactgccaagctccctacgcaaactttttctgagcaacacccagatcaaatacattagtgaagaagatttcaagggattgataaatttaacattactagatttaagcgggaactgtccgaggtgcttcaatgccccatttccatgcgtgccttgtgatggtggtgcttcaattaatatagatcgttttgcttttcaaaacttgacccaacttcgatacctaaacctctctagcacttccctcaggaagattaatgctgcctggtttaaaaatatgcctcatctgaaggtgctggatcttgaattcaactatttagtgggagaaatagcctctggggcatttttaacgatgctgccccgcttagaaatacttgacttgtcttttaactatataaaggggagttatccacagcatattaatatttccagaaacttctctaaacttttgtctctacgggcattgcatttaagaggttatgtgttccaggaactcagagaagatgatttccagcccctgatgcagcttccaaacttatcgactatcaacttgggtattaattttattaagcaaatcgatttcaaacttttccaaaatttctccaatctggaaattatttacttgtcagaaaacagaatatcaccgttggtaaaagatacccggcagagttatgcaaatagttcctcttttcaacgtcatatccggaaacgacgctcaacagattttgagtttgacccacattcgaacttttatcatttcacccgtcctttaataaagccacaatgtgctgcttatggaaaagccttagatttaagcctcaacagtattttcttcattgggccaaaccaatttgaaaatcttcctgacattgcctgtttaaatctgtctgcaaatagcaatgctcaagtgttaagtggaactgaattttcagccattcctcatgtcaaatatttggatttgacaaacaatagactagactttgataatgctagtgctcttactgaattgtccgacttggaagttctagatctcagctataattcacactatttcagaatagcaggcgtaacacatcatctagaatttattcaaaatttcacaaatctaaaagttttaaacttgagccacaacaacatttatactttaacagataagtataacctggaaagcaagtccctggtagaattagttttcagtggcaatcgccttgacattttgtggaatgatgatgacaacaggtatatctccattttcaaaggtctcaagaatctgacacgtctggatttatcccttaataggctgaagcacatcccaaatgaagcattccttaatttgccagcgagtctcactgaactacatataaatgataatatgttaaagttttttaactggacattactccagcagtttcctcgtctcgagttgcttgacttacgtggaaacaaactactctttttaactgatagcctatctgactttacatcttcccttcggacactgctgctgagtcataacaggatttcccacctaccctctggctttctttctgaagtcagtagtctgaagcacctcgatttaagttccaatctgctaaaaacaatcaacaaatccgcacttgaaactaagaccaccaccaaattatctatgttggaactacacggaaacccctttgaatgcacctgtgacattggagatttccgaagatggatggatgaacatctgaatgtcaaaattcccagactggtagatgtcatttgtgccagtcctggggatcaaagagggaagagtattgtgagtctggagctaacaacttgtgtttcagatgtcactgcagtgatattatttttcttcacgttctttatcaccaccatggttatgttggctgccctggctcaccatttgttttactgggatgtttggtttatatataatgtgtgtttagctaaggtaaaaggctacaggtctctttccacatcccaaactttctatgatgcttacatttcttatgacaccaaagatgcctctgttactgactgggtgataaatgagctgcgctaccaccttgaagagagccgagacaaaaacgttctcctttgtctagaggagagggattgggatccgggattggccatcatcgacaacctcatgcagagcatcaaccaaagcaagaaaacagtatttgttttaaccaaaaaatatgcaaaaagctggaactttaaaacagctttttacttggctttgcagaggctaatggatgagaacatggatgtgattatatttatcctgctggagccagtgttacagcattctcagtatttgaggctacggcagcggatctgtaagagctccatcctccagtggcctgacaacccgaaggcagaaggcttgttttggcaaactctgagaaatgtggtcttgactgaaaatgattcacggtataacaatatgtatgtcgattccattaagcaatactaactgacgttaagtcatgatttcgcgccataataaagatgcaaaggaatgacatttctgtattagttatctattgctatgtaacaaattatcccaaaacttagtggtttaaaacaacacatttgctggcccacagtttttgagggtcaggagtccaggcccagcataactgggtcctctgctcagggtgtctcagaggctgcaatgtaggtgttcaccagagacataggcatcactggggtcacactcatgtggttgttttctggattcaattcctcctgggctattggccaaaggctatactcatgtaagccatgcgagcctctcccacaaggcagcttgcttcatcagagctagcaaaaaagagaggttgctagcaagatgaagtcacaatcttttgtaatcgaatcaaaaaagtgatatctcatcactttggccatattctatttgttagaagtaaaccacaggtcccaccagctccatgggagtgaccacctcagtccagggaaaacagctgaagaccaagatggtgagctctgattgcttcagttggtcatcaactattttcccttgactgctgtcctgggatggcctgctatcttgatgatagattgtgaatatcaggaggcagggatcactgtggaccatcttagcagttgacctaacacatcttcttttcaatatctaagaacttttgccactgtgactaatggtcctaatattaagctgttgtttatatttatcatatatctatggctacatggttatattatgctgtggttgcgttcggttttatttacagttgcttttacaaatatttgctgtaacatttgacttctaaggtttagatgccatttaagaactgagatggatagcttttaaagcatcttttacttcttaccattttttaaaagtatgcagctaaattcgaagcttttggtctatattgttaattgccattgctgtaaatcttaaaatgaatgaataaaaatgtttcattttacaa

SEQ ID NO: 1235 - DNA, 1049 bp, Homo sapiens
aaaacaacaggaagcagcttacaaactcggtgaacaactgagggaaccaaaccagagacgcgctgaacagagagaatcaggctcaaagcaagtggaagtgggcagagattccaccaggactggtgcaaggcgcagagccagccagatttgagaagaaggcaaaaagatgctggggagcagagctgtaatgctgctgttgctgctgccctggacagctcagggcagagctgtgcctgggggcagcagccctgcctggactcagtgccagcagctttcacagaagctctgcacactggcctggagtgcacatccactagtgggacacatggatctaagagaagagggagatgaagagactacaaatgatgttccccatatccagtgtggagatggctgtgacccccaaggactcagggacaacagtcagttctgcttgcaaaggatccaccagggtctgattttttatgagaagctgctaggatcggatattttcacaggggagccttctctgctccctgatagccctgtgggccagcttcatgcctccctactgggcctcagccaactcctgcagcctgagggtcaccactgggagactcagcagattccaagcctcagtcccagccagccatggcagcgtctccttctccgcttcaaaatccttcgcagcctccaggcctttgtggctgtagccgcccgggtctttgcccatggagcagcaaccctgagtccctaaaggcagcagctcaaggatggcactcagatctccatggcccagcaaggccaagataaatctaccaccccaggcacctgtgagccaacaggttaattagtccattaattttagtgggacctgcatatgttgaaaattaccaatactgactgacatgtgatgctgacctatgataaggttgagtatttattagatgggaagggaaatttggggattatttatcctcctggggacagtttggggaggattatttattgtatttatattgaattatgtacttttttcaataaagtcttatttttgtggctaaaaaaaa

SEQ ID NO: 1236 - DNA, 3990 bp, Homo sapiens
cttgcccggcgcgacctgatgatgccgagcccaggccggttccggcgaagttaaaccctcggagctggcctcggactgctggggcgttaccccttcggccacccccgctgaccatggcagtgtttcatgacgaggtggaaatcgaggacttccaatatgacgaggactcggagacgtatttctatccctgcccatgtggagataacttctccatcaccaaggatcagtttgtgtgtggagaaacagtcccagccccttcagccaacaaagaattagttaaatgctgaagaagccttcaggaatccaaatcctgaacatttggaatgagcccagatagaaatatcgaatgcaaagctactggcttcacagagacaaccatttatgatttgctgttctgtaagagtgtggattctttctatcaactgctgatatcatcttcaggaagcaagtccataacatgacatatctggattttgtgcttagaaccttaaattggaagcattcttaattatgcatctaaatttaaaagaagataatttcaaaacagtgctttctttcccttggtttcatcattttcatatcttaaaccaaattacttcggtatctgacaacagcatcatctacctcagtcattaggatttcttaataaaaaagagattgtatttttgacttggttattaagattattaaaattagcccttcctttgaaatatgacatcagctttgctgttctaaatttaaaattagttgcttcatcagtaccacacttccagtttctataccaagccagtctcctcagttttcccattagaatggacatgttctgttcagcgtgtcatttctgtaatgcttcatgcagagagtttggtcatagtattaaagagaaaatacagtgaggtcacaatgtctccagagctaaaagttagtgaacaagaaagaaagtccaaaatgaagtgatgaaagaatgaggacttttcttatattctgcatattccttggaagtcaggacaagatgaaaagaaaaacatccaaaagaagtgaaattggtgacagaatgagaggagcaaagcataccagtgtagtaagtggaatgtttgaatgactttgccaggtcagagcaagtaatatttctgtatctgagtttttgtttgtgttttgataaggctaatgaaattgcattccaggtaggggttaacgtcaaatttccatggctggtagctgtgcttttggcatatcacagtgttgtgtcactactacaaggtaaagcatctacagcggagaatgagcttgaaaatgagagacctattgtgaataaatatgcccatgagagcatatttaataagcctctataacatgcagccaaaccagacattcactcctgcagagaaatgttgccctggagaaaaagaaatatataaagataggctatcacccttcttttgctgcagtactaagcatagcaagaaattagaatcatttacattggaaatttgaaaattccctttatatacacaactttactgtgtataaataaaaaatatttattaatgcagtgatgtccgtcaggttgttttaggaatggcttctgcaattagaaaaatagcttgctagaatgtaaatgttctgttactggtaaatgtactgcacacattcattggacgttaaaacaagtgagtagccttttttacctgccagcagcatggctgtgtgcagccactaggctgagacaataaattaccaaaaattataatgtaccgagctgaaaatgctcagtacattatgtggcatattctggatgtgatgagaaatctcattgccatttgggacactgacatcccagaagtaatccacaactgctttgcaaaagcaaagtgactgctcagatgaacagagcagagtactcactcactatggtggcatcagctgcaaagcaaaatgaactgtcccatgatcatgttgatggttttctagatactgccaacatgttagctctttctgatgctgatgagtttcaaacacgaacagacacccttgatgtgggtttgctaagaacatagaagaacaggaagaaaagttgccaggttcacacatcccaggaaaaaagaagcataaaaagcattagcagtcagtgactgatgataatgctgcaataatgggaatggttttgtttctaaaccaaattatttctaaatcaaatcatttattgctttgtttctaaagcaattgagtcactaagtttgtgaactgtaggagaacacatcaagattgaatcctgtgttaagcagaaggtaaaaccagagccaggcgcagtggctcgtgcctgtaatcccagctactcaggaagctaaggcaggaggatcatgtgaggccaggagttcaagactagcctgggcaacatagaaagaccctgtctctaaaaaatcttcttttaattagcaaggtgtggggccttgagcaaattgcttgggcccaggagtttgaggctgtggtgagctgtgatcacaccactgcgttccagcctgtgtgacagggcaagacctcatgcctaaaaaataaagagaaagcagagtaaaactggactctgagatacgactaaagttctgtgtgatacgtgtgccttatttagctcaagacattcctggagcacctataaaaactgacttgtaatccaggctatgtctctttttagcttcgtaatctttggcaaggccattggattcttcagctgtacaattaggagactcgatcaggtgattgcctttctcagctgtcagttctctaatttcaggcttggtagcttgtaggaactgaaattgcaattaaaacctttataaactcaaactaaatcatgaattacagaaaaagtccattcttccaaaacttgatgttaccacacttacaagtttaaaatatgaagtcgactgtttaaaggattctgcatatattctagtgtgcacattcagaaacatttttcttggaaaaagtacccaacattttttataactgcacatattaatttattgccagaataaattgcattgcatgctaaataaagtcagataattcaaatccatttgcttttatgtagtttttcttctaaatgtcaacattttgaattaaaatgtttatgattttatatgaggtagaaatcttaactgctttggggtattgttaatagactttttgttatggacagtagtttttaaataaggaaattgccaatttctacagtttgggctctggatttctattgtttgggaaaaaaataactgagtcaagtggtagtaagacaaagttgacattcttagatgagtaactcagtttattacaaggaaagaaaactgattgtttaaggctgatgatcaattcttggagtggtttcagagcccagctctggtcagaagacaatttgaatcttagttcctccactgtgatctccgagaagttacttaataattatattctggtttgtgaaatctggatcatagtacctctttgacagggttgctgtgtgaacccattcattctgcaattagaaaaatagctgtcatgtgctatgcactaggcaaagaagtacctgtcacatgctaggcactaggggaagaagattcggtttctacatttggaaacttagtggaactagaagagacagaagcaagattacagatgagttagagcccccaaggaaacaaaccaggtgatgtgggagagagtaactgggtcaggtgactttttaagggagtctgagctctggcactttttctaagacctgaaggatgagaaggaaacagccttgtgaaaatgattaaatgagctagtatctataaaacatgacagctaatgcctgtcatgtgcaaaaaatggttaactattctaactccgaaaggaattaaacattgttttgcgctttctcctagtccatgttctgctgctgtaacaatacctgagactggataatttatcaagaataaaggttaatttggctcatga

SEQ ID NO: 1237 - DNA, 3338 bp, Homo sapiens
gacatcatgggctatttttaggggttgactggtagcagataagtgttgagctcgggctggataagggctcagagttgcactgagtgtggctgaagcagcgaggcgggagtggaggtgcgcggagtcaggcagacagacagacacagccagccagccaggtcggcagtatagtccgaactgcaaatcttattttcttttcaccttctctctaactgcccagagctagcgcctgtggctcccgggctggtgtttcgggagtgtccagagagcctggtctccagccgcccccgggaggagagccctgctgcccaggcgctgttgacagcggcggaaagcagcggtacccacgcgcccgccgggggaagtcggcgagcggctgcagcagcaaagaactttcccggctgggaggaccggagacaagtggcagagtcccggagcgaacttttgcaagcctttcctgcgtcttaggcttctccacggcggtaaagaccagaaggcggcggagagccacgcaagagaagaaggacgtgcgctcagcttcgctcgcaccggttgttgaacttgggcgagcgcgagccgcggctgccgggcgccccctccccctagcagcggaggaggggacaagtcgtcggagtccgggcggccaagacccgccgccggccggccactgcagggtccgcactgatccgctccgcggggagagccgctgctctgggaagtgagttcgcctgcggactccgaggaaccgctgcgcccgaagagcgctcagtgagtgaccgcgacttttcaaagccgggtagcgcgcgcgagtcgacaagtaagagtgcgggaggcatcttaattaaccctgcgctccctggagcgagctggtgaggagggcgcagcggggacgacagccagcgggtgcgtgcgctcttagagaaactttccctgtcaaaggctccggggggcgcgggtgtcccccgcttgccagagccctgttgcggccccgaaacttgtgcgcgcagcccaaactaacctcacgtgaagtgacggactgttctatgactgcaaagatggaaacgaccttctatgacgatgccctcaacgcctcgttcctcccgtccgagagcggaccttatggctacagtaaccccaagatcctgaaacagagcatgaccctgaacctggccgacccagtggggagcctgaagccgcacctccgcgccaagaactcggacctcctcacctcgcccgacgtggggctgctcaagctggcgtcgcccgagctggagcgcctgataatccagtccagcaacgggcacatcaccaccacgccgacccccacccagttcctgtgccccaagaacgtgacagatgagcaggagggcttcgccgagggcttcgtgcgcgccctggccgaactgcacagccagaacacgctgcccagcgtcacgtcggcggcgcagccggtcaacggggcaggcatggtggctcccgcggtagcctcggtggcagggggcagcggcagcggcggcttcagcgccagcctgcacagcgagccgccggtctacgcaaacctcagcaacttcaacccaggcgcgctgagcagcggcggcggggcgccctcctacggcgcggccggcctggcctttcccgcgcaaccccagcagcagcagcagccgccgcaccacctgccccagcagatgcccgtgcagcacccgcggctgcaggccctgaaggaggagcctcagacagtgcccgagatgcccggcgagacaccgcccctgtcccccatcgacatggagtcccaggagcggatcaaggcggagaggaagcgcatgaggaaccgcatcgctgcctccaagtgccgaaaaaggaagctggagagaatcgcccggctggaggaaaaagtgaaaaccttgaaagctcagaactcggagctggcgtccacggccaacatgctcagggaacaggtggcacagcttaaacagaaagtcatgaaccacgttaacagtgggtgccaactcatgctaacgcagcagttgcaaacattttgaagagagaccgtcgggggctgaggggcaacgaagaaaaaaaataacacagagagacagacttgagaacttgacaagttgcgacggagagaaaaaagaagtgtccgagaactaaagccaagggtatccaagttggactgggttgcgtcctgacggcgcccccagtgtgcacgagtgggaaggacttggcgcgccctcccttggcgtggagccagggagcggccgcctgcgggctgccccgctttgcggacgggctgtccccgcgcgaacggaacgttggacttttcgttaacattgaccaagaactgcatggacctaacattcgatctcattcagtattaaaggggggagggggagggggttacaaactgcaatagagactgtagattgcttctgtagtactccttaagaacacaaagcggggggagggttggggaggggcggcaggagggaggtttgtgagagcgaggctgagcctacagatgaactctttctggcctgccttcgttaactgtgtatgtacatatatatattttttaatttgatgaaagctgattactgtcaataaacagcttcatgcctttgtaagttatttcttgtttgtttgtttgggtatcctgcccagtgttgtttgtaaataagagatttggagcactctgagtttaccatttgtaataaagtatataatttttttatgttttgtttctgaaaattccagaaaggatatttaagaaaatacaataaactattggaaagtactcccctaacctcttttctgcatcatctgtagatactagctatctaggtggagttgaaagagttaagaatgtcgattaaaatcactctcagtgcttcttactattaagcagtaaaaactgttctctattagactttagaaataaatgtacctgatgtacctgatgctatggtcaggttatactcctcctcccccagctatctatatggaattgcttaccaaaggatagtgcgatgtttcaggaggctggaggaaggggggttgcagtggagagggacagcccactgagaagtcaaacatttcaaagtttggattgtatcaagtggcatgtgctgtgaccatttataatgttagtagaaattttacaataggtgcttattctcaaagcaggaattggtggcagattttacaaaagatgtatccttccaatttggaatcttctctttgacaattcctagataaaaagatggcctttgcttatgaatatttataacagcattcttgtcacaataaatgtattcaaataccaaaaaaaaaaaaaaaaa

SEQ ID NO: 1238 - DNA, 2823 bp, Homo sapiens
acgcggacgcggctggcggctcggtttctgcaaatgcgtgaatgagccggatgccagcctctgtcccctggagcccagcgtgaggaagaggcatgccccatcagccttcagcttgagcccggcggcccccgcccccgccccctgccaccctgcactgccccggctcccccgcggcccccacgctgcagtgcggccgggccccctccccgcaggggccgcccccgccgcccacccctagcgcccgtggtggtggtggtggtggtggtggtggtggcccgggccgcagggccatgaaactacaggccgtgatggagacgctgttgcagcggcagcagcgggcgcgccaggagctggaggcccggcagcagctgccccccgatccccctgctgcaccccccggccgggcccgggctgcccccgacgaggacagagagcccgagagtgcccggatgcagcgggctcagatggccgcactggcagccatgcgggctgcagctgcgggcctgggacacccagccagccccggcggctctgaggatgggcccccaggctcggaggaggaggacgcggcccgggaggggacaccgggctcacccgggcgaggcagagaagggccaggagaggagcactttgaggacatggcctccgacgaggacatgaagcccaaatgggaggaggaggagatggaggaagacctcggggaggatgaggaggaggaggaggaggattacgaggatgaggaggaggaggaggacgaggaggggctgggccccccaggccctgccagcttgggcaccacggcactgttcccccgaaaggcccagccaccccaggccttccgcggcgatggcgttcccagggtgctggggggccaggagcggccggggcctggccctgcccaccccggaggggccgcccacgtagccccgcagctgcagccgcctgaccacggcgactggacttacgaggagcagtttaagcagctctacgaactcgacggggaccccaagaggaaggaattcctggatgacttgttcagcttcatgcagaagcgagggacacctgtgaaccgcatccccatcatggccaaacaggtccttgacctgttcatgctgtacgtgctggtgacggagaagggcggcctcgtggaggtcatcaacaagaagctgtggcgtgagatcaccaagggcctcaacctgcccacgtccatcaccagtgcagccttcaccctgcggacccaatacatgaagtacctgtacccctacgagtgtgagaagcggggcctcagtaaccccaatgagctccaggcagccatagacagcaaccgacgggagggccggcgccagagctttggtggctccctctttgcctactcgccaggcggggcacacggcatgctctcctcacccaagctacccgtgtcctccctgggcctggccgcaagcaccaatggcagctccatcacccccgcccctaagatcaagaaagaggaggactcagccatccccatcacagtccctggccgcctgcctgtgtccctggcgggccaccctgtggtggcagcccaggcagcagctgtgcaagcagcagccgcccaagcagctgtggccgcacaggcagctgccctggaacagctgcgggagaagctggagtctgcagagcctccggagaagaagatggccctggtggccgatgagcagcaacggctgatgcaacgtgcactccagcagaacttcctggccatggcggcccagctgcccatgagcattcggatcaacagccaagcctccgaaagccgccaggactctgctgtgaacctgacgggcaccaacggcagcaacagcatcagcatgtcggtggagatcaacggcatcatgtacacaggagttctgtttgctcagccgccggcccccacgccaacctctgctcccaacaaaggaggcggcggcggcggcggcagcagcagcaacgcaggcggccggggaggaaacaccggaaccagcggcggccaggctgggccagcggggctgtccacaccctccacatctacctcaaataactcgttgccttaaccgcatcactccccacccgccacccaccctggagcccgccggcctgggcagggggtccaggtgggccacacaggggccaggatggcggaagatacgggtggggagggaagatatccagaaaggagccacagctgacgccaaaaagaaaagaaaaaagatatatatatatatatatatatatacacgtatatatataaagagaatttaataaaacaggggaaaaccaaggaacacttgaatttctcaggttttggacattcagagagatgaattgtgagaacagcaaagaaatccatcagaaaaacagaaagaggcagacgtttcccagggcgttcaggcagccctgatggaccgaaggctctggtgtctggtttggccccacagcagtgtgggccgatcctgtttacctcatacatccctgcactgtgtgttttcatttttgtctgctttagttctcttttattttctattcaccacacactcaccactcccagcttctcgtgtccagtgaaacccctgaaccaagatcactgaatttttgtttttttcttgttgctttgggaaatttttttttctctgtagggtttttaagaggtttcgggggttttgttgtgtaaatattctattttattcttggggggatcaaaccttaggaaaaggatatctatatatctatatagctatatatttgtgttccttcagggaaactggtcttgaaaaagcaagaaaaaaaagcaaaaaaaaaaaaaaa

SEQ ID NO: 1239 - DNA, 807 bp, Homo sapiens; identical to SEQ ID NO: 368

SEQ ID NO: 1240 - DNA, 2668 bp, Homo sapiens
ctctctggataggaagaaatatagtagaaccctttgaaaatggatattttcacatattttcgttcagatacaaaagctggcagttactgaaataaggacttgaagttccttcctcttttttttatgtcttaagagcaggaaataaagagacagctgaaggtgtagccttgaccaactgaaagggaaatcttcatcctctgaaaaaacatatgtgattctcaaaaaacgcatctggaaaattgataaagaagcgattctgtagattctcccagcgctgttgggctctcaattccttctgtgaaggacaacatatggtgatggggaaatcagaagctttgagaccctctacacctggatatgaatcccccttctaatacttaccagaaatgaaggggatactcagggcagagttctgaatctcaaaacactctactctggcaaaggaatgaagttattggagtgatgacaggaacacgggagaacaatgctctgtttgggctggatatttctttggcttgttgcaggagagcgaattaaaggatttaatatttcaggttgttccacaaaaaaactcctttggacatattctacaaggagtgaagaggaatttgtcttattttgtgatttaccagagccacagaaatcacatttctgccacagaaatcgactctcaccaaaacaagtccctgagcacctgcccttcatgggtagtaacgacctatctgatgtccaatggtaccaacaaccttcgaatggagatccattagaggacattaggaaaagctatcctcacatcattcaggacaaatgtacccttcactttttgaccccaggggtgaataattctgggtcatatatttgtagacccaagatgattaagagcccctatgatgtagcctgttgtgtcaagatgattttagaagttaagccccagacaaatgcatcctgtgagtattccgcatcacataagcaagacctacttcttgggagcactggctctatttcttgccccagtctcagctgccaaagtgatgcacaaagtccagcggtaacctggtacaagaatggaaaactcctctctgtggaaaggagcaaccgaatcgtagtggatgaagtttatgactatcaccagggcacatatgtatgtgattacactcagtcggatactgtgagttcgtggacagtcagagctgttgttcaagtgagaaccattgtgggagacactaaactcaaaccagatattctggatcctgtcgaggacacactggaagtagaacttggaaagcctttaactattagctgcaaagcacgatttggctttgaaagggtctttaaccctgtcataaaatggtacatcaaagattctgacctagagtgggaagtctcagtacctgaggcgaaaagtattaaatccactttaaaggatgaaatcattgagcgtaatatcatcttggaaaaagtcactcagcgtgatcttcgcaggaagtttgtttgctttgtccagaactccattggaaacacaacccagtccgtccaactgaaagaaaagagaggagtggtgctcctgtacatcctgcttggcaccatcgggaccctggtggccgtgctggcggcgagtgccctcctctacaggcactggattgaaatagtgctgctgtaccggacctaccagagcaaggatcagacgcttggggataaaaaggattttgatgctttcgtatcctatgcaaaatggagctcttttccaagtgaggccacttcatctctgagtgaagaacacttggccctgagcctatttcctgatgttttagaaaacaaatatggatatagcctgtgtttgcttgaaagagatgtggctccaggaggagtgtatgcagaagacattgtgagcattattaagagaagcagaagaggaatatttatcttgagccccaactatgtcaatggacccagtatctttgaactacaagcagcagtgaatcttgccttggatgatcaaacactgaaactcattttaattaagttctgttacttccaagagccagagtctctacctcatctcgtgaaaaaagctctcagggttttgcccacagttacttggagaggcttaaaatcagttcctcccaattctaggttctgggccaaaatgcgctaccacatgcctgtgaaaaactctcagggattcacgtggaaccagctcagaattacctctaggatttttcagtggaaaggactcagtagaacagaaaccactgggaggagctcccagcctaaggaatggtgaaatgagccctggagccccctccagtccagtccctgggatagagatgttgctggacagaactcacagctctgtgtgtgtgtgttcaggctgataggaaattcaaagagtctcctgccagcaccaagcaagcttgatggacaatggagtgggattgagactgtggtttagagcctttgatttcctggactggactgacggcgagtgaattctctagaccttgggtactttcagtacacaacacccctaagatttcccagtggtccgagcagaatcagaaaatacagctacttctgccttatggctagggaactgtcatgtctaccatgtattgtacatatgactttatgtatacttgcaatcaaataaatattattttattagaaa

SEQ ID NO: 1241 - DNA, 2803 bp, Homo sapiens
agccgggcgggcacgctccgaaccgcggcttaggtggcggcggcgaaggatgcacccggcaggcttggcggcggcggctgcggggacgccccggctgccctcgaagcggaggatccctgtgtcccagccgggcatggccgacccccaccagcttttcgatgacacaagttcagcccagagccggggctatggggcccagcgggcacctggtggcctgagttatcctgcagcctctcccacgccccatgcagccttcctggctgacccggtgtccaacatggccatggcctatgggagcagcctggccgcgcagggcaaggagctggtggataagaacatcgaccgcttcatccccatcaccaagctcaagtattactttgctgtggacaccatgtatgtgggcagaaagctgggcctgctgttcttcccctacctacaccaggactgggaagtgcagtaccaacaggacaccccggtggccccccgctttgacgtcaatgccccggacctctacattccagcaatggctttcatcacctacgttttggtggctggtcttgcgctggggacccaggataggttctccccagacctcctggggctgcaagcgagctcagccctggcctggctgaccctggaggtgctggccatcctgctcagcctctatctggtcactgtcaacaccgacctcaccaccatcgacctggtggccttcttgggctacaaatatgtcgggatgattggcggggtcctcatgggcctgctcttcgggaagattggctactacctggtgctgggctggtgctgcgtagccatctttgtgttcatgatccggacgctgcggctgaagatcttggcagacgcagcagctgagggggtcccggtgcgtggggcccggaaccagctgcgcatgtacctgaccatggcggtggcggcggcgcagcctatgctcatgtactggctcaccttccacctggtgcggtgagcgcgcccgctgaacctcccgctgctgctgctgctgctgggggccactgtggccgccgaactcatctcctgcctgcaggccccaaggtccaccctgtctggccacaggcaccgcctccatcccatgtcccgcccagccccgcccccaacccaaggtgctgagagatctccagctgcacaggccaccgccccagggcgtggccgctgttacagaaacaataaaccctgatgggcatggcgtggacagcctctccttggcctcgcgcacgaatgggcgggcccagcgctgggcagggggcagggagctggggacgggccagagtaggcaccacgctgaccagtcgcagaaggcagagaggaaggtttaatgagccctgtccagggcccttcagtggggagcctccttcttcttgcccttctccttcttgcccttctccttcttcttcactttgggcttcttggccttgcccgggatgctctcgtgctgcttggagccagcagcgtgggactgtggggccgagggcagggatgggagagaagagatggttctgggctggaagcgagacagggggaccactccccgcaccctccccgccagccccagtgcggggacgcctctctggggtgcagggcacgtgcttggggacgctggcgagagccccttaccttcacatccgtgtccgaatcgctggagctgctgctggagtcggaagagctgtggtgtccttgctggatggaggtgcggcagtgaggcggcgccccttacccagccccctgaagttggaggcctaaggcaggaccctggggtcaggggcaaccccagccttcccgcccctccgcagccggtgatgaggcgacttacctttggacccggacctgcccctgcctccgaccggccctgaactttgtggggactgagcttgggatctcccccgtggcccgcccccacaccgggcttctgggaggtgggctccagggctgtggagagaagttgggtggttggtgcaggcagcttctgggcttgagtccggccccctgcacctccagtccacactccccaggagctcacctgctcccaggtcgaactccatggcggtaagagaagttgggtcctaaggccaagggcgcctgggccctgcagaggagcggagcagggggaggagcgctgagacctgcccgttggaggaatgctgagacgccccacccaacctctgtcctggtcctcagccctgactcattgcccggcaccacccaggatttcctctgtgagaagtgggggagatggacaggtgactgcttccgccagccttggtgcctcaggggaggccgactgaggggggctctgtggatggcattcggggagctacaggtttcccccaaaagctcagatgctcgttcttgaagagggaggtgctgcccctgccttcctgcgtaccgcgacaatacagcttcctccgcggcgctttaacacgcagggcgctgctgccaggggcgtcccgtgttctaactcgctcccacagcccctccggcttggtgagcagcgtctgaggggtgaggggcatagacttggagccagcctgctgcactagatgccagctgtgtcacttagcagcaaggtgacctcagcaaagttgttttacctctgtgcctcagtttcctcatctgtaaataacagctacccatgggattgatgtgaaagtcagaggagttaatttcctagaatggtgtctggcatgaagtactgataatgtgttggttttttaaaaaataaaaggtaggtgttttaggccagtaaaaaaaaaaaaaaaaaaaaaaaaaa

SEQ ID NO: 1242 - DNA, 2960 bp, Homo sapiens
gcgtctgattggccatgcgcactgtcacctgtcacggctcccttgctcgccccggtgcgcggcacagcctcgcggcattgtgggagtcgtagtccgcggtgaggcccagtgcgcaggcgcagtttgccggccgccatcgcgcactggggctccgggcggctgggaccggcctggggtagctgcgcagcaggtgggtcggtcccggggatgcagcgcgggggtcagagagcgaccccaacagggtagacggtgaggacgcctcagtgggcagcgttagggaaaggggccagggtgttcccggggttggggtgcgagcccccgctgtgcgtccaggaggccgagggtctggcatcccttcgcgtggagtgcggggcaggggccgggtccccccggaggtggctgagatccagatcggtgaggggccctgcaggcaggtctgtgggttctggcaccacctgagcccactgggcatctggtcatccctggcacctctcctttggagccaccttgtccctggctagacagtcacattttccagtgccgttttggaaagatgttgcctttggagaaggcgtttgcctcccccaggagctccccagccccgccggatctgcccacgccggggtcagcagccggagtccagcaggaagaacccgagaccatccctgagaggacccctgctgacctggagttctcccgcctgcgtttccgggaatttgtctaccaggaggctgccgggccccaccagaccctggcccggctgcatgagctgtgccgccagtggctgatgcctgaggcgcgctccaaggagcagatgctggagctgctggtgctggagcagttcctgggcatcctgcctgataaggtccggccctgggtggtggcacagtaccctgagagctgcaagaaggcagcctccctggtggagggcctcgctgatgtcctggaagagccagggatgctgctgggctcccctgcgggctcatcctcaattcttagcgatggagtgtacgagaggcacatggaccctctgctgctaccaggcgagctcgcgagccccagccaggcccttggagctggggagatcccggcaccttctgagacaccctggctttctccggaccccctgtttctggaacagaggagggtcagagaagcaaagaccgaagaggacggccctgccaacaccgagcagaagctgaagtcctttccagaggaccctcagcacctgggggagtggggccacctggaccctgccgaggagaacctgaagagctaccggaagctgctcctgtgggggtatcagctttcccagcctgacgctgcctccaggctggacactgaggaactccggttggtggaaagagatccacaaggaagcagcctcccagaaggcgggaggcggcaggagagcgctgggtgcgcctgcgaggaggccgcccccgcgggggtgctgcctgagctgcctacggaggcgccccctggggacgcccttgccgatcccccgtcgggcaccactgaggaggaggaagagcagcctgggaaggccccggacccgcaggacccccaggacgcggagtccgactctgccaccggatcgcagaggcagtccgtcatccagcagcctgccccggacaggggcacggcgaaactgggaaccaagaggccgcaccccgaggatggggacgggcagagcctcgagggcgtctctagctccggcgacagcgcagggctggaggccgggcagggccctggggctgacgagccgggcttgtcccgcgggaagccctatgcctgcggcgagtgcggggaggccttcgcgtggctctcgcacctgatggagcaccacagcagccatggcggccggaagcgctacgcctgtcagggctgctggaagaccttccacttcagcctggccctagccgagcaccagaagacccacgagaaggagaaaagctacgcgctggggggcgcccggggcccccaaccgtccacccgcgaagcccaggcgggggctagggcgggcggtcccccagagagcgtggagggcgaggctccccccgcacccccagaggcgcagaggtgagccgctgtgctgtcccgttccggaggggccgctttgccggccgtgaatcccagacgaggcattgggcctttccacgcccctgggtggcggcttcctgtggtgtttgtggacgtcctctgcctgtgccctgaatccgctcctgaggctaagcgctcccaacgagaagggtccacgggaagccctcacctctgtaaacacaccctgggccagcgctcgcatccgaggggagccgccggatgtggaagaagactcggctttcctgcagccatttagtgccgccccatgctaggttatttgacattgtgcagtgtagagttgccttaaagtgcgtgatctgccagtgctttcttcaagtcacccttgccccgattcctcctgtttgcgctccccagggttgctcaagtggaaattttgtcagctgtttagccttttcgtacttggcgtgatgtcaacttcacttctaatctgcaaaagcagaagctgtttcctagtttacctcgcgtgtgtttacctatatggagtagctcgcagagatcacagaaatgcttgcagcctaaggcagggttttcagaccgtgggtcccagcccatttagtaaaatgggaaatcaattagcaagtggtcaccagcattacacagcaatgaagcagaataaagtaggccagaatgcatcatgtagtaaaggcaaatactgttttgtgaaacttttcacccatacatctaaatgtgagaactggttgcaatgtaagacatttcttgctgggaagttgtgagcaaaataagttgaaaacactaataaagatctgtctgtctgagcaaaggagactaaactccttgggctacaaaaaaaaaaaaaaaaaaaaaaaaaaaaaaaa

SEQ ID NO: 1243 - DNA, 554 bp, Homo sapiens
atacagtgacctcgggcggcgggtcacgtcggccgggcatggctgcatggagcccggccgcggcagcgcctctcctccgcgggatccgcgggcttccacttcaccatcggatgtttgccactcagactgagggggagctcagagtgacccaaattctcaaagaaaagtttccacgagctacagctataaaagtcactgacatttcaggaggttgtggggcgatgtatgaaattaaaattgaatcagaagaatttaaggagaagagaactgtccagcagcaccagatggttaatcaggcactaaaagaagaaatcaaagagatgcatggattgcggatatttacctctgtccccaaacgctgaccacgccctggctgcatagatgctgctgcttaagaccttggatgaacttcactgacatcattcttccctaagcagtcaccaaaaaatttatatattttgctcatatacatttccatattataattatagaagatgtataatctatttagatgttaattaaaggaaacaaacaactgaagcttttgaagggtc

SEQ ID NO: 1244 - DNA, 5663 bp, Homo sapiens
attacaaagaaagccggactcttttcttataactgagctcagccaaggaaactcttgcacaaatgtacaatactgtttggaatatggaagacctggatttagaatatgccaagacagatataaattgtggcacagacttgatgttttatatagaaatggacccaccagcactgcctcctaaaccaccaaaacctactactgtagccaacaacggtatgaataacaatatgtccttacaagatgctgaatggtactggggagatatctcgagggaagaagtgaatgaaaaacttcgagatacagcagacgggacctttttggtacgagatgcgtctactaaaatgcatggtgattatactcttacactaaggaaagggggaaataacaaattaatcaaaatatttcatcgagatgggaaatatggcttctctgacccattaaccttcagttctgtggttgaattaataaaccactaccggaatgaatctctagctcagtataatcccaaattggatgtgaaattactttatccagtatccaaataccaacaggatcaagttgtcaaagaagataatattgaagctgtagggaaaaaattacatgaatataacactcagtttcaagaaaaaagtcgagaatatgatagattatatgaagaatatacccgcacatcccaggaaatccaaatgaaaaggacagctattgaagcatttaatgaaaccataaaaatatttgaagaacagtgccagacccaagagcggtacagcaaagaatacatagaaaagtttaaacgtgaaggcaatgagaaagaaatacaaaggattatgcataattatgataagttgaagtctcgaatcagtgaaattattgacagtagaagaagattggaagaagacttgaagaagcaggcagctgagtatcgagaaattgacaaacgtatgaacagcattaaaccagaccttatccagctgagaaagacgagagaccaatacttgatgtggttgactcaaaaaggtgttcggcaaaagaagttgaacgagtggttgggcaatgaaaacactgaagaccaatattcactggtggaagatgatgaagatttgccccatcatgatgagaagacatggaatgttggaagcagcaaccgaaacaaagctgaaaacctgttgcgagggaagcgagatggcacttttcttgtccgggagagcagtaaacagggctgctatgcctgctctgtagtggtggacggcgaagtaaagcattgtgtcataaacaaaacagcaactggctatggctttgccgagccctataacttgtacagctctctgaaagaactggtgctacattaccaacacacctcccttgtgcagcacaacgactccctcaatgtcacactagcctacccagtatatgcacagcagaggcgatgaagcgcttactctttgatccttctcctgaagttcagccaccctgaggcctctggaaagcaaagggctcctctccagtctgatctgtgaattgagctgcagaaacgaagccatctttctttggatgggactagagctttctttcacaaaaaagaagtaggggaagacatgcagcctaaggctgtatgatgaccacacgttcctaagctggagtgcttatcccttctttttctttttttctttggtttaatttaaagccacaaccacatacaacacaaagagaaaaagaaatgcaaaaatctctgcgtgcagggacaaagaggcctttaaccatggtgcttgttaatgctttctgaagctttaccagctgaaagttgggactctggagagcggaggagagagaggcagaagaaccctggcctgagaaggtttggtccagcctggtttagcctggatgttgctgtgcacggtggacccagacacatcgcactgtggattatttcattttgtaacaaatgaacgatatgtagcagaaaggcacgtccactcacaagggacgctttgggagaatgtcagttcatgtatgttcagaagaaattctgtcatagaaagtgccagaaagtgtttaacttgtcaaaaaacaaaaacccagcaacagaaaaatggagtttggaaaacaggacttaaaatgacattcagtatataaaatatgtacataatattggatgactaactatcaaatagatggatttgtatcaataccaaatagcttctgttttgttttgctgaaggctaaattcacagcgctatgcaattcttaattttcattaagttgttatttcagttttaaatgtaccttcagaataagcttccccaccccagtttttgttgcttgaaaatattgttgtcccggatttttgttaatattcatttttgttatccttttttaaaagtaaatgtacaggatgccagtaaaaaaaaaaaatggcttcagaattaaaactatgaaatattttacagtttttcttgtacagagtacttggctgttagcccaaggttaaaaagttcataacagattttttttggactgttttgttgggcagtgcctgataagcttcaaagctgctttattcaataaaaaaaagaaatgaaaaagatatatgaatatgacaaagtattgctgagtccaacaatgttgttttaagactcttaaaatacggtacctggcaatgtttatttcataaagaattgtgaacttcttgaatctagggagggggaatgtagtgaagggatgtatcaagtggggtggtgggagggggaggcaaggttatatgcactttctcatgatttacagagaagtgaataactgcaaagtgaagttgcttcttctacttcagtcttctctcactttgatttgctagttgttatcaattaatgacaattacaaacctactgtatctctaatacagtgtgactggtcaggtatttcagttcttaggaaggaagtgccaagtttgtttttgggttcctggaacagcgctcacctttgtttagaacactggtttaaagggataatcatctctgtcacattagactatccatcatgaccagcaaatactcattttaggaaaaaaaaaagcatgatctgaaaaatacttttggtggtatgttggttaccctcctagctttccatttggtttagaacataaagcaaatagacacagtcatactgtcactgctctggactgtgtggagctcgctaaagtcatggtcattgcaggaatccaagtggcagtccttctcattcattctaatcattgtatgtgcttcactacgggggggagaaggaaacgttagcatcatgtttcccatttagggcaggagtgagaggtctctcttcctgatttagatatgcaaaagctggtatgttcagtaggaactgtacatgtgttgggaggcataaagactaattagcaaccataatatggtcactaccctaatagactaaatgaaatcttgcaatttcaaattactctttctccatattagatttacccacagctatatttctgtttaagtactagggtgagggttttctgttactttgttttttaatgttgttccttttgaaagaatcagtcttgcagctgagtgaaaaatctgtggaatgtattatttgtcctctttacatgaaactactcatacttaagcaaaagtcagtcttatagcaagactgttagccctcaaacttgactctactgatctgaccatttccctctcatcgccagacaactgacgatttccctggttttagtctgcgtctctgctttaaagttattgtgatatccttctagatcatacacaagtctaacagttaattagttaacagtttttaaactaggtttgtgggtatttttttggtagcacatgtatgctattacatacaaatttttatttctaaaatataagatctgagattgaatattttcattaaaagctacagttttgtgaatctttgtgcttcaacattctttgcaagatgatacggtatttaggcatttgccttatttttgcatctcacaaacataagtgcaatagatcttttcattgaacagcaaagtaggattcatcattccatatgacttgagttacaccagacctgttctgcccaatgcctttttgattacagtgtagcttgcccaccgcatttgtcgttttagatactttgctagccggccactttggatttcatcagacagtcctaacaatattgtctgaacggctgaatatgaatagatacagcagaggcactcctgatatatgatttttatccatgcgtcagtttttcccacccagtgtagcatcctaaagataaagccagaagctaagctgcagtgaggctgtgattgggcgtagaagtgggagcattgggacctcacattacacacacgagagatcataaccatgtgaaaaggcaaaaagcatgtgtttgcaacatctgataacttcatggcctttgataaatgtatatatgtatatgtgcatggactgtgtttccagtacacctttcagccaaaacagatccacagtagttgttgagttcaagtacataaagtacataacaagcgaacgtctagtacaattcttacttatgtgtatgggatttttccctttgaggttgctttgttttgtcttacaaaggtgaaaattgtttgtaagtgaagtgagaagttcatatttctttggcttttttgtgtttttaaaagttactccttttagggagctggtctgatgacttgcttagcttggaaatccttgttttcagtgtgtcgagtcaaaatgtgtttatgtgagctgtcactgtggggaaccaattgctttgtcatatagctggttatgaactagtaacatgtttgggaagtcctactgatgttcctttggaagaaaaaatctgctggttttaacaactgtgcttttgctatgtatggtatccaagttagttgaaacgcagacactgagatctgtttgagtttagggtcatttttagaaaggggcagtttaaagcacaatgtctcacatgggacaaagttccaaaatgccaaattcttattttttaaaaagctagttctataaaatactggtattatgggtggggaggaaatagaattgagtcaattggaaagactatccaacttaacatgaaacttgtcaccatgagatagcattagctgcccaggatgctgctatatatatatatatatatatatatgtgtgtgtgtgtgtgtgtgtgtgtgtatatatatatatatatatatatatatatatatatatatatgtgtgtgtatatatatatatatgtgtatatatatatgtatatacatatatgtatatatatgcacatatatatatgtatttaaaaaaatcaaaacaaaaaaaaactcatttatacctgtgtattttttaaagctacaatctgttcaatgtttttaaaaatctgtttatatgacattgttaaaataaagttggtcttttgacgagagggaggatgtcacggtcagttgtaactttgccttcacaaggcaactggggtggggggtgggggtagtgtgcctccttgacatttcgttcaagttatagattcaatggagctatgtcttgttttaagttgctttaatgcattgtattagatcttcaaacagaataaaggttgttttgaaactgaaaaaaaaaaaaaaaaaa

SEQ ID NO: 1245 - DNA, 7219 bp, Homo sapiens
ggaccccggcaagcccgcgcacttggcaggagctgtagctaccgccgtccgcgcctccaaggtttcacggcttcctcagcagagactcgggctcgtccgccatgtccgccgcagacgaggttgacgggctgggcgtggcccggccgcactatggctctgtcctggataatgaaagacttactgcagaggagatggatgaaaggagacgtcagaacgtggcttatgagtacctttgtcatttggaagaagcgaagaggtggatggaagcatgcctaggggaagatctgcctcccaccacagaactggaggaggggcttaggaatggggtctaccttgccaaactggggaacttcttctctcccaaagtagtgtccctgaaaaaaatctatgatcgagaacagaccagatacaaggcgactggcctccactttagacacactgataatgtgattcagtggttgaatgccatggatgagattggattgcctaagattttttacccagaaactacagatatctatgatcgaaagaacatgccaagatgtatctactgtatccatgcactcagtttgtacctgttcaagctaggcctggcccctcagattcaagacctatatggaaaggttgacttcacagaagaagaaatcaacaacatgaagactgagttggagaagtatggcatccagatgcctgcctttagcaagattgggggcatcttggctaatgaactgtcagtggatgaagccgcattacatgctgctgttattgctattaatgaagctattgaccgtagaattccagccgacacatttgcagctttgaaaaatccgaatgccatgcttgtaaatcttgaagagcccttggcatccacttaccaggatatactttaccaggctaagcaggacaaaatgacaaatgctaaaaacaggacagaaaactcagagagagaaagagatgtttatgaggagctgctcacgcaagctgaaattcaaggcaatataaacaaagtcaatacattttctgcattagcaaatatcgacctggctttagaacaaggagatgcactggccttgttcagggctctgcagtcaccagccctggggcttcgaggactgcagcaacagaatagcgactggtacttgaagcagctcctgagtgataaacagcagaagagacagagtggtcagactgaccccctgcagaaggaggagctgcagtctggagtggatgctgcaaacagtgctgcccagcaatatcagagaagattggcagcagtagcactgattaatgctgcaatccagaagggtgttgctgagaagactgttttggaactgatgaatcccgaagcccagctgccccaggtgtatccatttgccgccgatctctatcagaaggagctggctaccctgcagcgacaaagtcctgaacataatctcacccacccagagctctctgtcgcagtggagatgttgtcatcggtggccctgatcaacagggcattggaatcaggagatgtgaatacagtgtggaagcaattgagcagttcagttactggtcttaccaatattgaggaagaaaactgtcagaggtatctcgatgagttgatgaaactgaaggctcaggcacatgcagagaataatgaattcattacatggaatgatatccaagcttgcgtggaccatgtgaacctggtggtgcaagaggaacatgagaggattttagccattggtttaattaatgaagccctggatgaaggtgatgcccaaaagactctgcaggccctacagattcctgcagctaaacttgagggagtccttgcagaagtggcccagcattaccaagacacgctgattagagcgaagagagagaaagcccaggaaatccaggatgagtcagctgtgttatggttggatgaaattcaaggtggaatctggcagtccaacaaagacacccaagaagcacagaagtttgccttaggaatctttgccattaatgaggcagtagaaagtggtgatgttggcaaaacactgagtgcccttcgctcccctgatgttggcttgtatggagtcatccctgagtgtggtgaaacttaccacagtgatcttgctgaagccaagaagaaaaaactggcagtaggagataataacagcaagtgggtgaagcactgggtaaaaggtggatattattattaccacaatctggagacccaggaaggaggatgggatgaacctccaaattttgtgcaaaattctatgcagctttctcgggaggagatccagagttctatctctggggtgactgccgcatataaccgagaacagctgtggctggccaatgaaggcctgatcaccaggctgcaggctcgctgccgtggatacttagttcgacaggaattccgatccaggatgaatttcctgaagaaacaaatccctgccatcacctgcattcagtcacagtggagaggatacaagcagaagaaggcatatcaagatcggttagcttacctgcgctcccacaaagatgaagttgtaaagattcagtccctggcaaggatgcaccaagctcgaaagcgctatcgagatcgcctgcagtacttccgggaccatataaatgacattatcaaaatccaggcttttattcgggcaaacaaagctcgggatgactacaagactctcatcaatgctgaggatcctcctatggttgtggtccgaaaatttgtccacctgctggaccaaagtgaccaggattttcaggaggagcttgaccttatgaagatgcgggaagaggttatcaccctcattcgttctaaccagcagctggagaatgacctcaatctcatggatatcaaaattggactgctagtgaaaaataagattacgttgcaggatgtggtttcccacagtaaaaaacttaccaaaaaaaataaggaacagttgtctgatatgatgatgataaataaacagaagggaggtctcaaggctttgagcaaggagaagagagagaagttggaagcttaccagcacctgttttatttattgcaaaccaatcccacctatctggccaagctcatttttcagatgccccagaacaagtccaccaagttcatggactctgtaatcttcacactctacaactacgcgtccaaccagcgagaggagtacctgctcctgcggctctttaagacagcactccaagaggaaatcaagtcgaaggtagatcagattcaagagattgtgacaggaaatcctacggttattaaaatggttgtaagtttcaaccgtggtgcccgtggccagaatgccctgagacagatcttggccccagtcgtgaaggaaattatggatgacaaatctctcaacatcaaaactgaccctgtggatatttacaaatcttgggttaatcagatggagtctcagacaggagaggcaagcaaactgccctatgatgtgacccctgagcaggcgctagctcatgaagaagtgaagacacggctagacagctccatcaggaacatgcgggctgtgacagacaagtttctctcagccattgtcagctctgtggacaaaatcccttatgggatgcgcttcattgccaaagtgctgaaggactcgttgcatgagaagttccctgatgctggtgaggatgagctgctgaagattattggtaacttgctttattatcgatacatgaatccagccattgttgctcctgatgcctttgacatcattgacctgtcagcaggaggccagcttaccacagaccaacgccgaaatctgggctccattgcaaaaatgcttcagcatgctgcttccaataagatgtttctgggagataatgcccacttaagcatcattaatgaatatctttcccagtcctaccagaaattcagacggtttttccaaactgcttgtgatgtcccagagcttcaggataaatttaatgtggatgagtactctgatttagtaaccctcaccaaaccagtaatctacatttccattggtgaaatcatcaacacccacactctcctgttggatcaccaggatgccattgctccggagcacaatgatccaatccacgaactgctggacgacctcggcgaggtgcccaccatcgagtccctgataggggaaagctctggcaatttaaatgacccaaataaggaggcactggctaagacggaagtgtctctcaccctgaccaacaagttcgacgtgcctggagatgagaatgcagaaatggatgctcgaaccatcttactgaatacaaaacgtttaattgtggatgtcatccggttccagccaggagagaccttgactgaaatcctagaaacaccagccaccagtgaacaggaagcagaacatcagagagccatgcagagacgtgctatccgtgatgccaaaacacctgacaagatgaaaaagtcaaaatctgtaaaggaagacagcaacctcactcttcaagagaagaaagagaagatccagacaggtttaaagaagctaacagagcttggaaccgtggacccaaagaacaaataccaggaactgatcaacgacattgccagggatattcggaatcagcggaggtaccgacagaggagaaaggccgaactagtgaaactgcaacagacatacgctgctctgaactctaaggccaccttttatggggagcaggtggattactataaaagctatatcaaaacctgcttggataacttagccagcaagggcaaagtctccaaaaagcctagggaaatgaaaggaaagaaaagcaaaaagatttctctgaaatatacagcagcaagactacatgaaaaaggagttcttctggaaattgaggacctgcaagtgaatcagtttaaaaatgttatatttgaaatcagtccaacagaagaagttggagacttcgaagtgaaagccaaattcatgggagttcaaatggagacttttatgttacattatcaggacctgctgcagctacagtatgaaggagttgcagtcatgaaattatttgatagagctaaagtaaatgtcaacctcctgatcttccttctcaacaaaaagttctacgggaagtaattgatcgtttgctgccagcccagaaggatgaaggaaagaagcacctcacagctcctttctaggtccttctttcctcattggaagcaaagacctagccaacaacagcacctcaatctgatacactcccgatgccacatttttaactcctctcgctctgatgggacatttgttacccttttttcatagtgaaattgtgtttcaggcttagtctgacctttctggtttcttcattttcttccattacttaggaaagagtggaaactccactaaaatttctctgtgttgttacagtcttagaggttgcagtactatattgtaagctttggtgtttgtttaattagcaatagggatggtaggattcaaatgtgtgtcatttagaagtggaagctattagcaccaatgacataaatacatacaagacacacaactaaaatgtcatgttattaacagttattaggttgtcatttaaaaataaagttcctttatatttctgtcccatcaggaaaactgaaggatatggggaatcattggttatcttccattgtgtttttctttatggacaggagctaatggaagtgacagtcatgttcaaaggaagcatttctagaaaaaaggagataatgtttttaaatttcattatcaaacttgggcaattctgtttgtgtaactccccgactagtggatgggagagtcccattgctaaaattcagctactcagataaattcagaatgggtcaaggcacctgcctgtttttgttggtgcacagagattgacttgattcagagagacaattcactccatccctatggcagaggaatgggttagccctaatgtagaatgtcattgtttttaaaactgttttatatcttaagagtgccttattaaagtatagatgtatgtcttaaaatgtgggtgataggaattttaaagatttatataatgcatcaaaagccttagaataagaaaagctttttttaaattgctttatctgtatatctgaactcttgaaacttatagctaaaacactaggatttatctgcagtgttcagggagataattctgcctttaattgtctaaaacaaaaacaaaaccagccaacctatgttacacgtgagattaaaaccaattttttccccattttttctccttttttctcttgctgcccacattgtgcctttattttatgagccccagttttctgggcttagtttaaaaaaaaaatcaagtctaaacattgcatttagaaagcttttgttcttggataaaaagtcatacactttaaaaaaaaaaaaaactttttccaggaaaatatattgaaatcatgctgctgagcctctattttctttctttgatgttttgattcagtattcttttatcataaatttttagcatttaaaaattcactgatgtacattaagccaataaactgctttaatgaataacaaactatgtagtgtgtccctattataaatgcattggagaagtatttttatgagactctttactcaggtgcatggttacagcccacagggaggcatggagtgccatggaaggattcgccactacccagaccttgttttttgttgtattttggaagacaggttttttaaagaaacattttcctcagattaaaagatgatgctattacaactagcattgcctcaaaaactgggaccaaccaaagtgtgtcaaccctgtttccttaaaagaggctatgaatcccaaaggccacatccaagacaggcaataatgagcagagtttacagctcctttaataaaatgtgtcagtaattttaaggtttatagttccctcaacacaattgctaatgcagaatagtgtaaaatgcgcttcaagaatgttgatgatgatgatatagaattgtggctttagtagcacagaggatgccccaacaaactcatggcgttgaaaccacacagttctcattactgttatttattagctgtagcattctctgtctcctctctctcctcctttgaccttctcctcgaccagccatcatgacatttaccatgaatttacttcctcccaagagtttggactgcccgtcagattgttgctgcacatagttgcctttgtatctctgtatgaaataaaaggtcatttgttcatgttaaaaaaaaa

SEQ ID NO: 1246 - DNA, 710 bp, Homo sapiens
gctcgtccgctccctcccccgcgccgtgcacgtcttggttcgggccgggcataaaaggcttcgcggcccagggctcacttggcgctgagaacgcgggtccacgcgtgtgatcgtccgtgcgtctagcctttgcccacgcagctttcagtcatggcctccggtaacgcgcgcatcggaaagccagcccctgacttcaaggccacagcggtggttgatggcgccttcaaagaggtgaagctgtcggactacaaagggaagtacgtggtcctctttttctaccctctggacttcacttttgtgtgccccaccgagatcatcgcgttcagcaaccgtgcagaggacttccgcaagctgggctgtgaagtgctgggcgtctcggtggactctcagttcacccacctggcttggtatgagcaggggccaaagagggaggttgcagctaagctcacaccctcaggtcctagcagtgtggcttcgtggccattgctcaacctctggaacctgcgtttccccatcgtgaaaataatggaaacattgccgcccaagtctttaaggatgatgacagtaattagcatttgacaactagttgcctggtatatagagttgcagatgcaactcagatgcaactctatctactctatgtacttagttcccaggagggaggctgtgctgccctatttcatgaagatggaaactccagttcaccgaag

SEQ ID NO: 1247 - DNA, 1351 bp, Homo sapiens
agctccggctccccctatataaatcggccatttgcttcgctccgccccgcagcgccggagtcaaagccggttcccggcccagtcccgtcctgcagcagtctgcctcctctttcaacatgacagatgccgctgtgtccttcgccaaggacttcctggcaggtggagtggccgcagccatctccaagacggcggtagcgcccatcgagcgggtcaagctgctgctgcaggtgcagcatgccagcaagcagatcactgcagataagcaatacaaaggcattatagactgcgtggtccgtattcccaaggagcagggagttctgtccttctggcgcggtaacctggccaatgtcatcagatacttccccacccaggctcttaacttcgccttcaaagataaatacaagcagatcttcctgggtggtgtggacaagagaacccagttttggctctactttgcagggaatctggcatcgggtggtgccgcaggggccacatccctgtgttttgtgtaccctcttgattttgcccgtacccgtctagcagctgatgtgggtaaagctggagctgaaagggaattccgaggcctcggtgactgcctggttaagatctacaaatctgatgggattaagggcctgtaccaaggctttaacgtgtctgtgcagggtattatcatctaccgagccgcctacttcggtatctatgacactgcaaagggaatgcttccggatcccaagaacactcacatcgtcatcagctggatgatcgcacagactgtcactgctgttgccgggttgacttcctatccatttgacactgttcgccgccgcatgatgatgcagtcagggcgcaaaggaactgacatcatgtacacaggcacgcttgactgctggcggaagattgctcgtgatgaaggaggcaaagcttttttcaagggtgcatggtccaatgttctcagaggcatgggtggtgcttttgtgcttgtcttgtatgatgaaatcaagaagtacacataagttatttcctaggatttttccccctgtgaacaggcatgttgtattatataacatatcttgagcattcttgacagactcctggctgtcagtttctcagtggcaactatttactggttgaaaatgggaagcaataatattcatctgaccagttttctcttaaagccatttccatgatgatgatgatgggactcaattgtattttttatttcagtcactcctgataaataacaaatttggagaaataaaaatatctaaaataaattttgtctgcagtatattttcatataaaaatgcatatttgagtgctacattcgaataaatactacctttttagtgaa

SEQ ID NO: 1248 - DNA, 1853 bp, Homo sapiens
gagggtctgtggtcctctgatcaacataggctggtgggagtacaggactcgcctcctcagggttccctgtgctgccacttttcagccatggccacaagtgaacagagtatctgccaagcccgggcttccgtgatggtctacgatgacaccagtaagaaatgggtaccaatcaaacctggccagcagggattcagccggatcaacatctaccacaacactgccagcaacaccttcagagtcgttggagtcaagttgcaggatcagcaggttgtgatcaattattcaatcgtgaaagggctgaagtacaatcaggccacgccaaccttccaccagtggcgagatgcccgccaggtctacggcttaaactttgcaagtaaagaagaggcaaccacgttctccaatgcaatgctgtttgccctgaacatcatgaattcccaagaaggaggcccctccagccagcgtcaggtgcagaatggcccctctcctgatgagatggacatccagagaagacaagtgatggagcagcaccagcagcagcgtcaggaatctctagaaagaagaacctcggccacagggcccatcctcccaccaggacatccttcatctgcagccagcgcccccgtctcatgtagtgggcctccaccgccccccccacccccagtcccacctccacccactggggctaccccacctcccccacccccactgccagccggaggagcccaggggtccagccacgacgagagctccatgtcaggactggccgctgccatagctggggccaagctgagaagagtccaacggccagaagacgcatctggaggctccagtcccagtgggacctcaaagtccgatgccaaccgggcaagcagcgggggtggcggaggaggcctcatggaggaaatgaacaaactgctggccaagaggagaaaagcagcctcccagtcagacaagccagccgagaagaaggaagatgaaagccaaatggaagatcctagtacctccccctctccggggacccgagcagccagccagccacctaactcctcagaggctggccggaagccctgggagcggagcaactcggtggagaagcctgtgtcctcgattctgtccagaaccccgtctgtggcaaagagccccgaagctaagagcccccttcagtcgcagcctcactctaggatgaagcctgctgggagcgtgaatgacatggccctggatgccttcgacttggaccggatgaagcaggagatcctagaggaggtggtgagagagctccacaaggtgaaggaggagatcatcgacgccatcaggcaggagctgagtgggatcagcaccacgtaaggggccggcctcgctgcgctgattcgtcgagcccatccggcgacagaggacagccagaagcccagccagccccagactccagtgcaccagagcacgcacaggagcctgggcgcgctgctgtgaaacgtcctgacctgtgatcacacatgacagtgaggaaaccaagtgcaactcctgggtttttttagattctgcctgacacggaacaccaggtctgctcgtcttttttgtgttttatatttgcttatttaaggtacatttctttgggtttctagagacgcccctaagtcacctgcttcattagacggtttccaggttttctcccaggtgacgctgttagcgcctcagctggcggtgacagccggcccagcgtggcgccaccacacaccgcagagctgtccaggcacagctccgtccccagcgctcatggtgttgaaactgtctgtcatgcaccacggtgtctgtgtccacacagtaataaacggtttactgtccgcaaaaaaaaaaaa

SEQ ID NO: 1249 - DNA, 4563 bp, Homo sapiens
ggcccatcggggctaggggaaccccggcgcagacctggggtggggtcggaaaagctgtttcatcgcccgctcccgggccctccgctccctccctccctccctctctccctggcaggactccccgccaggcctccccgccactctccgcggcgcattccgggaggcagcggccgcagcggcctcgccatgtcccagcccggccagaagcccgccgcctccccgcggccccggcgagcagccgccgcccgccgcacccatgagcatgtcagtgaaaaaaccagtgaatcgccttccaaaccaggagaaaagaaaggatcagatgagaaaaaagcagcaagcctcggcagcagtcaatcctccagaacctatgctggtggaacagcctcggccaccaaggtgtcagcttcctctggtgcaaccagcaagtcttccagtatgaatcccacagaaaccaaggctgtaaaaacagaacctgagaagaagtcacagtcaaccaagctgtctgtggttcatgagaaaaaatcccaagaaggaaagccaaaagaacacacagagccaaaaagcctacccaagcaggcatcagatacaggaagtaacgatgctcacaataaaaaagcagtttccagatcagctgaacagcagccatcagagaaatcaacagaaccaaagactaaaccacaagacatgatttctgctggtggagagagtgttgctggtatcactgcaatatctggcaagccgggtgacaagaaaaaagaaaagaaatcattaaccccagctgtgccagttgaatctaaaccggataaaccatcgggaaagtcaggcatggatgctgctttggatgacttaatagatactttaggaggacctgaagaaactgaagaagaaaatacaacgtatactggaccagaagtttcagatccaatgagttccacctacatagaggaattgggtaaaagagaagtcacaattcctccaaaatatagggaactattggctaaaaaggaagggatcacagggcctcctgcagactcttcgaaacccatagggccagatgatgctatagacgccttgtcatctgacttcacctgtgggtcgcctacagctgctggaaagaaaactgaaaaagaggaatctacagaagttttaaaagctcagtcagcagggacagtcagaagtgctgctccaccccaagagaagaaaagaaaggtggagaaggatacaatgagtgatcaagcactcgaggctctgtcggcttcactgggcacccggcaagcagaacctgagctcgacctccgctcaattaaggaagtcgatgaggcaaaagctaaagaagaaaaactagagaagtgtggtgaggatgatgaaacaatcccatctgagtacagattaaaaccagccacggataaagatggaaaaccactattgccagagcctgaagaaaaacccaagcctcggagtgaatcagaactcattgatgaactttcagaagattttgaccggtctgaatgtaaagagaaaccatctaagccaactgaaaagacagaagaatctaaggccgctgctccagctcctgtgtcggaggctgtgtgtcggacctccatgtgtagtatacagtcagcaccccctgagccggctaccttgaagggcacagtgccagatgatgctgtagaagccttggctgatagcctggggaaaaaggaagcagatccagaagatggaaaacctgtgatggataaagtcaaggagaaggccaaagaagaagaccgtgaaaagcttggtgaaaaagaagaaacaattcctcctgattatagattagaagaggtcaaggataaagatggaaagccactcctgccaaaagagtctaaggaacagcttccacccatgagtgaagacttccttctggatgctttgtctgaggacttctctggtccacaaaatgcttcatctcttaaatttgaagatgctaaacttgctgctgccatctctgaagtggtttcccaaaccccagcttcaacgacccaagctggagccccaccccgtgatacctcgcagagtgacaaagacctcgatgatgccttggataaactctctgacagtctaggacaaaggcagcctgacccagatgagaacaaaccaatggaagataaagtaaaggaaaaagctaaagctgaacatagagacaagcttggagaaagagatgacactatcccacctgaatacagacatctcctggatgataatggacaggacaaaccagtgaagccacctacaaagaaatcagaggattcaaagaaacctgcagatgaccaagaccccattgatgctctctcaggagatctggacagctgtccctccactacagaaacctcacagaacacagcaaaggataagtgcaagaaggctgcttccagctccaaagcacctaagaatggaggtaaagcgaaggattcagcaaagacaacagaggaaacttccaagccaaaagatgactaaagaaatacaagttaaggtatctggtatctgcatgtaaaatcttcagctggtggatggtgacttttgaagaacaaaaggctttggcaacagaaaacaattgttctgggtgatttctagaatggtttttgttgagtctctgaacatcctaaatattggtttgttattcttttccagaaagaaaatgaatttgactggttcacctgtgtactgagtattgataaactttgaatttttttaattgccttcaattgggagagaaagctttatatttgtaagaaatatatttgataaagtttcttaaagcaacaccaaaaaaacaaaagaaaagctaagtgaatttttgcacattctacacacagtgcctgtaaatctcatttgtattttcagtttgcccttaattttttttgttagtgtttagaaaacaatgttttaaacattcttcagtgttctgatttcttattaccccctttcctcttgggcttttgaactgtatttgatgttgctttgggataatgtttataagtcaaacataagatattgtacattgggcacatatctcctcttgggctgctaataataaattaataacaggtaacctggacaaaccaggaagcaccaaaccccttttcagtttgaactcttctttgccaggtgtgaggacttctgcatcttacagtcagcacagaacacactgagacttgaatcaagtcagcaacagagcaaaataaaggttagataagtccttgtgtagcaaatttcgagcataagaaataaaatctaattaattcttagggtactcatctgacttgaactctgttggtttactgtgttagtaaactgtgctttctattatctatacataaaacctgagcagcaactgtgtctttagagctattgccacattagcctttgcactgtatagcgtctggctttatggaacttaagtttaccaaatataaaaagaaacttctgcttttaaaaaaattatatatatatattaaatttgaaacctgcatttctcccacagcaatgtaagaagtaggctctgatgtcctaccactttgaatggttttctaatatcttaatgaatagttcctgaacattgcactgatatcatcgattagaattttgatatttaatttcatctttatttcctggtagagaatgcaggaaaagatgtcaggtacataacataaaacagattgggaatttattgtttccaaagggcatggccttccttagcatcagtttgaagcttttgttatgacttagctgacttgtggcagcggggcaagcaaaaacaataacactgcttataaatggcaccacatcttgttaacctcccccccaaatactctctgaaagtcatgcacatacctatgggattttacacaccaccagcttaaaatgctatgtctctatccatcagaaatagtcattattctatttttaaggcagcaacaagaaaagaaaaaacacttttcctgagggatttctaaccatgtatctaatcctcccatttgggcagtataggtgtttgcttttttgttttctttttttaagaaaaaccttgaaacctttgacactgacagatgtgtttgcaaggatacggcttcagtattactaatttccatgtgtatctggaagtatttttaaatggcataccaaaatccagaagtttaaagatgcctataaaagtaaacaacatttatttaaaaagaactctgaatatgccttcttttttaattagaaatatcttcgagacttgggtgtttgttaataactaataactggagtaagctacaggatctaaagcagccctttttacagtctagttaggagagagaaaataattgcaaatatccacttagaggcaaagaacaattttttattatcaaaaaggtttctgcacattgttgtggcaatattgtatctgtttagaaaatgggcttttccaaaagcaaacaaagataggttcctcaggtgaccaaaactgaaaatcaatatttccatgtttcattaatcaaggcataaaatacaattaaagcaaaatattttacattaaaa

SEQ ID NO: 1250 - DNA, 841 bp, Homo sapiens
tgtgggggaaaaggccccggaacgaggccggcccgcgagggcccgcgctcccctcctccccggcggccgcactcacccactccggaatcggccctgtcgcccccgcccgcactccagagccggctgagaacggcagcggcgagggctccacgtgcagcgtctctccgggtaagacctgcagctcccgcgactagaagtgtgaggtcccagggcccttcccgcggaatcggcgctgagaagccccaacccccctcccgcctcccaggcaccttcgggtccaggactacaactcccggcagggtgcgcaaaacgaccgcccaaggcaacggaggctcacgagaatcagcatgattcttcagaggctcttcaggttctcctctgtcattcggtcagccgtctcagtccatttgcggaggaacattggtgttacagcagtggcatttaataaggaacttgatcctatacagaaactctttgtggacaagattagagaatacaaatctaagcgacagacatctggaggacctgttgatgctagttcagagtatcagcaagagctggagagggagctttttaagctcaagcaaatgtttggtaatgcagacatgaatacatttcccaccttcaaatttgaagatcccaaatttgaagtcatcgaaaaaccccaggcctgaagaaataaagtaaaattaatctggtaatttgtcacggattagttgtacaactagttagaagtttcagaataaacatgcatttcataactgtcaaatgttcttttaattctgagtccaaataaattatttggtgatgttgagtgtgttcttgatgaattgaaaaaaaa

SEQ ID NO: 1251 - DNA, 1791 bp, Homo sapiens
gatccgtgcggccagggtagctatcgcggcggcggcggcggcggcggttgaactgactcggagcgaggagacccgagcgagcagacgcggccctggcgcccgccctgcgcactcaccatggcgatgcatttcatcttctcagatacagcggtgcttctgtttgatttctggagtgtccacagtcctgctggcatggccctttcggtgttggtgctcctgcttctggctgtactgtatgaaggcatcaaggttggcaaagccaagctgctcaaccaggtactggtgaacctgccaacctccatcagccagcagaccatcgcagagacagacggggactctgcaggctcagattcattccctgttggcagaacccaccacaggtggtatttgtgtcactttggccagtctctaatccatgtcatccaggtggtcatcggctacttcatcatgctggccgtaatgtcctacaacacctggattttccttggtgtggtcttgggctctgctgtgggctactacctagcttacccacttctcagcacagcttagctggtgaggaacgtgcaggcactgaggctggagggacatggagccccctcttccagacactatacttccaactgccctttcttctgatggctattcctccaccttattcccagcccctggaaactttgagctgaagccagcacttgctccctggagttcggaagccattgcagcaaccttccttctcagccagcctacgtagggcccaggcatggtcttgtgtcttaagacagctgctgtgaccaaagggagaatggagataacaggggtggcagggttactgagcccatgacaatgcttctctgtgactcaaaccaggaatttccaaagatttcaagccagggagaagggttcttggtgatgcagggcatggaacctggacaccctcagctctcctgctttgtgccttatctacaggagcatcgcccattggacttcctgacctcttctgtctttgagggacagagaccaagctagatcctttttctcacctttctgcctttggaacacatgaagatcatctcgtctatggatcatgttgacaaactaagttttttttatttttcccattgaactcctagttggcaattttgcacattcatacaaaaaaatttttaatgaaatgatttcattgattcatgatggatggcagaaactgctgagacctatttccctttcttggggagagaataagtgacagctgattaaaggcagagacacaggactgctttcaggctcctggtttattctctgatagactgagctccttccaccagaaggcactgcctgcaggaagaagatgatctgatggccgtgggtgtctgggaagctcttcgtggcctcaatgccctcctttatcctcatctttcttctatgcagaacaaaaagctgcatctaataatgttcaatacttaatattctctatttattacttactgcttactcgtaatgatctagtggggaaacatgattcattcacttaaaatactgattaagccatgggcaggtactgactgaagatgcaatccaaccaaagccattacattttttgagttagatgggactctctggatagttgaacctcttcactttataaaaaaggaaagagagaaaatcactgctgtatactaaatacctcacagattagatgaaaagatggttgtaagctttgggaattaaaaacaaacaaatacattttagtaaatatatatttttaaatagtctaaaaaaaaaaaaaaaaaa

SEQ ID NO: 1252 - DNA, 3053 bp, Homo sapiens
ggattcgatcctgcgcgacggccgcgaaggcgggggcggaggctcggcctgcgcggctgggagcggcttaggggaggagggaagaccggaagccacggttgcgtccccatccttagattcgctcctccgggcagggagcggagacggaggaggaggagggagaggctgaatgttggctcggtaattgagaggagcggccgctccagagcttcctcccggggcgcccccctcagtccgtccgcgcttctcagccgccagtctcctggccgcgcagtccccgcggacggccgggccgcggagaccctcgcagaagaggcgctgccggcggcgaggactggccggcggcatccgaggcgcgcgccccaccgccacccccacccgcctgccagccggtccctccggccgccgccatgtcctcctcctcttcctcccccagggagacgtacgaggaggaccgggagtacgagagccaggccaagcgtctcaagaccgaggagggggagatcgactactcggccgaggaaggcgagaaccgccgggaagcgacgccccggggcgggggcgatggcggcggcggcggccggagcttctctcagccggaggcaggtggaagtcatcataaagtttctgtttcacccgtcgtccatgttcgaggactctgtgaatctgtggtggaagcagacctcgtggaagcgctggaaaaatttgggacaatatgctatgtgatgatgatgccatttaaacgacaggctctagtggaatttgaaaacatagatagtgccaaagaatgtgtgacatttgctgcagatgaacccgtgtacattgctggtcaacaggcttttttcaactattctacaagcaaaaggatcactcggccaggaaatactgatgatccatcaggaggcaacaaagttcttctgctctcaattcagaatccgctttatccaattacagtggatgttttatatactgtatgcaaccctgttggcaaagtgcaacgtattgttatattcaagagaaatgggatacaagcaatggttgagtttgaatcagtcctttgtgcccagaaagctaaagcagcactcaatggagctgatatatatgctggatgttgcacactaaaaattgaatatgcacggccaactcgtctaaatgttattaggaatgacaatgacagttgggactacactaaaccatatttgggaagacgagatagaggaaagggtcgccagagacaagccattttgggagaacacccttcttcgtttagacatgatggctatggatcccatggtccattattgcctttaccaagtcgttacagaatgggctctcgagatacacctgaacttgttgcttatccattaccacaggcttcttcctcttacatgcatggaggaaatccctctggttcagttgtaatggttagtggattacatcaactaaaaatgaattgttcaagagtcttcaacctgttctgcttatatggaaatattgagaaggtaaaatttatgaagaccattcctggtacagcactggtagaaatgggtgatgagtatgctgtagaaagagctgtcacacaccttaataatgtcaaattatttgggaaaagacttaatgtttgcgtgtctaaacaacattcagttgttccaagtcaaatatttgagctggaggatggtaccagcagctacaaagattttgcaatgagcaaaaataatcgctttacaagtgctggccaagcatctaagaatataatccagccaccctcctgtgttttgcattattataatgttccattgtgtgtcacagaagagaccttcacaaagttgtgtaatgaccatgaagttcttacattcatcaaatataaagtgtttgatgcaaaaccttcagccaaaacactttctgggctattagaatgggagtgcaaaactgatgcagtagaagcccttacggcactgaatcactatcagataagagtgccgaatggttccaatccctatacattgaagctttgcttttctacatcatcccatttataagaagagaagagcatgttagaatttatgttcacctttattacaatttcaaagctacacttcattaaaaaaaaatctaaaatggttgatctcatgttgccttgcttactttaagatcctgttctgtaataaacatattttgccttgagtaaatttgttgtaagcttaaatattgaattgttttcattttaagatagaatatcataatgtagactatctacagcttcattgtagattatacagatatatgatttctaaccttattactggaatttttcttccacagtaaaaatatatttgcattcttaatgctaattatctgcaagtattttttcattgtgtaagagattaatgcaggtgaaagtattgcattttaatatagaattcctattatatgtttagatgtttaagtatgttgcagttactcatattaaacataacttgtatatttattattttaatgaagtttgagaataacgttacatatgttgaattttaagtactacagatttaactgattttatatttctgaaaggctaacagacatggatacacgtgtacagtatgcattcaaacttatttaaattggtgtatttttttttaagtcactgtccatttgtattgacatgcctctgtttctagtccagtttggagattttataaagttataacaatgagttaatgtgttcattttcatttgttgcatgtgacttaaatacagctagtatttggcattgagattttaatagaggttataattaacagttcctcttatagataataatctgggatccatgggtgggcttcagagaatctgtgtaccccctaaaattgtatgtagaattttggatatttacatttttattttttaactcttggatccatcagtaatatgtatttttctatatggtacaagatttaaggatctaattttatttttattccaaacagatagctatttgtctcaataccatttattaaacattctttctcccactgaaaaaaaaaaaaaaaaaa

SEQ ID NO: 1253 - DNA, 751 bp, Homo sapiens
gtatctgtggtaaacccagtgacacgggggagatgacatacaaaaagggcaggacctgagaaagattaagctgcaggctccctgcccataaaacagggtgtgaaaggcatctcagcggctgccccaccatggctacctgggccctcctgctccttgcagccatgctcctgggcaacccaggtctggtcttctctcgtctgagccctgagtactacgacctggcaagagcccacctgcgtgatgaggagaaatcctgcccgtgcctggcccaggagggcccccagggtgacctgttgaccaaaacacaggagctgggccgtgactacaggacctgtctgacgatagtccaaaaactgaagaagatggtggataagcccacccagagaagtgtttccaatgctgcgacccgggtgtgtaggacggggaggtcacgatggcgcgacgtctgcagaaatttcatgaggaggtatcagtctagagttacccagggcctcgtggccggagaaactgcccagcagatctgtgaggacctcaggttgtgtataccttctacaggtcccctctgagccctctcaccttgtcctgtggaagaagcacaggctcctgtcctcagatcccgggaacctcagcaacctctgccggctcctcgcttcctcgatccagaatccactctccagtctccctcccctgactccctctgctgtcctcccctctcacgagaataaagtgtcaagcaagattttaaaaaaaa

SEQ ID NO: 1254 - DNA, 1646 bp, Homo sapiens
cactgcgaagcccagctgcgcgcgccttgggattgactgtccacgctcgcccggctcgtccgacgcgccctccgccagccgacagacacagccgcacgcactgccgtgttctccctgcggctcggacacatagtatgaccattaggtgtttcgtctcccacccattttctatggaaaaccaaggggatcgggccatgatagccactggcagctttgaagaacgggacacctttagagaagcttgatcttggaggcctcaccgtgagaccttacaaagccggattccggcagagttcctctatctcgtcttgttgctgattaaaggtgcccctgtctccagtttttctccatctcctgggacgtagcaggaaatcagcatcatggttgggttcaaggccacagatgtgccccctactgccactgtgaagtttcttggggctggcacagctgcctgcatcgcagatctcatcacctttcctctggatactgctaaagtccggttacagatccaaggagaaagtcaggggccagtgcgcgctacagccagcgcccagtaccgcggtgtgatgggcaccattctgaccatggtgcgtactgagggcccccgaagcctctacaatgggctggttgccggcctgcagcgccaaatgagctttgcctctgtccgcatcggcctgtatgattctgtcaaacagttctacaccaagggctctgagcatgccagcattgggagccgcctcctagcaggcagcaccacaggtgccctggctgtggctgtggcccagcccacggatgtggtaaaggtccgattccaagctcaggcccgggctggaggtggtcggagataccaaagcaccgtcaatgcctacaagaccattgcccgagaggaagggttccggggcctctggaaagggacctctcccaatgttgctcgtaatgccattgtcaactgtgctgagctggtgacctatgacctcatcaaggatgccctcctgaaagccaacctcatgacagatgacctcccttgccacttcacttctgcctttggggcaggcttctgcaccactgtcatcgcctcccctgtagacgtggtcaagacgagatacatgaactctgccctgggccagtacagtagcgctggccactgtgcccttaccatgctccagaaggaggggccccgagccttctacaaagggttcatgccctcctttctccgcttgggttcctggaacgtggtgatgttcgtcacctatgagcagctgaaacgagccctcatggctgcctgcacttcccgagaggctcccttctgagcctctcctgctgctgacctgatcacctctggctttgtctctagccgggccatgctttccttttcttccttctttctcttccctccttcccttctctccttccctctttccccacctcttccttccgctcctttacctaccaccttccctctttctacattctcatctactcattgtctcagtgctggtggagttgacatttgacagtgtgggaggcctcgtaccagccaggatcccaagcgtcccgtcccttggaaagttcagccagaatcttcgtcctgcccccgacagcccagcctagcccacttgtcatccataaagcaagctcaaccttgg

SEQ ID NO: 1255 - DNA, 1515 bp, Homo sapiens
ccggctccggcgctcacctacccccggcaggccccgcccccgtgcggtccctcccggaagcgccggcggagcgtcctcgcatggagcgcgagcccagcgcctcggaggccgcccccgcggcggccgcgctcttcgcctggggtgcaaatagctatgggcaacttggcctcggccataaggaagatgtgctgttgccccagcaactgaatgacttctgtaaacccaggagtgtcaggaggatcacaggaggagggggccactctgcagttgtcacagatggaggagacctctttgtttgtggcctgaacaaagatgggcaactggggcttggtcacacagaggatatcccatattttaccccctgcaaatccctctttggctgtcccatccaacaggtggcctgtggctgggattttacgattatgctcacagaaaatggtcaagttctatcatgtggatccaactcctttggccagttaggagttcctcatggacctcgaagatgtgtggttccccaggccattgagctccataaagagaaggttgtttgtattgctgctggactgaggcatgcagtagctgctacagcgagtggcatcgtgttccagtgggggactggtttggcatcatgtggacgacggttgtgccctgggcagactcttccattgtttttcacagcaaaggaaccaagcagagtgacaggtctagagaattctaaagcaatgtgtgttcttgctggctcagaccactcagcttcattaacagatgcaggagaggtgtatgtttggggaagcaacaagcatgggcaactggctaatgaggctgctttccttcctgtgccccagaaaatagaagcacattgtttccagaatgaaaaggtcactgccatctggagtggatggacacacctggttgctcagacagaaactggcaagatgtttacctggggccgagcagactatggtcagctagggaggaagttggagacttatgaaggctggaaactagaaaagcaagattcatttctcccctgttcaagaccaccgaacagcatgccttcgtctccgcattgcttaactggagcaactgaggtctcttgtggctcagagcataatttggcaataattggtggagtgtgttactcttggggctggaatgagcatggcatgtgcggagatggcactgaagccaacgtctgggccccaaagccggtgcaggctctgctgtcatcgtcaggactccttgtgggctgtggggctggccactccttggccctctgccagctgccagctcaccctgcattggtccaggaccccaaggtcacctacctttccccagatgccatcgaggacactgaatctcagaaagccatggacaaagagagaaactggaaggaaagacaatcagaaacttcaacccaaagccaatctgactggtccagaaatgggggactgtgatagagaatctttaataaagtggcttttcccaccaaaaaaaaaaaaaaaaaaaaaaaaa

SEQ ID NO: 1256 - DNA, 4125 bp, Homo sapiens
cggctatccgcgcgggagtgcgccacgcggggccggagcgcctattagccgccaggacctcggagcgccccgaccacccctgagcccctctggcttcggagccccccagcaccccttcccgggtcccctcgcccaccctaatccactctccctccctttcccggattccctcgctcaccccatcctctctcccgccccttcctggattccctcacccgtctcgatcccctctccgccctttcccagagacccagagcccctgaccccccgcgccctccccggagccccccgcgcgtgccgcggccatggcggccgtgcgcggggcgcccctgctcagctgcctcctggcgttgctggccctgtgccctggagggcgcccgcagacggtgctgaccgacgacgagatcgaggagttcctcgagggcttcctgtcagagctagaacctgagccccgggaggacgacgtggaggccccgccgcctcccgagcccaccccgcgggtccgaaaagcccaggcggggggcaagccagggaagcggccagggacggccgcagaagtgcctccggaaaagaccaaagacaaagggaagaaaggcaagaaagacaaaggccccaaggtgcccaaggagtccttggaggggtcccccaggccgcccaagaaggggaaggagaagccacccaaggccaccaagaagcccaaggagaagccacctaaggccaccaagaagcccaaggagaagccacccaaggccaccaagaagcccaaagagaagccacccaaggccaccaagaagcccccgtcagggaagaggccccccattctggctccctcagaaaccctggagtggccactgcccccaccccccagccctggccccgaggagctaccccaggagggaggggcgcccctctcaaataactggcagaatccaggagaggagacccatgtggaggcacgggagcaccagcctgagccggaggaggagaccgagcaacccacactggactacaatgaccagatcgagagggaggactatgaggactttgagtacattcggcgccagaagcaacccaggccacccccaagcagaaggaggaggcccgagcgggtctggccagagccccctgaggagaaggccccggccccagccccggaggagaggattgagcctcctgtgaagcctctgctgcccccgctgccccctgactatggtgatggttacgtgatccccaactacgatgacatggactattactttgggcctcctccgccccagaagcccgatgctgagcgccagacggacgaagagaaggaggagctgaagaaacccaaaaaggaggacagcagccccaaggaggagaccgacaagtgggcagtggagaagggcaaggaccacaaagagccccgaaagggcgaggagttggaggaggagtggacgcctacggagaaagtcaagtgtccccccattgggatggagtcacaccgtattgaggacaaccagatccgagcctcctccatgctgcgccacggcctgggggcacagcgcggccggctcaacatgcagaccggtgccactgaggacgactactatgatggtgcgtggtgtgccgaggacgatgccaggacccagtggatagaggtggacaccaggaggactacccggttcacaggcgtcatcacccagggcagagactccagcatccatgacgattttgtgaccaccttcttcgtgggcttcagcaatgacagccagacatgggtgatgtacaccaacggctatgaggaaatgacctttcatgggaacgtggacaaggacacacccgtgctgagtgagctcccagagccggtggtggctcgtttcatccgcatctacccactcacctggaatggcagcctgtgcatgcgcctggaggtgctggggtgctctgtggcccctgtctacagctactacgcacagaatgaggtggtggccaccgatgacctggatttccggcaccacagctacaaggacatgcgccagctcatgaaggtggtgaacgaggagtgccccaccatcacccgcacttacagcctgggcaagagctcacgaggcctcaagatctatgccatggagatctcagacaaccctggggagcatgaactgggggagcccgagttccgctacactgctgggatccatggcaacgaggtgctgggccgagagctgttgctgctgctcatgcagtacctgtgccgagagtaccgcgatgggaacccacgtgtgcgcagcctggtgcaggacacacgcatccacctggtgccctcactgaaccctgatggctacgaggtggcagcgcagatgggctcagagtttgggaactgggcgctgggactgtggactgaggagggctttgacatctttgaagatttcccggatctcaactctgtgctctggggagctgaggagaggaaatgggtcccctaccgggtccccaacaataacttgcccatccctgaacgctacctttcgccagatgccacggtatccacggaggtccgggccatcattgcctggatggagaagaaccccttcgtgctgggagcaaatctgaacggcggcgagcggctagtatcctacccctacgatatggcccgcacgcctacccaggagcagctgctggccgcagccatggcagcagcccggggggaggatgaggacgaggtctccgaggcccaggagactccagaccacgccatcttccggtggcttgccatctccttcgcctccgcacacctcaccttgaccgagccctaccgcggaggctgccaagcccaggactacaccggcggcatgggcatcgtcaacggggccaagtggaacccccggaccgggactatcaatgacttcagttacctgcataccaactgcctggagctctccttctacctgggctgtgacaagttccctcatgagagtgagctgccccgcgagtgggagaacaacaaggaggcgctgctcaccttcatggagcaggtgcaccgcggcattaagggggtggtgacggacgagcaaggcatccccattgccaacgccaccatctctgtgagtggcattaatcacggcgtgaagacagccagtggtggtgattactggcgaatcttgaacccgggtgagtaccgcgtgacagcccacgcggagggctacaccccgagcgccaagacctgcaatgttgactatgacatcggggccactcagtgcaacttcatcctggctcgctccaactggaagcgcatccgggagatcatggccatgaacgggaaccggcctatcccacacatagacccatcgcgccctatgaccccccaacagcgacgcctgcagcagcgacgcctacaacaccgcctgcggcttcgggcacagatgcggctgcggcgcctcaacgccaccaccaccctaggcccccacactgtgcctcccacgctgccccctgcccctgccaccaccctgagcactaccatagagccctggggcctcataccgccaaccaccgctggctgggaggagtcggagactgagacctacacagaggtggtgacagagtttgggaccgaggtggagcccgagtttgggaccaaggtggagcccgagtttgagacccagttggagcctgagtttgagacccagctggaacccgagtttgaggaagaggaggaggaggagaaagaggaggagatagccactggccaggcattccccttcacaacagtagagacctacacagtgaactttggggacttctgagatcagcgtcctaccaagaccccagcccaactcaagctacagcagcagcacttcccaagcctgctgaccacagtcacatcacccatcagcacatggaaggcccctggtatggacactgaaaggaagggctggtcctgcccctttgagggggtgcaaacatgactgggacctaagagccagaggctgtgtagaggctcctgctccacctgccagtctcgtaagagatggggttgctgcagtgttggagtaggggcagagggagggagccaaggtcactccaataaaacaagctcatggcaaaaaaaaaaaaaaaaaaaaaaaaaaaaaaaaaaaaaaaaaaaaa

SEQ ID NO: 1257 - DNA, 2347 bp, Homo sapiens
cggctgcagtctgggccggggccctgtgccgctgaagacatggagtttgtgtctggataccgggatgagttccttgatttcactgcccttctcttcggctggttccgaaagtttgtggcagagcgtggagctgtagggactagccttgagggccgctgccggcagctggaggcccagatcagaaggctaccccaggaccctgccctttgggtgctccatgtcctgcccaaccatagtgtgggcatcagcctggggcaaggggcagaaccaggtcctggaccaggcctggggactgcctggctcctgggagacaaccctccactccacctgcgagacctgagcccctacatcagctttgtcagcctagaggatggggaggaaggggaggaggaagaggaggaagatgaagaagaagagaagagagaggacgggggtgcaggcagcacagagaaggtggaaccagaggaggaccgggagctagcccctaccagcagggagtccccccaggaaacaaaccctccaggagagtcagaggaggctgcccgggaggcaggaggtggcaaggatggctgccgagaggacagggtggagaacgaaacaagaccccagaagaggaagggacagaggagtgaggctgcccccctgcacgtttcctgtctcttacttgtgacggatgagcatggcaccatcttgggcattgatctgctagtggatggagcccagggaaccgcaagctggggctcagggaccaaggacctggctccttgggcctatgctctcctctgtcacagcatggcctgtcccatgggctctggggatccccgaaagccccgacagcttactgtgggagatgcccggctgcatcgagagctggagagcttggtcccaaggctaggtgtgaagttagccaaaaccccaatgcggacatggggtccccggccaggcttcacctttgcttcccttcgtgctcgaacctgccatgtgtgtcacaggcacagctttgaagcgaagctgacaccttgcccccagtgtagtgctgtcttgtattgtggagaggcttgtctccgggctgactggcagcggtgcccagatgatgtgagtcaccgattttggtgcccaaggcttgcagccttcatggagcgggcaggagaactggcaaccctaccttttacctacaccgcagaggtgaccagtgaaaccttcaacaaagaggccttcctggcctctcggggcctcactcgtggctattggacccagctcagcatgctgattccaggcccgggcttctccagacacccccgaggcaacacgccatccctcagccttcttcgcggtggagacccctaccagcttctccagggagacgggactgccctgatgcctcctgtgcccccacatccaccccggggtgtttttgtccctgagctcaacatccaaaacaaacagtcactgaagatccacgtggtggaggccgggaaggagtttgaccttgtcatggtgttttgggagcttttggtcctgctcccccatgtggccctggagctgcagtttgtaggtgatggcctgccccccgaaagcgacgagcagcattttaccctgcagagggacagcctggaggtgtctgtccggcctggttccggcatatcagcacggcccagctctggcactaaggagaaagggggccgcagggacctgcagatcaaggtgtcagcaaggccctaccacctgttccaggggcccaagcctgacctggttattggatttaactccgggtttgctctcaaggatacgtggctgaggtctctgccccggttacagtccctccgagtgccagccttcttcaccgagagcagcgagtacagctgtgtgatggacggccagaccatggcggtggccactggagggggcaccagccctccccagcccaaccccttccgctccccctttcgcctcagagcggccgacaactgcatgtcctggtactgcaatgccttcatcttccacctggtttacaagcctgctcaagggagcggggcccgcccggcgcccgggcccccacccccatccccaactccctctgctcctcctgcccccacccgaaggcgccgaggagaaaagaaacctgggcggggggcccgccggcggaaatgaatgctgataccctagtagtccccagctcccaaacactgaaaggaaaacgtgaaaacactcaaggcctagggggaggacaggttggtaaaacatgaaaaggtaaataaaattacttgtttgaaaaaaaaaaaaaaaaaaaaaaaaaaaaaaaaaaaaaaaaaaaaaaaaaaaaaaaaaaaaaaaaaaaaaaaaaaaa

SEQ ID NO: 1258 - DNA, 1785 bp, Homo sapiens
gagcaccgcacactcacttcaccctggttcaacacccccacgaggttgaccccgtcattatgttagagattatgcattttccacatagggaaactgaggctcaggggtgttaagtgactcacccaaggtcacacggctaggaagttgctgcacgctcctatgctccatttcctctgggagcctatcaacccagataaagcgggacctcctctctggtagaggtgcagggggcagtactcaacatgatcacagagggagcgcaggcccctcgattgttgctgccgccgctgctcctgctgctcaccctgccagccacaggctcagaccccgtgctctgcttcacccagtatgaagaatcctccggcaagtgcaagggcctcctggggggtggtgtcagcgtggaagactgctgtctcaacactgcctttgcctaccagaaacgtagtggtgggctctgtcagccttgcaggtccccacgatggtccctgtggtccacatgggccccctgttcggtgacgtgctctgagggctcccagctgcggtaccggcgctgtgtgggctggaatgggcagtgctctggaaaggtggcacctgggaccctggagtggcagctccaggcctgtgaggaccagcagtgctgtcctgagatgggcggctggtctggctgggggccctgggagccttgctctgtcacctgctccaaagggacccggacccgcaggcgagcctgtaatcaccctgctcccaagtgtgggggccactgcccaggacaggcacaggaatcagaggcctgtgacacccagcaggtctgccccacacacggggcctgggccacctggggcccctggaccccctgctcagcctcctgccacggtggaccccacgaacctaaggagacacgaagccgcaagtgttctgcacctgagccctcccagaaacctcctgggaagccctgcccggggctagcctacgagcagcggaggtgcaccggcctgccaccctgcccagtggctgggggctgggggccttggggccctgtgagcccctgccctgtgacctgtggcctgggccagaccatggaacaacggacgtgcaatcaccctgtgccccagcatgggggccccttctgtgctggcgatgccacccggacccacatctgcaacacagctgtgccctgccctgtggatggggagtgggactcgtggggggagtggagcccctgtatccgacggaacatgaagtccatcagctgtcaagaaatcccgggccagcagtcacgcgggaggacctgcaggggccgcaagtttgacggacatcgatgtgccgggcaacagcaggatatccggcactgctacagcatccagcactgccccttgaaaggatcatggtcagagtggagtacctgggggctgtgcatgcccccctgtggacctaatcctacccgtgcccgccagcgcctctgcacacccttgctccccaagtacccgcccaccgtttccatggtcgaaggtcagggcgagaagaacgtgaccttctgggggagaccgctgccacggtgtgaggagctacaagggcagaagctggtggtggaggagaaacgaccatgtctacacgtgcctgcttgcaaagaccctgaggaagaggaactctaacacttctctcctccactctgagccccctgaccttccaaacctcaataaactagcctcttcgaaaaaaaaaaaaaaaaaaaaaaaaaaaaaaaaaaaaaaaaaaaaaaaaaaaaaaaaaaaaaaaaaaaaaaaa

SEQ ID NO: 1259 - DNA, 2109 bp, Homo sapiens
gggggcaacggtcacctgatctgcggctgtcgaggccgctgaggcagtggaggctgaggctatgatggcggccatggcgacggctcgagtgcggatggggccgcgatgcgcccaggcgctctggcgcatgccgtggctgccggtgtttttgtcgttggcggcggcggcggcggcggcagcggcggagcagcaggtcccgctggtgctgtggtcgagtgaccgggacttgtgggctcctgcggccgacactcatgaaggccacatcaccagcgacttgcagctctctacctacttagatcccgccctggagctgggtcccaggaatgtgctgctgttcctgcaggacaagctgagcattgaggatttcacagcatatggcggtgtgtttggaaacaagcaggacagcgccttttctaacctagagaatgccctggacctggccccctcctcactggtgcttcctgccgtcgactggtatgcagtcagcactctgaccacttacctgcaggagaagctcggggccagccccttgcatgtggacctggccaccctgcgggagctgaagctcaatgccagcctccctgctctgctgctcattcgcctgccctacacagccagctctggtctgatggcacccagggaagtcctcacaggcaacgatgaggtcatcgggcaggtcctgagcacactcaagtccgaagatgtcccatacacagcggccctcacagcggtccgcccttccagggtggcccgtgatgtagccgtggtggccggagggctaggtcgccagctgctacaaaaacagccagtatcacctgtgatccatcctcctgtgagttacaatgacaccgctccccggatcctgttctgggcccaaaacttctctgtggcgtacaaggaccagtgggaggacctgactcccctcacctttggggtgcaggaactcaacctgactggctccttctggaatgactcctttgccaggctctcactgacctatgaacgactctttggtaccacagtgacattcaagttcattctggccaaccgcctctacccagtgtctgcccggcactggtttaccatggagcgcctcgaagtccacagcaatggctccgtcgcctacttcaatgcttcccaggtcacagggcccagcatctactccttccactgcgagtatgtcagcagcctgagcaagaagggtagtctcctcgtggcccgcacgcagccctctccctggcagatgatgcttcaggacttccagatccaggctttcaacgtaatgggggagcagttctcctacgccagcgactgtgccagcttcttctcccccggcatctggatggggctgctcacctccctgttcatgctcttcatcttcacctatggcctgcacatgatcctcagcctcaagaccatggatcgctttgatgaccacaagggccccactatttctttgacccagattgtgtgaccctgtgccagtgggggggttgagggtgggacggtgtccgtgttgttgctttcccaccctgcagcgcactggactgaagagcttccctcttcctactgcagcatgaactgcaagctcccctcagcccatcttgctccctcttcagcccgctgaggagctttcttgggctgcccccatctctcccaacaaggtgtacatattctgcgtagatgctagaccaaccagcttcccagggttcgtcgctgtgaggcgtaagggacatgaattctagggtctcctttctccttatttattcttgtggctacatcatccctggctgtggatagtgcttttgtgtagcaaatgctccctccttaaggttatagggctccctgagtttgggagtgtggaagtactacttaactgtctgtcctgcttggctgtcgttatcgttttctggtgatgttgtgctaacaataagaagtacacgggtttatttctgtggcctgagaaggaagggacctccacgacaggtgggctgggtgcgatcgccggctgtttggcatgttcccaccgggagtgccgggcaggagcatggggtgcttggttgtttccttcctaataaaataaacgcgggtcgccatgcaaaaaaaaaa

SEQ ID NO: 1260 - DNA, 6428 bp, Homo sapiens
gctagtggaagttactgccgcgccaccgagtccggaccggagactttggggcctaactagtgaatggtagtgtctagaaagggtatgtcccttcaagagagaggtgccaatgtccaaccggcctaataacaatccaggggggtcactgcgacgttcacagaggaacactgccggggcccaaccacaagacgactcaataggaggaagaagctgcagttcatcatctgctgtgatagttccacaaccagaggatccagacagagccaatacttcagaaagacaaaaaacggggcaggtgcctaagaaagacaattctcgaggagtgaagcgcagtgctagtccagactacaacaggaccaattctcctagctctgcaaaaaaaccaaaagcacttcagcatactgaatctccctcagaaacaaataagccacatagtaagtcaaagaagagacatttagaccaggagcaacaactgaaatctgcacaatcaccatcaacaagcaaggctcataccaggaagagtggggccactggcggttcacggagtcagaaaagaaaaaggacagagagttcttgtgtaaagagtggctccgggtctgaatcaactggtgcagaagagagatctgcgaaacctaccaagctggcttcaaaatcagccacctcagccaaagctgggtgtagcaccatcactgattcttcttctgctgcctctacttcctcctcgtcttctgctgtagcctcggcctcctccactgtaccaccaggtgccagagtgaaacaaggaaaagatcagaacaaggccaggcgttcccgttcagcgtccagtcccagccccagaagaagtagcagggaaaaggaacagagtaaaactggtggctcttcaaaatttgattgggctgctcgtttcagccctaaagttagccttcctaaaacaaaactgtctcttccagggtcttctaagtcagagacatcaaaacctggaccttctggattacaggccaaattagcaagtttaagaaaatctacgaagaaacgcagtgagtctccacctgctgagctccccagtttgaggcggagcacacgccaaaagaccacgggctcctgtgctagtaccagtcggcgaggctctggcctgggcaaaagaggagcagctgaagctcgtcgacaggagaaaatggcagaccctgaaagcaaccaggaggcagtaaattcttcagctgctcggacagatgaagctccccaaggagctgcaggggctgttggcatgaccacctctggggagagtgaatcagatgattccgagatgggacgtttgcaagctttgttagaggcaaggggtcttccccctcacctatttggtcctcttggtcctcggatgtcacagcttttccatagaacaattggaagtggagctagttctaaggcccagcagctactacaaggattgcaagccagtgatgaaagtcaacagcttcaggcagttattgagatgtgtcagttactggtcatgggaaatgaggagacactgggagggtttcctgtcaagagtgttgttccagctttgattacgttacttcagatggagcacaattttgatattatgaaccatgcttgtcgagccttaacatacatgatggaagcacttcctcgatcttctgctgttgtagtagatgctattcctgtctttttagaaaagctgcaagttattcagtgtattgatgtggcagagcaggccttgactgccttggagatgttgtcacggagacatagtaaagccattctacaggcgggtggtttggcagactgcttgctgtacctagaattcttcagcataaatgcccaaagaaatgcattagcaattgcagctaattgctgccagagtatcacgccagatgaatttcattttgtggcagattcactcccattgctaacccaaaggctaacacatcaggataaaaagtcagtagaaagcacttgcctttgttttgcacgcctagtggacaacttccagcatgaggagaatttactccagcaggttgcttccaaagatctgcttacaaatgttcaacagctgttggtagtgactccacccattttaagttctgggatgtttataatggtggttcgcatgttttctctgatgtgttccaactgtccaactttagctgttcaacttatgaaacaaaacattgcagaaacgcttcactttctcctgtgtggtgcctccaatggaagttgtcaggaacagattgatcttgttccacgaagccctcaagagttgtatgaactgacatctctgatttgtgaacttatgccatgtttaccaaaagaaggcatttttgcagttgataccatgttgaagaagggaaatgcacagaacacagatggtgcgatatggcagtggcgtgatgatcggggcctctggcatccatataacaggattgacagccggatcattgagcaaatcaatgaggacacgggaacagcacgtgccattcagagaaaacctaacccgttagccaatagtaacactagtggatattcagagtcaaagaaggatgatgctcgagcacagcttatgaaagaggatccggaactggctaagtcttttattaagacattatttggtgttctttatgaagtgtatagttcctcagcaggacctgcggtcagacataagtgccttagagcaattcttaggataatttattttgcggatgctgaacttctgaaggatgttctgaaaaatcatgctgtttcaagtcacattgcttccatgctgtcaagccaagacctgaagatagtagtgggagcacttcagatggcagaaattttaatgcagaagttacctgatatttttagtgtttacttcagaagagaaggtgtaatgcatcaagtaaaacacttagcagaatcagagtctttgttgacaagtccaccaaaggcatgtacgaatggatcgggatccatgggatccacaacttcagtcagcagtgggacagccacagctgccactcatgctgcagctgacttgggatcacccagcttgcagcacagcagggatgattctttagatctcagccctcaaggtcgattaagtgatgttctaaagagaaaacgactgccaaaacgagggccaagaaggccaaagtactcacctccaagagatgatgacaaagtagacaatcaagctaaaagccccaccactactcagtcacctaaatcttctttcctggcaagcttgaatccaaaaacatggggaaggttaagtacacagtccaacagcaacaacattgagccagcacggactgcgggaggtagtggccttgccagggctgcctcaaaggataccatctccaataatagagaaaaaattaaaggttggattaaggagcaggcacataaatttgtagaacgttatttcagttctgagaatatggatggaagcaaccctgcattgaatgtccttcagagactttgtgctgcaaccgaacaactcaacctccaggtggatggtggagctgagtgccttgtagaaatccgtagcatagtctcagagtcagatgtttcatcatttgaaatccaacatagtggatttgtgaagcagctgttgctttatttgacatctaaaagtgaaaaggatgctgtgagcagagagatcagattaaagcgatttcttcatgtatttttttcttctccacttcctggagaagagcccattggaagagtggaaccagtgggtaatgcacctttgttggcattagttcacaagatgaacaactgcctcagccagatggaacaatttccagtcaaagtacatgatttccctagtggaaatgggacaggaggcagcttttctctcaacagaggatcacaggctttaaaatttttcaacacacatcaattaaaatgccagttacaaaggcatccagactgtgcaaatgtgaagcagtggaagggtggacctgtcaagattgaccctctggctttggtacaagccatcgagagataccttgtagttagagggtatggaagagtaagagaagatgatgaagacagcgatgacgatggatcagatgaggaaatagatgagtctctggctgctcagttcctaaattcaggaaatgtaagacacaggctgcagttttatattggagaacatttgctgccgtataacatgactgtgtatcaggcagtacggcagtttagtatacaggctgaagatgaaagagaatccacagatgatgagagcaatcctctaggcagagctggtatttggacaaagactcatacaatatggtataaacctgtgagagaggatgaagaaagtaataaagattgtgttggtggtaaaagaggaagagcccaaacagctccaacgaaaacttcccctagaaatgcaaaaaagcatgatgagttatggcacgatggagtgtgcccatcagtatcaaatcctttagaagtttacctcattcccacaccacctgaaaatataacatttgaagacccgtcattagatgtgatccttcttttaagagttttacatgctatcagtcgatactggtattacttgtatgataatgcaatgtgcaaggaaattattccaactagtgaatttattaacagtaagttaacagcaaaagcaaataggcaacttcaagatcctttagtaatcatgacaggaaacatcccaacatggcttactgagctaggaaaaacctgcccatttttctttccttttgatacccggcaaatgcttttttatgtaactgcatttgatcgggaccgagcaatgcaaagattacttgataccaacccagaaatcaaccagtctgattctcaagatagcagagttgcacctagattggatagaaaaaaacgtactgtgaaccgagaggagctgctgaaacaggcggagtctgtgatgcaggacctcggcagctcacgggccatgttagaaatccagtatgaaaatgaggttggtacaggtcttgggcctacactggagttttatgcgcttgtatctcaggaactacagagagctgacttgggtctttggagaggtgaagaagtaactcttagcaatccaaaagggagccaagaagggaccaagtatattcaaaacctccagggcctgtttgcgcttccctttggtaggacagcaaagccagctcatatcgcaaaggttaagatgaagtttcgcttcttaggaaaattaatggccaaggctatcatggatttcagattggtggaccttccccttggcttacccttttataaatggatgctacggcaagaaacttcactgacatcacacgatttgtttgacatcgacccagttgtagccagatcagtttatcacctagaagacattgtcagacagaagaaaagacttgaacaagataaatcccagaccaaagagagtctacagtatgcattagaaaccttgactatgaatggctgctcagttgaagatctaggactggatttcactctgccagggtttcccaatatcgaactgaagaaaggagggaaggatataccagtcactatccacaatttagaggagtatctaagactggttatattctgggcactaaatgaaggcgtttctaggcaatttgattcgttcagagatggatttgaatcagtcttcccactcagtcatcttcagtacttctacccggaggaactggatcagctcctttgtggcagtaaagcagacacttgggatgcaaagacactgatggaatgctgtaggcctgatcatggttatactcatgacagtcgggctgtgaagtttttgtttgagattctcagtagttttgataatgagcagcagaggttatttctccagtttgtgactggtagcccaagattgcctgttggaggattccggagtttgaatccacctttgacaattgtccgaaagacgtttgaatcaacagaaaacccagatgacttcttgccctctgtaatgacttgtgtgaactatcttaagttgccggactattcaagcattgagataatgcgtgaaaaactgttgatagcagcaagagaagggcagcagtcgttccatctttcctgattatagcaagaaatgcagtgtctgcctgttacagcaaaagaaacaaatcatgatttcttttctaatgttatcacctgagtcaaggaaacatgttacgccttcttgttgtaggaaaaacggcttgcagattataaagagacatttggttgatattcattaatggccccatggacttaaagtgatcaggccctaaaacgttgttgtgatgaggtttctttagcaagttcttgtttaaattatcatttatttgatgagtgaagtttttaacatgctttgctgtgtgaaatttaaaaaagggatgtttttccaggctggaacaataaatgtggctgtgcagttt

SEQ ID NO: 1261 - DNA, 6067 bp, Homo sapiens; identical to SEQ ID NO: 1028

SEQ ID NO: 1262 - DNA, 1728 bp, Homo sapiens
gcccggcgcggggggaggggggtgctgacccggatgttcactcctgggcacccggggaagtggaagcgccgggccctgctgcgggggggagagccactgacgccgggaccgggaccgccgccgccgccgccaccatgagtgatcagcagctggactgtgccttggacctaatgaggcgcctgcctccccagcaaatcgagaaaaacctcagcgacctgatcgacctggtccccagtctatgtgaggatctcctgtcttctgttgaccagccactgaaaattgccagagacaaggtggtgggaaaggattaccttttgtgtgactacaacagagatggggactcctataggtcaccatggagtaacaagtatgaccctcccttggaggatggggccatgccgtcagctcggctgagaaagctggaggtggaagccaacaatgcctttgaccagtatcgagacctgtattttgaaggtggcgtctcatctgtctacctctgggatctggatcatggctttgctggagtgatcctcataaagaaggctggagatggatcaaagaagatcaaaggctgctgggattccatccacgtggtagaagtgcaggagaaatccagcggtcgcaccgcccattacaagttgacctccacggtgatgctgtggctgcagaccaacaaatctggctctggcaccatgaacctcggaggcagccttaccagacagatggagaaggatgaaactgtgagtgactgctccccacacatagccaacatcgggcgcctggtagaggacatggaaaataaaatcagaagtacgctgaacgagatctactttggaaaaacaaaggatatcgtcaatgggctgaggtctgtgcagacttttgcagacaaatcaaaacaagaagctctgaagaatgacctggtggaggctttgaagagaaagcagcaatgctaaacctctgtttcatgctaaccagacacgccgtgcactcgttagattcctttcttagaaaactcgttttctgctcccttccctcgtcccttccctccccgacaggtcacataacagctgcatcattgaccgcacagcgccatctctccctgagaataaagccgatagccaccctcctccggctccgagcctgcttctgccacacctcgctctcagttctctccacatttccatagagaccgtgtggtttttgttcacccgggccccccgtcttcctccctgtccccccatttataggcataaaatccactgtctgccagcctcccttccctcccacctttttggtacattggtgtaaaaaatgtaaaacaaaaaaattttatgaactaactgtggtgtgtgaaagagagaagaaaaactggaaatcttattccgtgtgtgtttgggagttgcttggggttgggggtcgtggggacaggggacagctctgggagcagaggtggccctcggtgccgtcctgcgcagactctcccgtcccacggaggccgcggggtgggggctggggggggtgccgccgaccgttccgctcttccggccaggtgcttttctgtcaatttctatggaatgcaaaaggaggtttttgttttattttgtttttttgtaaagcttaagaaaaaaatctacatcttatacttgagcctccatacttaaaaaaagaaaagaaaagaaatcaataaaaagaaactggggcgcagttagcaaaaaaaaaaaaaaaaaa

SEQ ID NO: 1263 - DNA, 622 bp, Homo sapiens; identical to SEQ ID NO: 710

SEQ ID NO: 1264 - DNA, 7331 bp, Homo sapiens
gttgtgagctgcggcagagactggtggctggaggagacgccggcgctggagagtgcgctgcgccgcccgccgctgagggaccgcggggttagccactgctggctgcttccagtgttcgccgagaggtaccgggggtgacagctccgggaccggccgaaaggcgaggaaccggtgtggaaattaaaagaacacacatattttgactggggctttgatcaaccaaatgctaaaaagccacataaagaagatccctaatagtcatttctcaacaattatatagtcaactgatgtaacaatggtactaatattgggacgcagactaaacagagaggatcttggggtgcgtgattccccagcaactaagcgaaaagtttttgaaatggaccccaaatctctgacaggtcatgagttttttgacttctcttcaggatcatcccatgccgaaaacatactccagatatttaatgaatttcgtgatagccgcttattcacagatgttatcatttgtgtggaaggaaaagaatttccttgccatagagctgtgctctcagcctgtagcagctacttcagagctatgttttgtaatgaccacagggaaagccgagaaatgttggttgagatcaatggtattttagctgaagctatggaatgttttttgcagtatgtttatactggaaaggtgaagatcactacagagaatgtacagtatctctttgagacatcaagcctctttcagattagtgttctccgtgatgcatgtgccaagttcttggaggagcaacttgatccttgtaattgcttaggaatccagcgctttgctgatacccattcactcaaaacactcttcacaaaatgcaaaaattttgcgttacagacttttgaggatgtatcccagcacgaagaatttcttgagcttgacaaagatgaacttattgattatatttgtagtgatgaacttgttattggtaaagaggagatggtttttgaagccgtcatgcgttgggtctatcgtgccgttgatctgagaagaccactgttacacgagctcctgacacatgtgagactccctctgttgcatcccaactactttgttcaaacagttgaagtggaccaattgatccagaattctcctgagtgttatcagttgttgcatgaagcaagacggtaccacatacttgggaatgaaatgatgtccccaaggactaggccacgcaggtccactggctattctgaggtgatagttgtcgttggaggatgtgagcgagttggaggatttaatcttccatacactgagtgctacgatcctgtaacaggagaatggaagtctttggctaagcttccagaatttaccaaatcagagtatgcagtctgtgctctaaggaatgacattcttgtttcaggtggaagaatcaacagccgtgatgtctggatttataactcacagttaaatatttggatcagagttgcctctctcaataaaggcagatggcgtcacaaaatggctgtcctccttggtaaagtatatgttgtcggtggctatgatgggcaaaacagacttagcagcgtagaatgttatgattccttttcaaatcgatggactgaagttgctccccttaaggaagccgtgagttctcctgcagtgactagctgtgtaggcaaactgtttgtgattggtggaggacctgatgataatacttgttctgataaggttcaatcttatgatccagaaaccaattcttggctacttcgtgcagctatcccaattgccaaaaggtgtataacagctgtatccctaaacaacctgatctatgttgccggtggactgaccaaggcaatatactgttacgatccagttgaagattactggatgcacgtacagaatacattcagccgtcaggaaaactgtggtatgtctgtgtgtaatggtaaaatatatatcctgggcggaagacgggaaaatggagaagccacagacactattctctgttatgatcctgcaacaagtatcatcacaggggtagctgcaatgcccaggccagtgtcctatcatggctgtgtgactattcatagatacaatgagaaatgctttaaactctgaagacaggatacctcaccgaagaagccacactgatccaagatgggaggttttaaaaactctacagtgggaacttcacatatctcctttgtgccatatgcaaaaaatagtaaaaataataatttggtgcctttctcctcaaaatatcaatctttcaaactataataaagcctttcctataattgaaaaaaaaaacttttttgttaaaggtaatggtggttgttacttggcctttgaagagtgtacctttgtaagtatttgtaagaagtctatgtgaattaggaaatgtctgtctgcataccttttaggagcgtgtgaatggtgtcttcacttattatgtatgtttatctgtatgtatattccttattttgtcatatatgtagagaaaattgcatgacttgaggcatcatttaggttgaagaagttaatgcttaggatgcattctaggagaaaaaatcagttttaaaaacctttgttgttaacaaagtatatccagattggttaattttattgaagggtttttttctgtaattgataaaaatgtaatgacaacaattcaggcatcataaaatactgaactattgtgactttattcttagaattgctgtcttacattaaacatgtttttagggggaagttaggtaggagatagaaaaataagtgcccctacaagggggattaaaattacaagttaattcctaagagaaaaatggaatggcctttgaaggaaaaatgacccactatggctctcaaagtttttatgcatcatctcttcaatcctctaagaaagcctcttttcttaacttgataaagcagtggaaacccattttgcaatattgttttgtgaaaaacagggacagacagccaggtacagagactcacacctgtactcccaactactcagcaggctggggcaggaggattgcttgagcccaggagtctgaggctacagtgagctatgaacgcacacggcaccctagcctgggcaacaggttgcgacactgtctcaagagaaaagaaaaagaaaaatagggataggttttccttcctagcccagtagagtttgacctcattagtatggtgctttgggtgaggacctcttccttgattatcccactttctagtgaacagctaaaattcctgagagtctctactgttaaggtacctttaataggataaagcagggaccacctatctcagtgggtccatttttcttttaaaattagttatctgaaaaaacttagcagtagttcccatctttaaggtaagtctttcatttggtccccattgtgtaaaatactaatcaacattttcaagcttctgtacaacagactgcttttgtctagatttctcaactccactttataaagcttatcagttttcagagaggaatgtgaattttttttctaatgcaaataaatggatatggcaggaactacagcataagtgattattgtgattctgggtggacggatataatttacaacatttagggatgttctaggtagcctgctgtagtttgacttccagtcactgttgtctttcacattataatttgtatatttcttgtgatagaagggatgatgcaaatatgtaattaaagtgtcaccagatttctgttaaaaccaaggttgaaataaaaagcctaacattggtaagctacattgttttctcattttagaatgattcagagatttcagatagacattttttaaactttaatgcttagctagaatctacattctgaggaaaactctaaaaaacttaaaaatttttagggaatttttatttttcaaatcataattttaaaatgatagataccattttgtgataacaacaattcagaaaacaattttctatcctcttagttgaaagaatgtaggtacagtttggatacttgtactttaattttagagtaaacatctgcattatactcttatagataatagaattatttagttaagaaattctttacagtaaatgagataatgtgtgaaaaagtattttgtaaatgctgaggattctacaaatgatagttgttattttcatgtgtatttgtaagatcatgtccatttcatgaatataggacttcacataaaaaaagactttctcaagacaactttatattctagtatttttctgttgtaaaaagtattaactatttacttttattttgttatacatttattttaatatccatgtgtttattatagtaaatttgaaatgaaatcctgaaaaacagaatttttttaaacacagacctcacaccaatattaattttttctctacataatttaaaactacataaattaagtacttaaaatttatattgaaggccaccaagaacttaggttgaatcttagaaaatttaaataactatttttaaagttacccaacttaatattttaattttttaatatttatcttcctttactaattcttgataaataatagcattagacttgataaaataaaaaagaattttagagtagaattaatatatcaaaaggggtatatcaaccaaattggtgtcagattgtattcattctctcatcacataaagatttttcttttgataggtgatgctcatatgaacctttggtttagaatctatatatgtacatgtgtatgtatgtagatagtatggttgtatacacacatatataccaaacaccatgaattttagcagtctgtgatgatcagcaaaaaagcacataaagtaaaaattagttgaccatgctaaattcaattctggaatttttttttatttgggcatttctagaactttttacatttgaaagtacatgatgagtattagtaacgatgacttatgtataatcagaatctttatgacaatttagttttacaaggtcagaagagatgagtttgctaaacccagctgtgatacctcagttggaaagggaattcaaaggtatgctttgtagaacagaaaagtatagtttttttttcatgaactttaatcattttctgtttttcctctatgtgagtcagctacaaaagtggtctaatttttacaacagtagaacttcctccttttctactgtaatcttcccactgactttactgcacaggtatgaaatactagtgtattggatcttcagtaacctttttatttcctagatgattgaaatataggtatttactccatttaaaccaggtgataagatgatgtaaatactcagggagggtattaacttgttacttttgctcgtttggggtgtaaagtgccatgactgaataatcttcaattcatgattctagagtaagtttaatttggaaaaaggggcttcacacatggtggtggttgaacattgattcttttatacttaaaaagatgaaaatgttttgtggactgatacattttatcttactgaatatgaattgtttatgtatctctactgtcaaatagcctttttgaaactcaggaaagacaaaggttcaattacaccacttttgtcaataagcaaaccaggtattttttttttctcctgttgtctggatatggcaatagattttttaaattgctgtgagaacccatatatgaaaagagaggagttgaattgtgtgtgccttttatgtcttgagatttatatgtggaaaagacgacatctacttcaaactgtatttttttcgtttttttttttttttggggaaggggggagaacggggtcttgctctgtcgcccaggctggagtgcagtggcgcgatctcagctgactgcaacctccacctcccgggttcaagggattctgcctcagcctcccgagtagctgagaccacaggtgcgtgccaccacacccggctaatttttttgtatttttagtagagacggggtttagtagagacggatcactcctgaccacgtgatccgcccacctcggcctcccaaagtgctgggattacaggcgtgagccaccacccccggcctgtattttcagagaggagagcttggtgtttttgtggtgccaagtggtaagataatgtctctttgaggcttcctatggactgcctttattttagtaaactcaagacaccagttaacctcaacagagttttggccttattagaatttgttgtgcatcttattgaaagccaggtttacatcacctcaccccattattctttttagttaaataaatttaccatgccaagtaaccagaatggagcaaattggttgatctttaaggcagtaggtttgactagctagctatcattattgtcacatctaatgctaggcaccagaaaccatttgagccaggagtgtgaatgaataattccagagacactttagacattttttaatgttttatatgaacattttacatttgtgtgattgccttagatattaaattttcctagtgctgataaaaacagcaacattcataacttattttatatattgttccaaagaaaagaatttgttttaatggtttcaaaataactgcacctgaatttgtttatgtgccttaagttctctagtgctatttcaacttttttttcaatctaaatgaagcttaccttagataaggttcatatttgtttcctatagagtaaataaacttccccttcttaaattgtgtaataagcaccaacgtgtggttgcttggcagaatgagaatgttaagggagattgttggatgtttggagtttcattatattttttgtttttattttttgatacctaggtgctttttaaaatattcagacaaatatctatcttacattgattaaacccgtgtaaattcatttgcagtatctacatcgaatgtcaaaaaagtatacttatttttgttccatacttatgtacaattttttccctcttcaggctttttcatttacctttttgaaaaagcacttactctccccttccctatcacccctcccccaaggtttctttatttaaatttttattgagagttgttggagctctaagacaatacaaatttagagttgaacaaaagtataatctgctttacaactagtatagacctaaggtcatttgctttcaattagaggctccagagtcttcatagtggaaagaatgctttgtatttaattgttcttagttaagttgtagcacgtgaatacttacttacatgttttgtttaaatatacttcttgcatagtttaattttttaaaagttgtatctaataaaatgtcttttaaccattattacttgactatatggttgtattaaattttgtttacgaaaaa

SEQ ID NO: 1265 - DNA, 1609 bp, Homo sapiens
gggattggagtgctctgctccggacgcactacgtaggtgggcctgcgggagttctgagtgcgacggcgcaggtctgcaccatggcggcccggcttgtcagccgatgcggggctgtgcgtgcagctccccacagcggcccgctggtgtcctggcgcaggtggtccggcgcctcaacagacaccgtgtatgacgtggtggtgtcgggtggaggcctggtgggcgctgccatggcctgtgccttgggatatgatattcactttcatgacaagaaaatcctgttgctcgaagcaggtccaaagaaagtactggagaaattgtcagaaacttacagcaacagggtcagctccatttcccctggctctgcaacgcttctcagtagttttggtgcctgggaccatatctgcaacatgagatacagagcctttcggcgaatgcaggtgtgggacgcctgctcagaggccctgataatgtttgataaggataatttagatgacatgggctatatcgtggagaatgatgtcatcatgcatgctctcactaagcagttggaggctgtgtctgaccgagtgacggttctctacaggagcaaagccattcgctatacctggccttgtccatttcctatggccgactccagcccttgggttcatattaccctaggtgatggcagcaccttccagaccaaattgttgataggtgcagatggtcacaactccggagtacggcaggctgttggaatccagaatgtgagctggaactatgaccagtctgctgttgtggctactctgcatttatcagaggccacagaaaacaacgtagcctggcagagatttcttccctctgggcctattgctctgctcccgctctcagacaccttgagttccttggtttggtccacgtcccatgaacatgcagcagagctagttagcatggatgaggaaaaatttgtggatgccgttaactctgccttttggagtgatgctgaccacacggacttcatcgacacagctggtgccatgctgcagtatgctgtcagccttctgaagcccactaaggtctcggctcgccagctgcccccaagcgtagccagggtggatgccaaaagccgagttctgtttcctcttgggttgggacatgctgctgagtacgtcaggcctcgggtggcgctcattggggatgcagcccacagagtccatccgcttgcaggacagggtgtcaacatgggctttggggatatctccagcttggcccatcacctcagtacggcagccttcaatgggaaggacttaggttccgtgagccacctcacaggttatgaaacagaaagacagcgtcacaacactgctcttctggctgctacagacttactaaaaaggctctattctaccagtgcctccccgcttgtgttgctcaggacgtggggcttgcaggccacaaatgcagtgtctccactcaaagaacagattatggcctttgcaagcaaatgagtactcctctcctaaagaaagattacgttgatgaaaaagaacatcctgcccaggacccatcatacatattttcaagatcttatttaatttaataaacttactttacattaaaaaaaaaaaaa

SEQ ID NO: 1266 - DNA, 960 bp, Homo sapiens
ccccggcccacaagcccctgcagggagcgggcccgggcggcgcgcgatcgaggtcgggtcgccgtccagcctgcagcatgagcgcccccagcgcgacccccatcttcgcgcccggcgagaactgcagccccgcgtggggggcggcgcccgcggcctacgacgcagcggacacgcacctgcgcatcctgggcaagccggtgatggagcgctgggagaccccctatatgcacgcgctggccgccgccgcctcctccaaagggggccgggtcctggaggtgggctttggcatggccatcgcagcgtcaaaggtgcaggaggcgcccattgatgagcattggatcatcgagtgcaatgacggcgtcttccagcggctccgggactgggccccacggcagacacacaaggtcatccccttgaaaggcctgtgggaggatgtggcacccaccctgcctgacggtcactttgatgggatcctgtacgacacgtacccactctcggaggagacctggcacacacaccagttcaacttcatcaagaaccacgcctttcgcctgctgaagccggggggcgtcctcacctactgcaacctcacctcctggggggagctgatgaagtccaagtactcagacatcaccatcatgtttgaggtgcgcccacctgaagttccccatgggtctccaggaagtgaccttggatgggggtgggaaggggctgctggagccaccttgctacctggggagggtcccttcctgaccccctgggtgggctggactgtgctggttcatttagaaatcaaagtcctttgcctggcgcagtggctgccaggagcagtggctcaggtctataatcccagcactgtggaaggccgaggtgggcagattgcttgagcctaggagttcaagaccagcctgggctacagagcaagacctcatctttcctaaaaaaaaaaaatacaaaaaa

SEQ ID NO: 1267 - DNA, 6311 bp, Homo sapiens
ctccttccctccctccctcccccgctgtcctggcccgccctgcccggcccgccctgcgagtcagttcgctggttccctccctccctgggcgcgctcgggccgccgccgcgctccccgccctcgagcctcggtgccggagccgcccgccgccggaggaggaggtggagggagccggaggggcccgccgaggcggcggcggcggcggcaagatggcggacttcctgccgtcgcggtccgtgctgtccgtgtgcttccccggctgcctgctgacgagtggcgaggccgagcagcaacgcaagtccaaggagatcgacaaatgcctgtctcgggaaaagacctatgtgaagcggctggtgaagatcctgctgctgggcgcgggcgagagcggcaagtccaccttcctgaagcagatgcggatcatccacgggcaggacttcgaccagcgcgcgcgcgaggagttccgccccaccatctacagcaacgtgatcaaaggtatgagggtgctggttgatgctcgagagaagcttcatattccctggggagacaactcaaaccaacaacatggagataagatgatgtcgtttgatacccgggcccccatggcagcccaaggaatggtggaaacaagggttttcttacaatatcttcctgctataagagcattatgggcagacagcggcatacagaatgcctatgaccggcgtcgagaatttcaactgggtgaatctgtaaaatatttcctggataacttggataaacttggagaaccagattatattccatcacaacaagatattctgcttgccagaagacccaccaaaggcatccatgaatacgactttgaaataaaaaatgttcctttcaaaatggttgatgtaggtggtcagagatcagaaaggaaacgttggtttgaatgtttcgacagtgtgacatcaatacttttccttgtttcctcaagtgaatttgaccaggtgcttatggaagatcgactgaccaatcgccttacagagtctctgaacatttttgaaacaatcgtcaataaccgggttttcagcaatgtctccataattctgttcttaaacaagacagacttgcttgaggagaaggtgcaaattgtgagcatcaaagactatttcctagaatttgaaggggatccccactgcttaagagacgtccaaaaattcctggtggaatgtttccggaacaaacgccgggaccagcaacagaagcccttataccaccacttcaccactgctatcaacacggagaacatccgccttgttttccgtgacgtgaaggatactattctgcatgacaacctcaagcagcttatgctacagtgatgtacaaaagacttgctgttttaatatctttttgtgtttttgatgttttctgtttgttttgttttttaaaatagcagtttacaaccagaattagaacaatcttaattctacgtttaacttcttgaaaatcttagtactttttctgcggcctttggtttgtggctgaaagctgttgagtgactcatcgccaagatttgctgtaatgcaggctttgatctgtttcaccatggcttctattcaagtccagttaaaacctcccagctgacctcagactaggcatatttcaggctttaaattattctactttccaaactgaattctcctgcagtgccaagtatcaaaggtgtccttaaatacttgtagggatgaggttaggaatattcagttccaaaacaagatatcttctgtccgccttacatatagcagtgacacttgttgcctaactttatggtgacctcctattttgtaagggctgttagaagttctatctaagaaatggcattctgtaggtttatagaaggtttagccttcatattttaattgcttgtatacacaacagctgttttgcttttagatttctgtgtttctgaaggtaatgttcttcctgttttcaagtttacataaggatctttggtctgatgctgatgaagagttcacaggtggtatgggagagcaaaaggcaagctaatgctgtttaccgtgttttggtcaaacgtaacgagtgaaatagaatttgcctttctcatatttaattatcatgtagtttaatgtaccatatgtgaaacattctggccatagcagcaactaaaaactgcaagcaacttggtaacagaactttctaaataaacttaacctgttccagaatgtcatgtatttgacttttaagccctatctcagttggtcagtaaagaccaatccttactgtaggaaatcattgttgtatcatcacaaacatctatcttttgctgtcctgtccagtcccatcaactccacactgtgccatttgtggcatcgttttgtttatttggagtttgctaagggcagtatttttctgtcaagactattcaagaaggcattatttgagattcctgttcattcttggtgtgtctctaacagatacagtatgtatacatttgtataattgttgttgttgaaagtccagcttttttgaggtatattttaaatgttttaaggatgcttctaaggatcagtagtaatttttttagttcgcacctaaagatgattacattgacctcccccgactgcttaccaaattaaaatgtgtccacgaagtagctttgtgatcgcagatacattcatagtgaactcatcagaatggctggtttgcagtactgaaatactatcttctaggctgtatgtagtgctacaattagagaaacagaagtccaaggctggcgacagcttgaaaagtctgacagcttttctacttttcctgaaaattttaagactgtgatatctgtcattttactgtatagctgactgtgtactcaggtattttattggtccttgaaagattggtcgttatggatcacccagcctttccaagtcagtggctgttgttctgtcttgctgtctgatacgagagtggggcttttcagtgaactaaccagggattgttcttgacatacctgacttttctcacatttgaacttccactatcattgtatccatataacttctagcattttcatgccatggtaatccatgagctacacatacgtagcccggcaccgtgatgcaagttcatggtatcgtgcatgttcgtggtatcatggtatcattcatgcgtgtttgaatagttctacatctagtgcttcttgccaaaaagaatacattgtttaaattcacaaaattagcataattgcagtgctaatgaatatcggaatatgtgcacagtaacatttggactattcattggagagtttacccatacatttagcaaattgaatggccaaaacatttgactccagtgagggctcaagttagatccctatagaaagaggacacttcatcttacttaagtcatagttaagatctgtgatacgaaccatagatattgcctgacaaagcagaaatcaccaagtttcccccttttgaattaccaccaagaagtgttgaaacaccaaatagatatcatgttattttgggcatttgcagttttcttccctgctgcatgtaatgtctcagaatcaacattcttttaaaatctagactatattttgaggcaatgaattacttatattcaacttaggcttgttttgacattcagtagaactttaagttcaatctaaaggcttcagtccacatttttttatacgttgtattttaaaaacgtttgaaaggagtcttacacctgtatcatgaaaactgaatccttttgaaataccactatatgaagagagagatgaaatttagtgaacagaattgaaaaggtgctcataatttcactatgcaaacttaccccagtctctaaaaaagtaatttagatttaaagttctttgatgtatttgattttctaaatctttatggttatgatttggaataaaatgtgcctaatcctgtgttacattctgttcttaaatctgaatgccttctcatttaattctgaggaaatatcacacaagtgtcttcattgaccttgaagaaatgtatatacagttgccttataaaacaacataaatttagaccataacttttatagagaaagggttttgtcaaatgttttctgaaaatctgagtaattcaaagcatgcctctgcccctttaatatttttaataacctgcattgttgctgtctgccaaatattaaattgaaatcttcatttcaattttattatctggaaagggcactggattgctctgcaaccaaagaaagcaatatggaatgaaaaaactcattcacttttgtcttattttcttttaaggtgtattggcatgtaatttgcatagagaaggtcctctggttagtctctcaaattgaggctgtttagggaaatccttattcagttggtggcagtggttggtttaaagtagaaggaaataagatcgccttaataccagaaatgattagaagtgctgatttagattcaacaaataccatatgtccttatcattttttgtaagaagaaattggttaagtcctaactttcaatgtgtacccaaatacttgtatttatgcttttgataaaatgtattttcagcattaatacacatccgattatgccttatttatatatgaagaataaagttaccatgttatactgttatgtcctaaaattcaaatcactatttgagaaaccctcaaattggtgctttcattatataatgatacatttagacaaaaccccaaactaagccatttgaaacaagattctctccattgcagtttgtagcaatgttatttctgtgtatgtcatgagaaggctaaatatcagtgttaatttcttgtttgaatccgtgaaatcatgcctgtaaagcccaaacatttgtaacaaactccctaataaatttagagaaagtcactctgttaccatttcatttattttagttttatttgagaaattaagaccagaagttttgctcatgtctttttcacttggaaatctgacttagtacctagttaatttgtctctctcccatcattttaaggcgttcgcttctgttaatcacagatgatctgtccttgtgttgtgctgcttgactaaaagcactgttttgttttgttttgttttgttttttaatgataggatacagggtggcttttcagtctagtaaacatgaggaggggagagattgtgggtgggtgtgggtgtgtccgcatgtcccaaatacagcacatgcccatttttttatggtacgaggttagggcttattaataaatgtatactagatcttgaagtgtaagtctaagtctgaacattttaaacaagttggactttatggctttttcaagttccatcaagtagatactagtcttaggctggtaggtgattaacaacatcatttggagtacagtgtttgtaccactagcattcttatgtctgtacttgaacgtgtagttagcatttaagttatgttcactcttgtagcattcaggtcttaccatctggtttcaaatgcgagagcttatatgaacattgttttgaaagcatgaatgatatggcaatattttatgtcttgataaggagagttttgtgacatatacaaatctgctgttgatgatgaaagtttacaggtggatcagagtatgctggaactcagtgtgcataaaatttcagtcagtgaatatcactgaacgtcatatactacttggtatgtgactttggtttgtgttaagaaagcttgtatataatattttttgccatagtaagtgagaaattgtccttaatcatgcctgtttgatggtactaggaaagaaaggggtagagattaattcttgcacagtataagcaacagtgcaacaaactatgccatttaccttttacctcttacttgaaggcagaatcgcaaaacgtttgaaatggcttttctaaactactctactctggtgagagctcatttaccacaagaagccttataaaaaagtatattttgtaataaccccgtagatactgtacctaacaaaacatgactcgtattagctctataaaatatttgtggcttaggattttttttttacatatatctttttataactttccaggaactaagcacattatctgataattgttgtaaatttttttgtcagtgctttagttcaggatgggcaataaattatttctaaaggaggtctaaaagtggaaagaatggtttgattttataaaatgagttgctagttcattacagctttttacttttgtacatattttgcaaaacatttgcctcttgctattaatatttgctttgtaaaaattactgacatttaataaacatttgtaaacaattcaa

SEQ ID NO: 1268 - DNA, 678 bp, Homo sapiens
aggaaaaggaaactgttgagaaaccgaaactactggggaaagggagggctcactgagaaccatcccagtaacccgaccgccgctggtcttcgctggacaccatgaatcacactgtccaaaccttcttctctcctgtcaacagtggccagccccccaactatgagatgctcaaggaggagcacgaggtggctgtgctgggggcgccccacaaccctgctcccccgacgtccaccgtgatccacatccgcagcgagacctccgtgcccgaccatgtcgtctggtccctgttcaacaccctcttcatgaacccctgctgcctgggcttcatagcattcgcctactccgtgaagtctagggacaggaagatggttggcgacgtgaccggggcccaggcctatgcctccaccgccaagtgcctgaacatctgggccctgattctgggcatcctcatgaccattctgctcatcgtcatcccagtgctgatcttccaggcctatggatagatcaggaggcatcactgaggccaggagctctgcccatgacctgtatcccacgtactccaacttccattcctcgccctgcccccggagccgagtcctgtatcagccctttatcctcacacgcttttctacaatggcattcaataaagtgcacgtgtttctggtgctaaaaaaaaaa

SEQ ID NO: 1269 - DNA, 3151 bp, Homo sapiens
agtaagttccagcgcagctagaccgcggggtagtcggcgcgaggcggagcttggcagttccgtccacttcagccgcagcgtccctcgccgggtgtctcgccgcagcctccggagaggaacagaccctcactctctctgtcagaaaaatgtctgctccagctcagccacctgctgaagggacagaagggactgccccaggtgggggtccccctggccctcctcctaacatgaccagtaacagacgactacagcaaacccaggcacaagtggaggaggtggtggacatcatacgtgtgaacgtggacaaggtcctggagagggaccagaagctgtcagagctggatgaccgagctgatgccttgcaggcaggagcatcacaatttgagagcagtgctgccaagctaaagaggaagtattggtggaaaaactgcaagatgatgatcatgctgggagccatctgtgccatcatcgtggtagttattgtaagtaagtatcgctgaagttgctggtggggtgaagaggtgggaaggtcctggagtcttctccctgcctgcctgcctgcctggggagtggggctgctctgactgaggtatggagaccgctgctatgggatcgtcacctggttcgggacgggggaagggcagagacaagggatttctttgatggacaagccttccccctgcaacgcattgcagggagatggcgcctcctgttctgaggaagtggggctatgctgtgtgtcactggcttgggttggagggagaccatggggatggggcacttaacaatggagagacctgaatgtctggtaacttggtgtaattcaccctcttgttttctcctgtctctttctcttttccgtctgggacttcctgattcctgtgtccagtctacttttttacttgagaatgtaccaccccttccctgttgtccattgccatccacattcatgtcctctgccctctgtttgctctctcaacacacttccccacccaccgtcctccattccagcccaggcttctccatcacccattcctcctttttcgttgcgttcatttgcactctgtccctcaacactagaaatgctgctcgtggcacaatctaagtcattacccgaagagcaacagctggcgcctcctccctgcctgctttttctgtactctcaagttcccccaaagccccaaagagttggaggccaagggaaggggcagggaggggagtggctgaggcgaagtacccatgaagctgcccagacttgggaggagaagagtatcggtgcccatggtgacttctagaaaacctggccactggtaggagctagggaggggctgggaagatggcagctcactcagtactgcctggtcatgtggagctttccttcctggaccaggcctggagagggtcctgggggtggaccaaagtccaacttggtttcagtgcagtacccttttcgaaagtaaaaacttgttttttgtagttatttctaatctgttcgtccaggattttccgtgtctttggggatcttacaactttactttgttctccagaggcctggagaacacttagggattgtgaaaatagcaggacttgtttccatcctagaagcagtcccatgtgcttctagctggaaggagctttctcttctttacattttctacagcattctgtatgagggcaccaaataaatccatctagctggtagttttatctagccaaataatttaacctagctcccagttaattgttggcataaagagagagattgcctgttagttatagagaaacagtgagtcaagtgcttaatttgaaagtaacaagctcagaggaagccactccttgccctcgttaaagagggtcctgttcctctcttcctgttgatgaaggagcgtgagggtgttagcagtgtgagatctttggacacccatggaatcctttcctccacaccacccgtgcacttgccaaagacagggatgaggcaagtggttcttcctggggcccggccgatcctcaggatgcagagaagtcatgtagacccaccagccccaccttggggggaggcgtgccagcctgtgtcaggtgtgcttgtgtattgctgtgctgtcatggggccctctccttgagagccgcctctctgttcttcctgtagtatattcccctttgaaccaccctttcctgtctgaattctactttgcctcctttctcttcctcctctttgcatggtttgtgtgtatagacagtggaacctgaggatgggatctgctcagcctatcttcggggcaattgctgagcttcaggatgggctattaatgtgggataagcccaggtgcaaggggaggagggcaggctgggaacagagcggagaatgcccatggccctttattccttcttccctcggtccacgaacaggaagaggctgaggccatgctgggcagggtctggatgcccactttccatgcagcagcatttcattgctcaaaaccatccttcctttcctttcgcccttgtttcccacattcccttcgtcctgcccaagggcgggactgaagagctggaagaaagcagtcagtaccctcccaacggcccccctcgaaggtctccactctcctctgggctcctccttgcctaatgcagggggtcaccgctggagaagaaccaccactgtcctcgatgtgtcccaagcctggagcgaatccgtcctcttggctctcccagccctatcacaggaatcattcctgggtttctgtccctctgaggctcaccaggtgtagttggccttgttctttgggggtattagcccttctactttctttctcacccaccctgtaccctcttctgtgtgtctctgctatccccctttcctcccaccacccatgtgcatgagcaaatgtgcaacaaaaccctgggactttgcagtcaaatgaagctgagcttcccacatcccgttcttcggtttgccatgagacgatgtggggtttccactgtgtgtctgtcatcacctctttgtctttttttcctaaccctgatctcatacttgtatagagtaataacaacagttgtacttccaccaaaggcatgtggcatatttaccaatgtcatgtattctgaacaaaggcaaaaaatacaaattcctaccattaaaaaaaaaaaaaaa

SEQ ID NO: 1270 - DNA, 3512 bp, Homo sapiens
gccaagggaaactgccgcgaggaggcggaaggagcagaggaccggcagccggcgtcgaggcggggcgcgggaacgacggcggccatggcggcctcggggcccgggtgtcgcagctggtgcttgtgtcccgaggtgccatccgccaccttcttcactgcgctgctctcgctgctggtttccgggcctcgcctgttcctgctgcagcagcccctggcgccctcgggcctcacgctgaagtccgaggcccttcgcaactggcaagtttacaggctggtaacctacatctttgtctacgagaatcccatctccctgctctgcggcgctatcatcatctggcgctttgctggcaatttcgagagaaccgtgggcaccgtccgccactgcttcttcaccgtgatcttcgccatcttctccgctatcatcttcctgtcattcgaggctgtgtcatcactgtcaaagctgggggaagtggaggatgccagaggtttcaccccagtggcctttgccatgctgggagtcaccaccgtccgttctcggatgaggcgggccctggtgtttggcatggttgtgccctcagtcctggttccgtggctcctgctgggtgcctcgtggctcattccccagacctctttcctcagtaatgtctgcgggctgtccatcgggctggcctatggcctcacctactgctattccatcgacctctcagagcgagtggcactgaagctcgatcagaccttccccttcagcctgatgaggaggatatccgtgttcaagtacgtctcagggtcttcagccgagaggagggcagcccagagccggaaactgaacccggtgcctggctcctaccccacacagagctgccaccctcacctgtccccaagccaccctgtgtcccagacgcagcacgccagtggtcagaagctggcctcctggccctcctgcacccccgggcacatgcccaccttgcctccgtaccagcctgcctccggcctgtgctatgtgcagaaccactttggtccaaaccccacctcctccagtgtctacccagcttctgcgggcacctccctgggcatccagccccccacgcctgtgaacagccctggcacggtgtattctggggccttgggcacaccaggggctgcaggctccaaggagtcctccagggtccccatgccctgagagaatttctagggaagtcatctcacttggccttctgaaggtcctccctaagagtctcctgacaaaagttacttattgaacacctctatgtgccaggctctgtgttgggtactttgatcaatgcccctgtttcagtctcatctgtactcacggcagccctgtggagtacggtgtactggcccagcttacagatgcagaaagcgagacgttctgccatcagataaagtcacgtggctctttagtaacacggacaaggctcctcgccaaggaactcgtggcagaagagggcagcagttggcagtagctgccgatgtctgtccccagctccaccattcctccctgtggctgtgccgtgctcgtggtttcagtgtccgtgtgtccatgtgtctgcccttcaggagctcgcagctggtgtgcttggcggtcccaggcctgtgtagtgtctctcccctgctgcgggcgcccccaccccgattcctctccccagaagcggtgggatgggcccccatgaactgcagcagcatgctgaggtgtccatgttgtctgcctttgtataaagaaacagcctctgacctgcgccaagggaaactgccgcgaggaggcggaaggagcagaggaccggcagccggcgtcgaggcggggcgcgggaacgacggcggccatggcggcctcggggcccgggtgtcgcagctggtgcttgtgtcccgaggtgccatccgccaccttcttcactgcgctgctctcgctgctggtttccgggcctcgcctgttcctgctgcagcagcccctggcgccctcgggcctcacgctgaagtccgaggcccttcgcaactggcaagtttacaggctggtaacctacatctttgtctacgagaatcccatctccctgctctgcggcgctatcatcatctggcgctttgctggcaatttcgagagaaccgtgggcaccgtccgccactgcttcttcaccgtgatcttcgccatcttctccgctatcatcttcctgtcattcgaggctgtgtcatcactgtcaaagctgggggaagtggaggatgccagaggtttcaccccagtggcctttgccatgctgggagtcaccaccgtccgttctcggatgaggcgggccctggtgtttggcatggttgtgccctcagtcctggttccgtggctcctgctgggtgcctcgtggctcattccccagacctctttcctcagtaatgtctgcgggctgtccatcgggctggcctatggcctcacctactgctattccatcgacctctcagagcgagtggcactgaagctcgatcagaccttccccttcagcctgatgaggaggatatccgtgttcaagtacgtctcagggtcttcagccgagaggagggcagcccagagccggaaactgaacccggtgcctggctcctaccccacacagagctgccaccctcacctgtccccaagccaccctgtgtcccagacgcagcacgccagtggtcagaagctggcctcctggccctcctgcacccccgggcacatgcccaccttgcctccgtaccagcctgcctccggcctgtgctatgtgcagaaccactttggtccaaaccccacctcctccagtgtctacccagcttctgcgggcacctccctgggcatccagccccccacgcctgtgaacagccctggcacggtgtattctggggccttgggcacaccaggggctgcaggctccaaggagtcctccagggtccccatgccctgagagaatttctagggaagtcatctcacttggccttctgaaggtcctccctaagagtctcctgacaaaagttacttattgaacacctctatgtgccaggctctgtgttgggtactttgatcaatgcccctgtttcagtctcatctgtactcacggcagccctgtggagtacggtgtactggcccagcttacagatgcagaaagcgagacgttctgccatcagataaagtcacgtggctctttagtaacacggacaaggctcctcgccaaggaactcgtggcagaagagggcagcagttggcagtagctgccgatgtctgtccccagctccaccattcctccctgtggctgtgccgtgctcgtggtttcagtgtccgtgtgtccatgtgtctgcccttcaggagctcgcagctggtgtgcttggcggtcccaggcctgtgtagtgtctctcccctgctgcgggcgcccccaccccgattcctctccccagaagcggtgggatgggcccccatgaactgcagcagcatgctgaggtgtccatgttgtctgcctttgtataaagaaacagcctctgacctgc

SEQ ID NO: 1271 - DNA, 2203 bp, Homo sapiens
gtgggaaggggacgcgcgccctgcggcccggcctctagtcatcgccctcgcagcggcggccaacatcaccgccactgccacccctcccagactgtggacgggaggatggagtcgatggccgtcgctaccgacggcggggagaggccgggggtcccagcgggctcaggtctgtcggcttcccagcgtcgggcggagctgcgtcggagaaagctgctcatgaactcggaacagcgcatcaaccggatcatgggctttcacaggcccgggagcggcgcggaagaagaaagtcaaacaaaatcaaagcagcaggacagtgataaactgaactccctcagcgttccttccgtttcaaagcgagtagtgctgggtgattcagtcagtacaggaacaactgaccagcagggtggtgtggccgaggtaaaggggacccaactgggagacaaattggactcgttcattaaaccacctgagtgcagtagtgatgtcaaccttgagctccggcagcggaacagaggggacctgacagcggactcggtccagaggggttcccgccatggcctagagcagtacctttccagattcgaagaagcaatgaagctaaggaaacagctgattagtgaaaaacccagtcaagaggatggaaatacaacagaagaatttgactcttttcgaatatttagattggtgggatgtgctcttcttgctcttggagtcagagcttttgtttgcaaatacttgtccatatttgctccatttcttactttacaacttgcgtacatgggattatacaaatattttcccaagagtgaaaagaagataaagacaacagtactaacagctgcacttctattgtcgggaattcctgccgaagtgataaatcgatcaatggatacctatagcaaaatgggcgaagtcttcacagatctctgtgtctactttttcacttttatcttttgtcatgaactgcttgattattggggctctgaagtaccatgaagcctgtagaactgagaaggagaagcttacaaaaaaaaaaaaatcctcttctatattgcagtgtctctaaaggaggcaaattggtttacaccttcatgtaattcttttactttaggggttgtaaagctactttattagatatagaatggcagattctctgatttaaaagggctgagtttgtattattactgatatgaagaatagagtaccaatgtcattaattgatttttcttgttaatcagaattcctattctgtacctttcctctaacttctcagatttgtaattcttcttttgggagctgagctagtgcttttaggagaacagataaatgtggtctcagccagccctagagactgcttcttgtgtttgtgtcattctgtcctgagaaatgaagtcatctgaaaaataaaatgaaagaaactgaattgtctaatgttaactctgcacattgtaacttttcttgttgagttagtatcttaatttttactccagcacaagtatttaatcaaagaaaagattcatacatgtgaaattggaaggtatttataaaatttttattgctgtataccaaactcagaattggaactttttacatttgagtttcactttttagaagtatgttttaagcaagcaaaaacaaaatgggatgtgaagaattgaggcatgcaacccaatagcataaatgtcctttttccccccaaatatggtctagatgagttattataaacattgtttttatttttttgagacagagtttcgctcttgttgcccaggctagagtgcaatggcgccatctcggctcaccgcaacctccaccttcctggttcaagggattctcctgcctcagcctcccaagtagctgggattacaggcatgcaccaccacgcccagctaatttttatattctttagtaaagacagggtttctccatgttggtcaggctggtctcgaacttctgacctcaggtgatctgcccacctcggcctcccaaagtgctgggattacaggcgtgagccactgcacctggccttataaatatccttttaactaactcagtaactgccatattttgttgggttgtcttcttaaaagaatataagactaaagtgttaatgtcacttggtgttacatttccttacagatttttgtatagtctaatttggttaatccttgtgacattaaaaacacatacactttttaaaaaa

SEQ ID NO: 1272 - DNA, 5415 bp, Homo sapiens
attggctaggccagggcgcctgcgcggcggggttctcggtcgccagccattcctgaggaggactgccggtcgttcggacgtcttgcctgtcgctggaggagaggtccgggctctccaggaaggtggctgcggcgacaaaatgaagatattcgtgggcaacgtcgacggggcggatacgactccggaggagctggcagccctctttgcgccctacggcacggtcatgagctgcgccgtcatgaaacagttcgccttcgtgcacatgcgcgagaacgcgggcgcgctgcgcgccatcgaagccctgcacggccacgagctgcggccggggcgcgcgctcgtggtggagatgtcgcgcccaaggcctcttaatacttggaagattttcgtgggcaatgtgtcggctgcatgcacgagccaggaactgcgcagcctcttcgagcgccgcggacgcgtcatcgagtgtgacgtggtgaaagactacgcgtttgttcacatggagaaggaagcagatgccaaagccgcaatcgcgcagctcaacggcaaagaagtgaagggcaagcgcatcaacgtggaactctccaccaagggtcagaagaaggggcctggcctggctgtccagtctggggacaagaccaagaaaccaggggctggggatacggccttccctggaactggtggcttctctgccaccttcgactaccagcaggcttttggcaacagcactggtggctttgatgggcaagcccgtcagcccacaccacccttctttggtcgcgaccgcagccctctgcgccgttcacctccccgagcctcttatgtggctcctctgacggcccagccagctacctaccgggcccagccgtccgtgtcactgggagctgcctacagggcccagccttctgcctctttgggtgttggctatcggactcagcccatgacagcccaggcagcctcttaccgcgctcagccctctgtctcccttggggcaccatacaggggccagctggctagtcctagctcccagtctgctgcagcttcttcactcggcccatatggtggagcccagccctcagcctcggccctttcctcctatgggggtcaggcagctgcagcttcttcgctcaactcctatggggctcagggttcctcccttgcctcctatggtaaccagccatcctcttacggcgcccaggctgcctcttcctatggggttcgtgcagctgcttcttcctacaacacccagggagcagcttcctccttaggctcctacggggctcaggcagcctcctatggggcccagtctgcagcctcctcactagcttatggagcccaggcagcttcatataatgcccagccctcggcctcttacaatgcccagtctgccccatatgctgcacagcaggctgcttcctactcttcccaacctgctgcctatgtggcacagccagccacagctgctgcctatgccagccagccagcagcctacgccgcacaagccactaccccaatggctggctcctatggggcccagccggttgtgcagacccagctgaatagttacggggcccaagcatcaatgggcctttcaggctcctatggggctcagtcggctgctgcggccactggctcctatggtgccgcagcagcctacggggcccaaccttctgccaccctggcagctccttaccgcactcagtcatcagcctcattggctgcttcctatgctgcccagcagcatccccaggctgctgcctcctaccgcggccagccaggcaatgcctacgatggggcaggtcagccgtctgcagcctacctgtccatgtcccagggggccgttgccaacgccaacagcaccccgccgccctatgagcgtacccgcctctccccaccccgggccagctacgacgatccctacaaaaaggctgtcgccatgtcgaaaaggtatggttccgaccggcgtttagccgagctctctgattaccgccgtttatcagagtcgcagctttcgttccgccgctcgccgacaaagtcctcgctggattaccgtcgcctgcccgatgcccattccgattacgcacgctattcgggctcctataatgattacctgcgggcggctcagatgcactctggctaccagcgccgcatgtagggccatcctgggatggggcaccacagggagggagggagaaaagaggtgggtagggttacagatccaggttataactactctggcccatacctttcctggttgtggtttttcatgccctctaccatgtgggccttccccaggagatgatcctgttaagtgttcggcagtaacctactttgttccttcgcctcagcagcaaatcttgctactggctctagatctgcggtttcccctctaccctgcctcccgtctccccagaatgggaatttcttttatgtttttatttttttcctggctcccttttatttttgtgcgcgatatttaaggtcgtctggatggggaagcaacctgcagctgaggtcgccggcgcctttttctttttagatgggaaggaggccaggaaagggtcagcttaaccatttcctatgtgccaagctgtgccagcagtccagggtaccctgactgtccctctgtagactgttgagactgagttcctgttgggacagtcagttggtatgtatccaagtccctgctgaccactaatgttctagctgatggtgagcggcacagtcccacttccccatctccccaagtaggtggtgttagaaaaccttaattttttttcccttttgtatggactacaaataaaacttggggcaatttgcagtttggaaacctggttgtcattgtcttgattgcattcagtgtcaaaggagccaatttgacatccaggaagacatgatagctaaagggaaggcagtcagagaacccaggactggtgaggaaaggggtttgaatgtcggaattagaaggattgccctgtggcccagaaggatttagctcatcgtcgtcctgctagcctgccatctttcagactttccagggcaggtggcctggtcctcagccctcaacttgagttagtcacaccaaaatgcagtaaatgatgcccattttcctctgcctgtgcttgaccattttcactgacttttctccagttcaggaataacctgtgttccaatgggatggttctggggtttggcctcttaggaagtggggaatgggctgctgtggtatttacaggctagtagatcctttaggcagtaggctggaatgagtgctggggctgggacccagaaaggaaccagtagtggagtgggggtaatggcgttgcctgatactgccctatggttggaataaggaagggcagagaaaacttgaagcaggtatggggcattctggccatagagctcgtattttgcctgttgagctgtaccatggagcatcctcctgtgtcctgccaacccctgccattatagtcaccggagactcctttacctatccctatctgttagggttttcagatgtcctctcgctgggtttatatttgaaggtatagaatctgggaaagggtggggtgcaagctaaccaaatagggatgctagggttgggtggggaattgaggactcttctgtgcttttattgtagggctggggatcgaggatctgggcaaaaaatatgacatttccaaccagggacaaaatggaggcttgggcttagtgatgggtaaatggaagactggttgagtgggatgataatgggagaacttactgatgctcttttgggaaaaggtgctttaaagactcgatttgggagcctactggggcaaggcgactggggaggtgtacgtgttagtcaagtggaggtcaggtgggttatcttctgcctccttcactggcttcatgtgaacttgcctgtgacagaatatcttgccctagatgtcctcttccctcttgccatcgtgcaaaagcattcgatcttatgaccgtgagttcttatttgtggatgctaactggggtaatctcagggagtactggggccatggctctttcccttgcttctctttctgctcactgctttgctttcaggtgcttagctgctcctttttatttctttgcaggactgggaaagcatgggaggaggattttgataagtttcttgttctctgcgtggtgatggggtggtctgagggccaagttaataagcctacctttggttattaccctggaaaattgagggttgatggtagggttatgattgtggcctgtgtatttgcaatttttctttgtcagtgtggctttctgtcatcttcctttttctccagtgagggttctgccactgtctcaatcccttggttcctgcaaaaaacagctaaatgtgctctcagggccagtggtgatgttctgtgttgcagccccagctcttgaaagtgacctggcccagatgagctctgcctgcttgtcatctttaggtcctgctgcccctgctgcctcagccctcaggctcctaactgctcaagccagaaggagctacaaagccaaatcatttgtcatttttctctggcagattgttttaaaatctccctcccctcttttattttaattatgccacctgtgttaatcctatagcctgcttctttgctttgtggattactgatttcaagttctataacttggggaaagttaggttgagtgaatgggaggacagacactgaatgtgtgttttggaaaaatggactctctatcttcagattattcagcttctccacctatcacctctacaacttggccttcattggagaagttttagttggcttattcctggaacaagaccacctagaggcttttagccttgtcagcctgccctcttctgaggtttggaccttgttttaaattgtgtgcatggtgggcttgagactctcttgtaatggaggtaatgggactatcactgaggggttcagcctatccaggtaggctaccgttctagtcatacccatcacttaaattctgccacagtctgcacagacggttggtcctccaggcatattgtcctattaagccaaataggtggacatcatgggatggatgaggtcatcatgaaaacagatttactggatttatggacctagtatatactatgtaacagatggaaaactgaattttacaatctataggtacctttgaaaggtcataaagggtaaaagtctatagttttccagaaaataattcttaaaactgggttttatgtctagatttaaatcatgtatctgtctgtagtgcttcaaatgtggccaggtgtggtagctcacacctgtaattcccagcgctttgggaatttgaggcaagaggattgctagaggccaggattttgagaccagcttcggcaatacggtgagaccttgtctctaccaaaagaaaagaaaaaaaaaa

SEQ ID NO: 1273 - DNA, 2688 bp, Homo sapiens; identical to SEQ ID NO: 959

SEQ ID NO: 1274 - DNA, 1313 bp, Homo sapiens
ggagttgagaaactgtggcacaaggcgagagctggtttcctctgccctgttagagctgggggactcttcagagtcaaaggccagagagcatggagctgagtggagccaccatggcccgggggctcgctgtcctgctagtcttgttcctgcatatcaagaacctgcctgcccaggctgcggacacatgtccagaggtgaaggtggtgggcctggagggctctgacaagctcaccattctccgaggctgcccggggctgcccggggccccagggccaaagggagaggcaggtgtcattggagagagaggagaacgcggtctccctggagcccctggaaaggcaggaccagtggggcccaaaggagaccgaggagagaaggggatgcgtggagagaaaggagacgctgggcagtctcagtcgtgtgcgacaggcccacgcaactgcaaggacctgctagaccgggggtatttcctgagcggctggcacaccatctacctgcccgactgccggcccctgactgtgctctgtgacatggacacggacggagggggctggaccgttttccagcggaggatggatggctctgtggacttctatcgggactgggccgcatacaagcagggcttcggcagtcagctgggggagttctggctggggaatgacaacatccacgccctgactgcccagggaagcagcgagctccgtgtagacctggtggactttgagggcaaccaccagtttgctaagtacaaatcattcaaggtggctgacgaggcagagaagtacaagctggtactgggagcctttgtcgggggcagtgcgggtaattctctaacgggccacaacaacaacttcttctccaccaaagaccaagacaatgatgtgagttcttcgaattgtgctgagaagttccaaggagcctggtggtacgccgactgtcatgcttcaaacctcaatggtctctacctcatgggaccccatgagagctatgccaatggtatcaactggagtgcggcgaaggggtacaaatatagctacaaggtgtcagagatgaaggtgcggcccgcctagacgggccaggacccctccacatgcacctgctagtggggaggccacacccacaagcgctgcgtcgtggaagtcaccccatttccccagccagacacactcccatgacgcccacagctgcccctttgcccccagctcagtcaagccgccacatgcccacaacctcaccagagggagaattatgtttctaaatatgtttactttgggacagaaaagaaaaaaaaaaaaaaaaaaaaaaaaaaaaaa

SEQ ID NO: 1275 - DNA, 2993 bp, Homo sapiens
acggatttccgcctccctcacagaaggcagtcactgcaacgtgcgtggcctcagttgcgtcatatccggcccttgcgatcagggcttgaggaacccgcgccatgaagtgcgtgtttgttaccgtagggaccaccagctttgacgacctcattgcgtgtgtgtcggcgcccgacagtctgcaaaaaatcgagagccttggttacaaccgacttatcctgcaaattggtagaggaacggtggtacctgaacccttcagtactgagtcgtttactctggatgtttacaggtacaaggattccttgaaagaagacattcagaaagcagatcttgttattagtcacgcaggtgcaggaagctgtttggagactctggaaaaaggaaagccactcgtagtggttataaacgaaaagttgatgaacaatcatcagctggaactggcaaagcagctacacaaagagggtcatctcttctattgtacctgcagcacgcttcctgggctgttacagtcaatggacttatcaacactgaaatgttatcctcctggccagccagaaaaattttctgcatttttggataaagttgttggattacaaaaataaacactaaactctcaacactttaaaagcaacccccaaattcaacctatgtaatgtgattaaatcaaattaaatacataatatatatttacaaaataatataattaataaacttcctacatctatagaatgtataggaaattttatgttgtgcacatttgcattgggtccaaatcctaattgcagtttagtgaaattactagatttttttctaatcttcagtatgtagtgagcattcacaggttttctcctagaatctcaagtggaattggaatcataaaaatgaatgagatttgaaaactttcacaaagattataaatgtagttagtttgatactccttagaataaaaaaatgaaacagtaacaacttttatgtaaaaaaattttacataagagttagcatctttagctttataatctaaggaaccaaatttaaaaaatgatggattatgctctgtgaaatgaaaagttcaatcattgcctaaaaaagatgatcaagttagttgatctcttgtacttggaaaagctacttttttcctaaagaacagagtggagtggatatattcactttttttttctaaaacatacaaagtgataaaataatcgtgcctaatgtcaaaactttactggtttgagaagaataatcaaaaaggacttataccaataggacttactattgttttttaaggatctcctctcacagtggtaatgaaacattaactgtaacagaaatttacaatttatgtgcttataaaattagttttatgaatgaacaataaactgatgcatataatggcttaaatatatggttttaaaattgacttaacttgagcaagatacattatgaagttctttctgattagagtgtgtggtctcaagacctttacagtagattatccttaagtgtccatagctctctggtacaatgtttagatatagtttatctatcaaaatagaacattcactataaagacctctcttccattccaatcatattatcccaacatgctaaatgttccaaacattttatttggaatgcattttatcatgtttttataggtttatttttctgattgtgttttatttaggctaatattaaaaaaatgcttactagtggtagaaggtggtgacaaagaaatactctgggtagcaggaggaagccaacttggattaaaattttgctgagaataatctaaaaagtgagtaatctggttgagaattcacagcaccataatcataattgtatatcaatgttatgttttaggaaaggtcctattcaaatccagggagagaatctttagtgttttctgggccctcataaatacgtttttctcatttgagaaaattgtgactttatgttggtcacttagtttttatagtttatgatgaagaattaaagagaaacaaatgaaaggcaaggtctactcaaatatcagacaactaaaaggctatacagcccctaaatcctttgctatctacttccccagaataatgcataacctaaattccattatttcatttagcagaggtttaagccgttgttgtcaattgtgtgcagtaacgcctctgacttcccttttgtggaattttgtatcgattttggatttttaagtcaaaggagactttaaaatcattttgatttggcacggattcttgagattatctagtccaattccatcatattcagattttaccatttgcttaaagtatagcttttggcagaactgcccctaggagcagctccttgattcccagtcccctgctctttctaccctgcataatatatgttgtaagctttttgtttctttatagttgtttgcctagtgttcattttagttactcgaattccttgcaaggtaggttttgtttgtttatttatggaagttatttagtaggaatttcacacttaactgggttttcctttggcgtatgacaaccttacctaggacttagaaatctgtgatttctgagtttttggaatttaggaaaatgctctgggtaggattgatagtagattgaataaattaagactttaagacagaattgtagacttttggagttgggagataatttaaagaatattttaaaccaccagttttacagatgaggaaacatgctaaattaatcaccacatttacatcttattagtccttattaaagaatggtaaccaaaagtctgtttgaaatgtttgctctatttgtttggtttcattacatgacagagctgcaggttcttgatattaatgagtaagtggaatgcagtttatttagcagtgttctattagaggtactgaaattttcagggataaggaaatgaaagagagtttagcattgggaaatttgcaccatggatagattaagaggtagacagttaatagaacatttacgggttggagt

SEQ ID NO: 1276 - DNA, 2442 bp, Homo sapiens
tacacacatgagagatcacttagagcaaagggtgagaggggcaggtggggctagggtggagaccaaagcactgatgtgacggaaccatcagccaggcaactggacctggtggatccaggaagactttctggaagaggtctctgacccctcccaaggatcatgccgcagccccactgacccaggagtaggggcctaagggcagggaacctggaatgggctgtgtgttctgcaagaaattggagccggtggccacggccaaggaggatgctggcctggaaggggacttcagaagctacggggcagcagaccactatgggcctgaccccactaaggcccggcctgcatcctcatttgcccacatccccaactacagcaacttctcctctcaggccatcaaccctggcttccttgatagtggcaccatcaggggtgtgtcagggattggggtgaccctgttcattgccctgtatgactatgaggctcgaactgaggatgacctcaccttcaccaagggcgagaagttccacatcctgaacaatactgaaggtgactggtgggaggctcggtctctcagctccggaaaaactggctgcattcccagcaactacgtggcccctgttgactcaatccaagctgaagagtggtactttggaaagattgggagaaaggatgcagagaggcagctgctttcaccaggcaacccccagggggcctttctcattcgggaaagcgagaccaccaaaggtgcctactccctgtccatccgggactgggatcagaccagaggcgatcatgtgaagcattacaagatccgcaaactggacatgggcggctactacatcaccacacgggttcagttcaactcggtgcaggagctggtgcagcactacatggaggtgaatgacgggctgtgcaacctgctcatcgcgccctgcaccatcatgaagccgcagacgctgggcctggccaaggacgcctgggagatcagccgcagctccatcacgctggagcgccggctgggcaccggctgcttcggggatgtgtggctgggcacgtggaacggcagcactaaggtggcggtgaagacgctgaagccgggcaccatgtccccgaaggccttcctggaggaggcgcaggtcatgaagctgctgcggcacgacaagctggtgcagctgtacgccgtggtgtcggaggagcccatctacatcgtgaccgagttcatgtgtcacggcagcttgctggattttctcaagaacccagagggccaggatttgaggctgccccaattggtggacatggcagcccaggtagctgagggcatggcctacatggaacgcatgaactacattcaccgcgacctgagggcagccaacatcctggttggggagcggctggcgtgcaagatcgcagactttggcttggcgcgtctcatcaaggacgatgagtacaacccctgccaaggttccaagttccccatcaagtggacagccccagaagctgccctctttggcagattcaccatcaagtcagacgtgtggtcctttgggatcctgctcactgagctcatcaccaagggccgaatcccctacccaggcatgaataaacgggaagtgttggaacaggtggagcagggctaccacatgccgtgccctccaggctgcccagcatccctgtacgaggccatggaacagacctggcgtctggacccggaggagaggcctaccttcgagtacctgcagtccttcctggaggactacttcacctccgctgaaccacagtaccagcccggggatcagacatagcctgtccgggcatcaaccctctctggcggtggccaccagtccttgccaatccccagagctgttcttccaaagcccccaggctggcttagaaccccatagagtcctagcatcaccgaggacgtggctgctctgacaccacctagggcaacctacttgttttacagatggggcaaaaggaggcccagagctgatctctcatccgctctggccccaagcactatttcttccttttccacttaggcccctacatgcctgtagcctttctcactccatccccacccaaagtgctcagaccttgtctagttatttataaaactgtatgtacctccctcacttctctcctatcactgctttcctactctccttttatctcactctagtccaggtgccaagaatttcccttctaccctctattctcttgtgtctgtaagttacaaagtcaggaaaagtcttggctggacccctttcctgctgggtggatgcagtggtccaggactggggtctgggcccaggtttgagggagaaggttgcagagcacttcccacctctctgaatagtgtgtatgtgttggtttattgattctgtaaataagtaaaatgacaatatgaatcctcaaaccatgaaaaaaaaaaaaaaaaaa

SEQ ID NO: 1277 - DNA, 3422 bp, Homo sapiens
ccgccgccgccgccgcctgcgcgcccgcccgcctttcgcggccgctctcccccctccccgacacacactcacaggccgggcattgatggtaatgtatgcgaggaaacagcagagactcagtgatggctgtcacgaccggaggggggactcgcagccttaccaggcacttaagtattcatcgaagagtcaccccagtagcggtgatcacagacatgaaaagatgcgagacgccggagatccttcaccaccaaataaaatgttgcggagatctgatagtcctgaaaacaaatacagtgacagcacaggtcacagtaaggccaaaaatgtgcatactcacagagttagagagagggatggtgggaccagttactctccacaagaaaattcacacaaccacagtgctcttcatagttcaaattcacattcttctaatccaagcaataacccaagcaaaacttcagatgcaccttatgattctgcagatgactggtctgagcatattagctcttctgggaaaaagtactactacaattgtcgaacagaagtttcacaatgggaaaaaccaaaagagtggcttgaaagagaacagagacaaaaagaagcaaacaagatggcagtcaacagcttcccaaaagatagggattacagaagagaggtgatgcaagcaacagccactagtgggtttgccagtggaatggaagacaagcattccagtgatgccagtagtttgctcccacagaatattttgtctcaaacaagcagacacaatgacagagactacagactgccaagagcagagactcacagtagttctacgccagtacagcaccccatcaaaccagtggttcatccaactgctaccccaagcactgttccttctagtccatttacgctacagtctgatcaccagccaaagaaatcatttgatgctaatggagcatctactttatcaaaactgcctacacccacatcttctgtccctgcacagaaaacagaaagaaaagaatctacatcaggagacaaacccgtatcacattcttgcacaactccttccacgtcttctgcctctggactgaaccccacatctgcacctccaacatctgcttcagcggtccctgtttctcctgttccacagtcgccaatacctcccttacttcaggacccaaatcttcttagacaattgcttcctgctttgcaagccacgctgcagcttaataattctaatgtggacatatctaaaataaatgaagttcttacagcagctgtgacacaagcctcactgcagtctataattcataagtttcttactgctggaccatctgctttcaacataacgtctctgatttctcaagctgctcagctctctacacaagcccagccatctaatcagtctccgatgtctttaacatctgatgcgtcatccccaagatcatatgtttctccaagaataagcacacctcaaactaacacagtccctatcaaacctttgatcagtactcctcctgtttcatcacagccaaaggttagtactccagtagttaagcaaggaccagtgtcacagtcagccacacagcagcctgtaactgctgacaagcagcaaggtcatgaacctgtctctcctcgaagtcttcagcgctcaagtagccagagaagtccatcacctggtcccaatcatacttctaatagtagtaatgcatcaaatgcaacagttgtaccacagaattcttctgcccgatccacgtgttcattaacgcctgcactagcagcacacttcagtgaaaatctcataaaacacgttcaaggatggcctgcagatcatgcagagaagcaggcatcaagattacgcgaagaagcgcataacatgggaactattcacatgtccgaaatttgtactgaattaaaaaatttaagatctttagtccgagtatgtgaaattcaagcaactttgcgagagcaaaggatactatttttgagacaacaaattaaggaacttgaaaagctaaaaaatcagaattccttcatggtgtgaagatgtgaataattgcacatggttttgagaacaggaactgtaaatctgttgcccaatcttaacatttttgagctgcatttaagtagactttggaccgttaagctgggcaaaggaaatgacaaggggacggggtctgtgagagtcaattcaggggaaagatacaagattgatttgtaaaacccttgaaatgtagatttcttgtagatgtatccttcacgttgtaaatatgttttgtagagtgaagccatgggaagccatgtgtaacagagcttagacatccaaaactaatcaatgctgaggtggctaaatacctagccttttacatgtaaacctgtctgcaaaattagcttttttaaaaaaaaaaaaaaaaaaattgggggggttaatttatcattcagaaatcttgcattttcaaaaattcagtgcaagcgccaggcgatttgtgtctaaggatacgattttgaaccatatgggcagtgtacaaaatatgaaacaactgtttccacacttgcacctgatcaagagcagtgcttctccatttgttttgcagagaaatgtttttcatttcccgtgtgtttccatttccttctgaaattctgattttatccatttttttaaggctcctctttatctcctttcttaaggcactgttgctatggcacttttctataaccttttcattcctgtgtacagtagcttaaaattgcagtgattgagcataacctacttgtttgtataaattattgaaatccatttgcaccctgttaagaatggacttaaaagtactgctggacaggcatgtgtgctcaaagtacattgattgctcaaatataaggaaatggcccaatgaacgtggttgtgggaggggaaagaggaaacagagctagtcagatgtgaattgtatctgttgtaataaacatgttaaaacaaacaaaaattgttatttttcttttccttcggtcagtgcacattagcatttgaactacctggggattctttatcagaactgttcttgttgaatatttatacttaattgaaataattccttaagggaggttttgtttaaaacgtattaacaggaaattgtgtatgagatatttaatgaaataagaaattcaacaagaatgattaagtcacttcccaagtggttgtcatttgttaaaccctggtttacctgtcttgctattatgacatttcatttggaaggatgtttgtgttgtagctaactgttcaagtctggtgctgactgctgttcttagccatcacaaaacgctaaatttgtgtaattggagcttcctgctgttatctggaaatagcaggaaagcgcagctttgtatattgtttcctaaagtatattaaaataaaaaaagaaactattgctactataaaaaaa

SEQ ID NO: 1278 - DNA, 4677 bp, Homo sapiens
ctcctcctccggcgtcgcgggctcctcggacatggccgcggcggtggcggtggcggccgcgtcccggcggcagtcgtgctacctgtgtgacctgccccgcatgccctgggccatgatctgggacttcaccgaacccgtctgccgcggctgcgtcaactacgagggcgccgaccgcgtcgagttcgtcatcgagacggcgcggcagctcaagcgggcgcacggctgcttcccggagggtcgctccccacccggcgccgcggcctcggccgccgccaagccgccgccgctctccgccaaggacatccttttgcagcagcagcagcagcttggccacggcggccccgaggcggccccgcgcgcgccgcaggccttggagcgctacccgttggcggccgcggccgagaggcccccgcgcctcggctctgacttcggcagcagccgcccggcagcgagcctggcccagccgccgacgccgcagccgccgcccgtgaacggcatcctggtgcccaacggcttctccaagctagaggagccgcccgagctgaatcgccagagcccgaacccgcggcgcggccacgcggtgccgcccaccctggtgccgctcatgaacggctcggccacgccgctgcccaccgcgctcggcctcggcggccgcgctgccgcctccttagccgcggtgtccggaaccgcggccgccagcctgggctccgcgcagcccaccgatctgggcgcccacaagcggccggcatccgtgtcgagcagcgctgccgtggagcacgagcagcgtgaggcggcagccaaggagaaacaaccgccgccgcctgcgcaccggggcccggccgacagcctgtccaccgcggccggggccgccgagctgagcgcggaaggtgcgggcaagagccgcgggtctggagagcaggactgggtcaacaggcccaagaccgtgcgcgacacgctgctggcgctgcaccagcacggccactcggggcccttcgagagcaagtttaagaaggagccggccctgactgcaggcaggttgttgggtttcgaggccaacggggccaacgggtctaaagcagttgcaagaacagcaaggaaaaggaagccctctccagaaccagaaggtgaagtcgggccccctaagatcaacggagaggcccagccgtggctgtccacatccacagaggggctcaagatccccatgactcctacatcctcttttgtgtctccgccaccacccactgcctcacctcattccaaccggaccacaccgcctgaagcggcccagaatggccagtcccccatggcagccctgatcttagtagcagacaatgcagggggcagtcatgcctcaaaagatgccaaccaggttcactccactaccaggaggaatagcaacagtccgccctctccgtcctctatgaaccaaagaaggctgggccccagagaggtggggggccagggagcaggcaacacaggaggactggagccagtgcaccctgccagcctcccggactcctctctggcaaccagtgccccgctgtgctgcaccctctgccacgagcggctggaggacacccattttgtgcagtgcccgtccgtcccttcgcacaagttctgcttcccttgctccagacaaagcatcaaacagcagggagctagtggagaggtctattgtcccagtggggaaaaatgccctcttgtgggctccaatgtcccctgggcctttatgcaaggggaaattgcaaccatccttgctggagatgtgaaagtgaaaaaagagagagactcgtgacttttccggtttcagaaaaacccaatgattacccttaattaaaactgcttgaattgtatatatatctccatatatatatatatccaagacaagggaaatgtagacttcataaacatggctgtataattttgattttttttgaatacattgtgtttctatattttttttgacgacaaaaggtatgtacttataaagacatttttttcttttgttaacgttattagcatatctttgtgctttattatcctggtgacagttaccgttctatgtaggctgtgacttgcgctgcttttttagagcacttggcaaatcagaaatgcttctagctgtatttgtatgcacttattttaaaaagaaaaaaaaagccaaatacattttctgacattgtaagattgccttactgtctgtcattccttattgctggcccctttctcaggccggaggccaagtggtggagaaggaaaggaaatgatcgaacgggcatgttgtcaagtgggcatgccactgggaaataccaccagtttaccctgaaacattgtcctcagaggagtaggaaagtggattttgaatctctattttgctcaaaagttcagttcctgagatactgatgactgagagtgctgctgggaaattttcaggattgtgtggtcttttggggttttttgtttttttttttttaagacaaagttgaccgctgttcactgtccacgtgatcagttgtaagattacaatgctgcatgctagttggttacataagatacaattccagtgatggaaggcggttataatggatggtggtgtgtacaagatggcactgccatctttgagcagagcccagctctgcagcgccacttcatctttttaaacaccctagaggtctgtttgttgttgctgttgtcctttattttgaaagagttgcaagagaagttacagtccaggtgaacttggagattgtgggattggttttgtttctgttttgttttgtttatcatttacctgtagtgctattgctgttgatactatcacctataccctgtttctagtgagtgctgaatacagtatggtacaatgacagtaacagccgcgtggtgctgccaggactgcccttgggcatatcagtgacagcccaaatgtgggtggaggaaacctgtaatttccttcttaacatgtgtttgaaataccaagtgaataatactgttctggaaaaaaatgataaactagtggaaattaaagaaattaagggttttatataatagacaggccccacctctcaaaatatttttagaagtctttttgtaaactaatttcttttgatcactattttgcatcagtaaaatgatttttttaaaaccaataaatcatcaattattagaaatagttgtctcacagtgatactggtttttcttttgtgctgttatgatttaacattgacaggaacactattttaaatccttacgttcaggtgtttgtaacttggccttataattaggctgaattatggcttcaaggtctacaatttatgtgtatggttcacagcctagcttctatttacatttgaaaatacagatttttaccaactttggattcttttttagttatatgtttgtctttcctttttaaattgttcaaaactattttttaatggtcaagttactaacacttgaaaatcagatactgcaccaaatacagtgtttttccgtagtgtttttaatgagtgcacctattactactgtgcgagaattcatgttttaccagtcattgttatattacaaacagacttgcatgattaaccagttgttacacttactttttcaagttggagtatatatgactcagtgcagactggtctctcttatgtgaatgcacacatgcagaaatgcagagtcaattttacatgcccataaagacatttgtaaagaattcagctcttatggtctgttgtataaatgtgtatctaggcactttggaatttgacctcacagatgttacaacttgatcagtcgtttgacctaatttgtggtagctatctgtatgttttgcaatcttaatacagacatgctttccaaaaagattaatacagaaccatcctgccgttttggataagtctatccagctgtggaaagggcaacctgtggtttctctgtactggtgtttaatgggggaagaatatgaacagctttaaagagctgtgtattgtggttactactattaaaaaataagatctgcacgagtctgactggcctttgggtggcctttgtggacggctcgtagctggaaagtgttgatctgggttttctggcattcttttaagttaaaaagttaacatcgggacatgggtttgatcttttgttgtacctgatgacagtgcagagattctccacagctggataaaaatgtcacaaagctacttactgtacatgggcagtatcagatttcaaatcctaatatttcagctgtgcttttaatactcaaaatattaggggatggggtgttgaagctttcccttttttgcttttaacaatttatagaatttaacagatgtactgtctttcatgtggcctcacatttaaagttatgagaacatacacatggtttacaacttttactatatacctttccttggccaccaagtattttaaaagtgtgccaccttttaacctttactttttttaagttgaaggtgatactttttctatatatgatgaaactcatgtcaactgaagtgagtgtaatctcagataccaacattattatattttaaaatcacgctatggaaatatcacctgaattctgtcatttgtcagatttacagtacctttttttctttaacttttagcattaaataaaaataaaattgggagcactgaaaaaaaaaaaaaaaa

SEQ ID NO: 1279 - DNA, 3676 bp, Homo sapiens
ggtccccggctgcccgcagcccgctcgcggcgcttctccggcccggctccttctccgctcgttaacgtcgccaaccccccccacccctcatatctctctccacccacccaaccgccccccgctccttctcgccgcctcgagtccgcttgggggaaaacttcaaagagccggatcgcaggctccctgcctactcccccaccggggatttcagactagacgcttgaagcaaagctgccatcccagaagacgacatgctctcagcaacccccctgtatgggaacgttcacagctggatgaacagcgagagggtccgcatgtgtggggcgagcgaagacaggaaaatccttgtaaatgatggtgacgcttcaaaagccagactggaactgagggaagagaatcccttgaaccacaacgtggtggatgcgagcacggcccataggatcgatggcctggcagcactgagcatggaccgcactggcctgatccgggaagggctgcgggtcccgggaaacatcgtctattctagcttgtgtggactgggctcagagaaaggtcgggaggctgccacaagcactctaggtggccttgggttttcttcggaaagaaatccagagatgcagttcaaaccgaatacacccgagacagtggaggcttctgccgtctctggaaaacccccaaatggcttcagtgctatatacaaaacaccgcctggaatacaaaaaagtgctgtagccacagcagaagcgctgggcttggacaggcctgccagcgacaaacagagccctctcaacatcaatggtgctagttatctgcggctgccctgggtcaatccttacatggagggtgccacgccagccatctaccctttcctcgactcgccaaataagtattcactgaacatgtacaaggccttgctacctcagcagtcctacagcttggcccagccgctgtattctccagtctgcaccaatggggagcgctttctctacctgccgccacctcactacgtcggtccccacatcccatcgtccttggcatcacccatgaggctctcgacaccttcggcctccccagccatcccgcctctcgtccattgcgcagacaaaagcctcccgtggaagatgggcgtcagccctgggaatcctgttgattcccacgcctatcctcacatccagaacagtaagcagcccagggttccctctgccaaggcggtcaccagtggcctgccgggggacacagctctcctgttgcccccctcgcctcggccgtcaccccgagtccaccttcccacccagcctgctgcagacacctactcggagttccacaagcactatgccaggatctccacctctccttcagttgccctgtcaaagccatacatgacagttagcagcgagttccccgcggccaggctctccaatggcaagtatcccaaggctccggaagggggcgaaggtgcccagccagtgcccgggcatgcccggaagacagcggttcaagacagaaaagacggcagctcacctcctctgttggagaagcagaccgttaccaaagacgtcacagataagccactagacttgtcttctaaagtggtggatgtagatgcttccaaagctgaccacatgaaaaagatggctcccacggtcctggttcacagcagggctggaagtggcttagtgctctccggaagtgagattccgaaagaaacactatctcctccaggaaatggttgtgctatctatagatctgaaatcatcagcactgctccctcatcctgggtggtgcccgggccaagtcctaacgaagagaacaatggcaaaagcatgtcgctgaaaaacaaggcattggactgggcgataccacagcagcggagttcatcatgcccgcgcatgggcggcaccgatgctgtcatcactaacgtttcagggtcagtgtcgagtgcaggccgcccagcctccgcatcacccgcccccaatgccaatgcagatggcaccaaaaccagcaggagctctgtagaaaccacaccatccgttattcagcacgtgggccagcccccggccactcctgccaagcacagtagcagcaccagcagcaagggcgccaaagccagcaacccagaaccgagtttcaaagcaaacgagaacggccttccaccaagctctatatttctgtctccaaatgaggcattcaggtccccaccaattccctaccccaggagttacctcccttacccagcccctgagggcattgctgtaagtcccctctccttacatggcaaaggacctgtctaccctcacccagttttgttacccaatggcagtctgtttcctgggcaccttgccccaaagcctgggctgccctatgggcttcccaccggccgtccagagtttgtgacctaccaagatgccctggggttgggcatggtgcatcccatgttgataccacacacgcccatagagattactaaagaggagaaaccagagaggagatcccggtcccatgagagagcccgttacgaggacccaaccctccggaatcggttttccgagattttggaaactagcagcaccaagttacatccagatgtccccaccgacaagaacctaaagccgaaccccaactggaatcaagggaagactgttgtcaaaagcgacaagcttgtctacgtagaccttctccgagaagaaccagatgctaaaactgacacaaacgtgtccaaacccagctttgcagcagagagtgttggccagagcgctgagccccccaagccctcagttgagccggccctgcagcagcaccgtgatttcatcgccctgagagaggagttggggcgcatcagtgacttccacgaaacttatactttcaaacagccagtcttcaccgtaagcaaggacagtgttctggcaggtaccaacaaagagaacctagggttgccagtctcgactccattcctggagccacctctggggagcgatggccctgctgtaacttttggtaaaacccaagaggatcccaaaccattttgtgtgggcagtgccccaccaagtgtggatgtgacccccacctataccaaagatggagctgatgaggctgaatcaaatgatggcaaagttctgaaaccgaagccatctaagctggcaaagagaatcgccaactcagcgggttacgtgggtgaccgattcaaatgtgtcactaccgaactgtatgcagattccagtcagctcagccgggagcaacgggcattgcaggtgagcccccccacctgaatttcagttactttaccagttgtcagttttttaatgtgtaaacaggattgggggagtatggtagggcagggcaccaggcagatttggtgaatgaagcttgtggtaatttgaatatatgcaatgtggccagtaagagaacgtgagtggtagcactgaggcgtgtctggatgctttaagttattctgtagattataagggaactccactcaattgctgataaccgatgttttaattattgtgaagggtatctaaagactgcatgacgtttacctatcaattgctttgatttctctgcctgtaagatagcaaatatacctagaagtgctgcttagaatgccttacttgatacctggtagagatgtgtagcagccgcatgtctgtgggattcatgcaaatttttcaccaaaaaa

SEQ ID NO: 1280 - DNA, 4043 bp, Homo sapiens
agcgacggcggccgggaggcggaagtggaggttgttgtggctccgagggctgttcgaggagctgctgctgctgaggcggcggcaactgcattgaggtggtggcggcgctgccggccccgggccgctcggcctctcggctcgccttccagcctcgcctgagcccgccggggcccgcgccggccagcgcctgccctatgagtgtgtcactggttgttatccgattggagctcgcggaacactcgcctgtccccgccggcttcggcttcagcgccgcggccggggaaatgtctgatgaggagataaaaaagacgacactagcctcagctgtagcctgtttagaaggcaagtcaccaggagagaaagtagcgattatccatcagcatctcggccgtcgagaaatgacagatgtgatcattgagaccatgaagtccaacccagatgaactaaaaactacagtggaagaaaggaagtcttcagaagcctcccccactgcgcaaagaagtaaagatcacagtaaggaatgcataaacgctgccccagattctccgtccaaacagcttccagaccagatttcattcttcagtggaaatccatcagttgaaatagttcatggtattatgcacctatataagacaaataagatgacctccttaaaagaagatgtgcggcgcagtgccatgctgtgtattctcacagtccctgctgcaatgaccagtcatgaccttatgaagtttgttgccccatttaacgaagtaattgaacaaatgaaaattatcagagactctactcccaaccaatatatggtgctgataaagtttcgtgcacaggctgatgcggatagtttttatatgacatgcaatggccgccagttcaactcaatagaagatgacgtttgccagctagtgtatgtggaaagagctgaagtgctcaaatctgaagatggcgccagcctcccagtgatggacctgactgaactccccaagtgcacggtgtgtctggagcgcatggacgagtctgtgaatggcatcctcacaacgttatgtaaccacagcttccacagccagtgtctacagcgctgggacgataccacgtgtcctgtttgccggtactgtcaaacgcccgagccagtagaagaaaataagtgttttgagtgtggtgttcaggaaaatctttggatttgtttaatatgcggccacataggatgtggacggtatgtcagtcgacatgcttataagcactttgaggaaacgcagcacacgtatgccatgcagcttaccaaccatcgagtctgggactatgctggagataactatgttcatcgactggttgcaagtaaaacagatggaaaaatagtacagtatgaatgtgagggggatacttgccaggaagagaaaatagatgccttacagttagagtattcatatttactaacaagccagctggaatctcagcgaatctactgggaaaacaagatagttcggatagagaaggacacagcagaggaaattaacaacatgaagaccaagtttaaagaaacaattgagaagtgtgataatctagagcacaaactaaatgatctcctaaaagaaaagcagtctgtggaaagaaagtgcactcagctaaacacaaaagtggccaaactcaccaacgagctcaaagaggagcaggaaatgaacaagtgtttgcgagccaaccaagtcctcctgcagaacaagctaaaagaggaggagagggtgctgaaggagacctgtgaccaaaaagatctgcagatcaccgagatccaggagcagctgcgtgacgtcatgttctacctggagacacagcagaagatcaaccatctgcctgccgagacccggcaggaaatccaggagggacagatcaacatcgccatggcctcggcctcgagccctgcctcttcggggggcagtgggaagttgccctccaggaagggccgcagcaagaggggcaagtgaccttcagagcaacagacatccctgagactgttctccctgacactgtgagagtgtgctgggaccttcagctaaatgtgagggtgggccctaataagtacaagtgaggatcaagccacagttgtttggctctttcatttgctagtgtgtgatgtagtgaatgtaaagggtgctgactggagagctgatagaaaggcgctgcgttcgaaaaggtcttaagagttcactaacctcacattctaatgaccattttgccttcctgcttggtagaagccccaactctgctgtgcatttttccattgtatttatggagttggcgtatttgacattcagttctggggtaggtttaagatgttaagttatttcttgtaacctcaaaggtaaggttatctagcactaaagcaccaaacctctctgagggcataacagctgctttaaagagaggtttccattggctattaaggagttatgaaaactccctagcaatagtgtcatatcattatcatctcccccttcctctggggagtggaagaattgcttgaatgttatctgaaaagaggcctggtagtaaaccaggccctggctctttaccagcagtcatctcttcttgctctggggccagccaggaaaaacaaacaacccggggcacattgggtagactcagtgtaggaaaaatggtggcagctccactgtttatttttggtgacttcgtacatcattatgaaccgcaattaaggaggaggcttaatggctgttcccaaactcaaatctcagagtgggtatcctagcatctagcaagactgagtggggagatttctcatccgtgtgaaaatgtagagtgaggcctctgactagctaattgtgtattttgttgggtttagtattttctaaatgtttacaaaatattgggctgcatgttcaggttgcagctagagggagcttgggcagattttcaattacgctttcaagatataaccaaaagctgtttctaaatcctaaaattagaatttcaacagagccccctttagaacagtcatataacgcttgtgtgggccaacagaggggctgtgtactctctctggaaccataaatgtcaaataatttataacctgcagtaattgagcaaacttaaaataagacctgtgttggaatttagtttcttgaagaggtagagggataggttagtaagatgtattgttaaacaacaggttttagtttttgctttataattagccacaggttttcaaatgatcacatttcagaataggtttttagcctgtaattaggcctcatcccctttgacctaaatgtcttacatgttacttgttagcacatcaactgtatcactaatcaccatctgtttttgtgggatgtgctgcagcatttcccaaaaaactttacgtgtaatgttgcaaaatgaatgtactcagacattcttaatttttacttagggcagaccaactctttgagtctctcttggacttatatatacagatatcttaagagtgggaatgtaaagcataacctaattctctttcctatagagattctattttatttaaaatctatttttacactagttagaatcctgctgttttggccaagtacttgtcttgcatgtctgaccttgcagaagctggggtggatcatagcatactaatgaagagaattagaagtagtttacaaagctcgctcactcctcatttctctgtgatcccttctatccagtggccccaccaccacctgggaaaacagatttttcagtacaggtgggataaatgctctgaaaggctgtgcccagaggaatgagcaaataggcaagtgtttccaaactacttggaggtttacaaaaaatatgtcccagaaaaaaaaaaaatcttaccaagatacgtaaagaaaaaaaaatttttttttaaacagtcaaagagtcatgtttgaatttcacaaaatcacatcagacagaagttgttttcttcaggagggaaatgaaccacttaatatacccatactaccttgaacaatgaaattgaattaaaatagccaaactttgaaattaaaaaaaaaaaaaaaaaa

SEQ ID NO: 1281 - DNA, 4248 bp, Homo sapiens
tccccgcaggagtcggagaggatggcaggggccggaggccagcaccaccctccgggcgccgctggaggagcggccgccggagccggcgccgcggtcacctccgccgctgcctcggcggggccgggagaggattcgtctgacagcgaagcggagcaagagggaccccagaaactgatccgcaaagtgtctacctcggggcagatccggaccaagaccagtattaaagagggacagctattgaagcaaaccagttctttccaaaggtggaaaaagcgatacttcaaacttcgaggccgcaccctttactatgcaaaggactcaaagtctctgatatttgatgaagttgacctctcagatgctagtgtagctgaagcaagcacgaaaaatgctaacaacagcttcacgatcatcactccattcagaaggctaatgctgtgtgctgagaacagaaaggagatggaggattggatcagctcactgaagtctgtacagaccagagaaccctacgaggtggcccagtttaatgtggaacatttctcagggatgcacaactggtacgcctgctcccacgcccgacccaccttctgtaacgtgtgcagagagagtctttctggagtcacctcccatggcctgtcctgcgaagtgtgtaaattcaaggctcacaaaagatgtgcagtgagagcaacaaataactgtaaatggactaccctggcctccatcgggaaggacattatagaagatgaagatggcgtcgcgatgcctcaccagtggcttgagggcaacctgcctgtaagtgccaagtgtgctgtctgcgacaaaacatgtggcagtgttctccgtctacaggattggaaatgcctttggtgtaagacaatggtacacactgcctgcaaagatttataccatccaatatgtccacttggtcaatgtaaagtatctatcatacctccaattgcactaaacagcaccgattccgatggtttctgtagagcaacattttcgttctgtgttagtcctctattggtttttgtcaattctaagagtggagataatcagggagtaaagttcctccgtcgctttaaacagttgctaaatccggctcaggtgtttgatttaatgaatggaggtcctcatttaggtttaagattatttcagaagtttgacaatttccggattcttgtttgtggaggcgatggaagtgtaggttgggttttgtcagaaatcgataagctcaacttgaataaacagtgtcagctgggagtgttgcctttgggtacaggaaatgaccttgcccgagttcttggctggggaggttcatatgacgatgacacccaacttcctcagatcctagagaaactggaacgagccagtaccaaaatgttggacaggtggagtataatgacatatgaactcaaattgccaccaaaagcttccctacttccaggacctccagaagcatctgaagaattttatatgacgatttatgaagactcagttgcaacgcatcttacaaaaatcctcaattctgatgaacatgcagtggtcatatcttctgccaagacgctatgtgaaactgtaaaggacttcgttgccaaagtagaaaagacgtatgacaaaaccttggaaaatgccgttgtagctgatgccgtggccagtaaatgttcagtcctaaacgagaagctcgaacaactgctgcaggctttgcacacagattcccaggctgcgcctgttctccctggcctcagccctctcattgtggaagaagatgctgtggaatcgtccagtgaagagtccctgggtgaaagcaaagagcagcttggggatgacgttacaaaaccttcctcccagaaagccgtcaaaccaagggaaatcatgttgcgggcaaatagtttaaagaaagcagtgaggcaagtcattgaggaagccggaaaagttatggatgacccgacagttcacccctgtgaaccagctaatcagtcctctgattatgacagcacagaaacagatgaatctaaggaggaagctaaagatgatggtgccaaagaatcaataactgttaaaactgcacctcggtctccagatgcccgggcaagttatggccattcccaaactgattctgtccctggtccagctgtggcagccagcaaagaaaacctccctgtgctcaataccagaataatctgcccaggtttaagagcaggactggctgcctcaattgctgggagttcgattatcaacaaaatgttactggcaaacattgatccttttggtgccacgccgtttattgacccggatctagattccgtagatggatattcagaaaaatgtgtcatgaacaattactttgggattggattagatgcaaaaatttcattagaatttaataataaaagagaggagcaccctgaaaaatgcaggagccgaactaaaaacttgatgtggtatggagtccttggaacccgggagttattacagagatcgtacaagaatttagaacaaagggttcaacttgagtgtgatgggcagtatattcctcttcccagcttgcaaggcatagccgtgttgaacattcccagctatgctggaggcactaacttttggggtggaactaaagaggatgatatatttgctgcaccatcctttgatgacaagatcctggaagttgtagcaatatttgatagcatgcaaatggcagtttcaagggtcattaaactgcagcatcatcgaatagcccagtgccgtacagtgaaaatcactatatttggtgacgaaggagtcccagtgcaagtggatggtgaagcgtgggttcagcctccagggattatcaaaattgtgcacaaaaacagagcacaaatgctaacaagggacagagcctttgagagcactctgaaatcttgggaagataagcagaagtgtgattctggtaaaccagttctccgaacccatttgtacatccatcacgccattgacttggcaacagaagaggtgtcgcagatgcagctatgctcccaggctgcagaggagctcattactaggatatgtgacgcagccacaattcactgtcttttggagcaagaactggcccatgctgtgaatgcctgctcccatgccctgaataaagccaacccaaggtgcccggagagtcttacaagagacactgccactgaaatagccatcaatgtgaaggcgctgtataatgaaacagaatctttgctagttggcagggttcctttgcagctggaatcgccacatgaagagcgagtatccaatgccttacactctgtggaggtggaattacagaaactgacagagattccttggctttattatatcttacacccaaatgaggatgaggaacctcctatggattgcaccaaaaggaacaacagaagcaccgtatttcgaatagtgccaaagtttaaaaaggaaaaggttcagaagcagaagacaagttcacagcctgttcagaaatggggcacagaggaagttgctgcttggctggatctgctcaatttgggagagtacaaagatatcttcatccgtcatgacatcagaggggctgaacttttgcatctggaaaggcgagatcttaaggatctggggataccgaaagtgggtcatgtgaagcgaattctccagggaattaaagagcttggaaggagcactccacagtcggaggtgtaatcatattggtgctatttcttggaagagaagttattgccacttaatacaaagtccttggaagcaagtggctgttcttgtagttttctgcatagataagtaagcaccactgaagcacctctgtggcttgatattttgctgtgggtgaaattttgatttgaggtattagaaaatatttttgtgccgaacaatacattccacaaagccattttctttttgtgcaaacctgacatgttcaaatatattcacaatggtaataaggtaggaggaatctgagacgattgcattgtctaaacagtggaattgcaaaatgtttactttccatagatctggtctgatggaatgttcctactgtgcaactgcataacaatatgtggttaaaacttcctaggtttcattacgggggggcattggccattttcttaaaatcataggttaggagactaaaatataaattaagttgtgatttgaatgtagattggtatcacctccaactcctagtgcttagtggtcaaatatgttgaaaacctttccaatactatgaatgaatgcaaatcttaatgcacg

SEQ ID NO: 1282 - DNA, 9098 bp, Homo sapiens
gtcccgcccccttgagctgcgatacgccgagcgctcaacatccgaggactttggcccagagtaaccccgctctcgtgacctttcccctccattccgcacctccgagtgctggccgggcgagaggctggcggctgggctctcgcgcccctccctgcagggctcaggctctccccctcctgtcttctccgcgctgttcctcgtcatggcggccctcagcaagtccatccctcataactgctatgagatcggccacacttggcacccttcctgccgggtctccttcctgcagatcaccgggggcgccctggaggagtccctgaagatctatgctcctctgtacttgattgcagcaattctccggaaacggaaattagactattatttacacaaactactccctgagatcctacaatccgcttcatttctaactgctaatggggccttgtatatggctttcttttgcattttaaggaagatacttggaaaattctactcatggactcctggctttggtgccgctctgccagcatcttatgtggccattctcattgaaagaaaaagcaggagagggctgctcacaatttatatggccaacttggccacagaaacactattcagaatgggtgtagcaagaggaaccatcacaacattaagaaatggagaagtccttttgttttgcatcacagctgccatgtacatgttctttttcaggtgcaaggatggcttgaaaggatttacattttctgcacttaggttcattgtagggaaggaagaaattcccacacattctttttcaccagaggcagcatatgcaaaagtggaacaaaagagagagcaacatgaggaaaaacccggaagaatgaatatgattggtctagtcaggaaatttgtggattcaatatgcaaacatggaccaaggcatagatgttgcaaacattatgaagataattgcatctcttattgcattaaaggtttcatcagaatgtttagcgtggggtacttgatccagtgctgcctccgaatcccttctgcatttaggcatctgtttacacagccatctcggctactttctctcttctacaataaagaaaacttccagcttggagcttttcttggctcttttgttagtatatacaagggtactagttgcttcctgcgctggatcagaaacttagatgatgaactacatgctattatagctggatttttggcaggtatatcaatgatgttttataaaagcacaacaatttccatgtatttagcgtccaaattggtagagacaatgtatttcaaaggcattgaagcagggaaggttccctattttcctcatgcagatactatcatctattccatctctacagcaatttgcttccaggcagctgtcatggaagttcagactttgagaccatcttactggaagttccttttaagactcaccaagggcaaatttgctgtcatgaaccgaaaagtccttgatgtttttggtactggtgcatctaaacactttcaggatttcatccccaggttggatccaagatacacaactgtaacaccagagttgcccacagagttttcctgaagatgactgtaacttattaatgtgactaaatgtttcatcttgaagagttaattatgttgaacacaaaggagggggcccaagctcgaacttcagtgttatttcagttagagatactcttttcatttgttttgtttttcttatgaatcagaaattcagaagctttttaggaagatgttgcttaataattaagcttcctccatagccagaataagattctggatcactgtagtgactgacattatatattattgatcaaattatgtccacaagcaatattatataatctacgtagaagtgtaataacaaacaagagtacacttaaaattactttaaaagatgtctttagttcattccaatataattcttgattaaaattaggattatttctacattttaggatttacaaaggatcacgggtacatggatttggtctatatatttttttaaagttttgaattggtatctgtagtagtggaatgttatagatttgaagtaactctccacggacagtgctgctttcgtgtagagcaatttaattggagaagtggccattcttacttcagggatgcaaagatgggtctcataccatttggataaatgtcgtggtatccatgctttttttcaactaataacatcatctctcttcatgaccagttaattgggctatttggcagcccagtgaacctatgtactaatggcaagttaggggcaaatggaaatggacacatccgataaagttgaaatgtatgttttaatctttcacagaagtattacacttgaatatttaaaaacaaaacttttaaacttcctataggtttatgatgtttgttttcatttatatggacataatccttcatagctcagtttatatgccattgttgtattagaagggatcaaaatcctatggaacaaagtagtcttggcaagttggcagtttgtgtcctctcagctgtttaacttatgtaatggatgttttgcacctgaaaacactataaaaatccagtggttgtttaaaaagtccatttgtcactaattccattcaggttctccaaccttcttcttgaatatcattgtcaccatttttactgttagaataaagaggtgacaccataaagtcctgctgataatgagagtagttcaggacagctgtgattgaaatatggtcgctatttacagtttttcagggaaaagttatacttttctatgttaataaagagctgaagtggtctacagttaatgtgacatgtagggatgatgatatttttaaaatacattttgttgctaaaaagtttttaggccagtgcaaattatgcagtagaacttgtgttgcaaaaggaattataacccatactttaaaaatgcttaatccctcatattcaatttcatcaagccttgtatacttctgcttaaatgtaattcaatccttggttgttatggcaaacagaaacccaacaaaaagacagactctggtactatggtaacagagccactttatcatttggtcaaaatttggcattatgattagctttgtagaactgacctgtttatttggcaatgctgttaaaggatcatttcggtttcagacttcaaagttgattaataaatttaatcttaactttttattcactggaatcaaaacgatggttggtactgtgtttactgtttaaaatgaagtactaaagccctgagaactgcacctcattttctttatccagaaattgtgcttatatattttcctgtcaggtttaaaaagatgttttaattcataaattattgttttcattgacattaaaagactgtgatattgaaagatgaattacgaaatttgctgagattgtttagtaaaattttgctggtcaaaaaggtgtatttctacaatttaccttttcatttttataaattgcagtcatttttttaaattttatgtaaaatgtaaaatgaaatagctatcatgaagcagaatacaatgatgaatgtataggttgagtgaataaccaatttgcagtggtggattgagaagtccagtttgatttcattgggacagactgcaaagtgtagttgtttgagcaaacacaaagaaactttgtgtttttgaagacaatcagaatgattacctttctacctctaactaatcaggtattgattgacaactttttggcattataaataaagtaaaatagatctctgcattccaaaatatgttttttagtttatttatatcctgaagaaatggtaagttttcactggaactgattacagtaaacaataatatgtccccttagtctttctgacatttttatatagattgagattgaaaaaccgtgcatttggggcagtggtattatggtcatttcgttgctattttctgttttaataaaatcctagaactagtagcaaccgagtaaagattgagtttgcaagataacagattgtctcaaatctattcaattctcagcagtttttcatcaaataatttcaggatccattttattactcatttttgaagtaacacctttggtttagttttattttcccataaattctgcttttgcttctgtaacttttttcttgaactataagcatagtcatcactcagttgatatctagtttattttttgccttcattcgttgtttagtcagttgttatttaatttagaattttatatttttttggctctcagattttataatgaacttttattagactgaacatgtatgtttttgatggaatccaaactgagcaaatgtcacacagtattttcttgttgtgctcgagtgttcgtctccttgtagattgtatctaggctaacatttcatttagttgttaatgctgacgtaattgtttcctgcttatattttatcatatccctgagcttctgtgtgctctacatttcataggtaatgaaaagcaatgtcctttactctcagggagcttcgtccacttgcctgtgtcacaacctctcccttggtgctaattaggaagcttcttgtgggactgaagggaactgaccactggagcaatggcccaaatgttgtttttggagcagagaaattattagcccagagattccttaaattctccgtgtgatttatttttttattttttgagttgaggtctagctctgttgcccgggttggagtacagtggtgcaatcatagctcattgaaacctcaaattccttggttcaagcaattatttcccctcagtctctaatagctgggacaacaggcatgtgccaccatgcctggctaatatttattttatttattttttttttgtagaaacaaggtgttgctatgttgtccaggctggtcttaaactcctggcctcaagtgatcctcttgggttggcctcccgggactctgggattccaggtgtgagccacggtacctagccatatttttatttgtatgagtattaagtagtttgacacagcaacaaagttgtcctttgtttcccaaaggcaaaagtatacatttcttactaagatatcttataaacattctctctcctaacacctccttctagtaatcattttcacatagtagaatacttcactcagctgaaaatgagtggccaagaaaaaaatacaagaaaaggaataagaagtgattattttctttagggctgcactttgaatgtgatgagtaataaggttaccttcattgtggaggtgatgtttacaattgcctccagccctttactattggtgctgaagccaccattggtgccagctctataatttcttcttcttgtggaattaacaaagaaaggagtgtcaaggactgagatgaccctcagattggggggctgtcttagattctagggctttgtagtactatgtttctgtttaaagtagtggcctcaggtgactttgtaatagccctgtagttgcaaaaagggtaactacaaagaaatgaaactgactctagtgtgtgtgacttctggaaacagaagtggggcagtaagttggccatgatatagctagtgtcataggactacagcagagtagtgagtgaatggccttaagcttacagctgtggtgaataagaatgtgtgctattttacacacagaagaaaatgattgacttttggttggaggaaagaatttatatctggtcttttggaaattattctgttgctgttttatgtgggctctctctctctccctctctctctctctctgtctgtctctcttgctgctccctctccctgccaccttgtccattctctgcttgctggtgttactttatgttaactagtctccttggacttcattgcaaccttttaagccagccgttcaagtgagaggctctggagtgatcataacggtgataacaatggagtaaacatttccagagacactgattttttttttatatgctctgtttttcttaggcaggatgatgtagaagataattgcacagatatggaaggagatgtttctctgtatgtgaagcctttaaatccagaacaattaatttcttctcttcttaaaaccccgtaacatcacttgactctggaatttcctattttcttttactttctccattttttttccatctgtccctcctacgaatatgttttacatgaaataatgtattgggttttatcttttgtcccagcagacctgaaaatcccagtatattaccacagacacacataccatctggtcaccaacagggacatcagggccaagagcagtttatacttctttctttagctcacaaactactatagcttgcctgttcagttttttttttttttaatattcagttttgtgccatactctcccccacccccagcctgctgcctctgcagagcataacattctaatcttgtcagaccgtggataataggatgttccctggtcttggcatagaggccataggcatacaacatgctttatctgccttgcttagactcagcatccctttctgtcttgagagattcaggcttccataaagtagacctgtagacctatgttggctgaggtcaccctgcattactactttcctccatccctgaactaggaccagttaattttcgaagtctagttcttcagtgtctattaaactttttccagtagttaatcgatctcttaaattaattttcttttcagattatttttggtcacctaagaggaccctgaagctatagtgccaaaggtttaaagcatgaagtacattctgtggttggtcattatgggattggatgccaaaaggaatgggagagaagagactataaacatattttaagccttatctcttttctcctattcttttctttacctttcctggcccatgctttcctgccatatctttgctatgtatttcttcatcttgagctctcaagggaaaaaacaggagtccttatttttctatttatttcagggaaaattgaaggtaaataatatctgcaaagcttcaggaagaaattcagttgcatctgaatctgagtcggcagtttttgatagcctgtcactgctcagggatagcactaaggctctcttcagaaccaaagggcaggataaataaatctatgaaactagaggcatcattgaatcatctgaggacctttttttttttttttttttcactaaaacgcttcctataacttggattaaaattcaaaaatgggattgcagtcattgttaattgctcaactagtggcagtttttccttgctgagggaacactgatgttgtttaagacagttacatgcctagccccagggatgaatcataattgttctaggcctttcatgtctttcctttcttcttgtccagatacttttccaaccagcctttactcggaggtgttcatgtgaccctgttttggccaataaaatgtaatggaaaatctgggaaacacttgggaaaaatcttccctctctgcttaaaggaaagttctttttacctctttttctcttgttcaaggtattagtattagtcagtagggtctgaatctgtggcagcaatcttgcagacatgaaatgaaaagtacaaacatgaaaaaccagcatattaaagatgccaggtcagaaaaatagaaagaacctgcttctgtgagccactgaatggtgccattaaccatctgcatttgagcattttgagaaaataaacctctatttcttaaagttctgtatcagtcagggtttcccagagaggcagaacaatagggatagagagatacatagagagagatatgagagggatagagagagacacagagagagatatgagaggggattaagggagttggctcatgtgattgtggaggctgagaaaccccaccacaggccattcataacctggagaccttgggatgctggtggtctggctcagtacaagtccaaaagccttggaaccagggaaactgatggtgtaattctcagtccaaggctgaattttcaagtctgagaacctgggggtgggatgggggagtgatagttttaagtcctggagtcccaaggttagaggatctggggtcctaatgtccatgggcagttggagaagagtgtatccctgctgcaggggagagagagaagccaattctcctttcttctgtttttattctacccaggcctccagtggattggaggtgcctgcccatattgagggcagatcttctctgcctagtccacgctaactcacatgccaatctcctctggaaacaccctcacagacacaccccaaaataatgccttaccagttctctagatattccttaatccagtcaagttgatgcctaaaattaaccatcacaggctttatggctctattacccaagaattctgttactttcagctgaaaacatttctaatggacatattccaattctgtatagatcagatctcagtttcatttcccattatatccttctctctcttgatttagaattctctttttctccactcttctgtgtatgctaaaatactgtcaatctcgtctttgaaggttttgctcatctttaaaaaatcttagttgattatgttttatgtgtcatttaattaaggaatgaatttgcttatttttatttcagtagcttttggggtacaagtggtttttggttgcatggatgaattgtatattggtgaagtctgaaattttagtgcacctgtcaccagaatagtgtgcattgtacccaatatatagctttttattccttccccttctgagtctccatagtccattatatcactctgtatacccttgtgtatccatagcttagctcccacttacagttgagaacatacagaatttgattttctattccggagttactttacttagaataatggcctccagctccatccaagatgctgcaaaagacattatttcatcttttattttttatggctgagtagtattccatggtgcatatataccacattttctttatccactcattggtctatgggcactttggttgattctgtatctttgcaattgtgaactgtgttaacaataaaaatatatatacgagtgtcttttatggtaaaaaaaaaaaaaaaaaaa

SEQ ID NO: 1283 - DNA, 2657 bp, Homo sapiens
aactagcccagccgcgcggagcgcctgggagaggagaaggagccgacctgccgagatggaggcgaccggcacctgggcgctgctgctggcgctggcgctgctcctgctgctgacgctggcgctgtccgggaccagggcccgaggccacctgccccccgggcccacgccgctaccactgctgggaaacctcctgcagctacggcccggggcgctgtattcagggctcatgcggctgagtaagaagtacggaccggtgttcaccatctacctgggaccgtggcggcctgtggtggtcctggttgggcaggaggctgtgcgggaggccctgggaggtcaggctgaggagttcagcggccggggaaccgtagcgatgctggaagggacttttgatggccatggggttttcttctccaacggggagcggtggaggcagctgaggaagtttaccatgcttgctctgcgggacctgggcatggggaagcgagaaggcgaggagctgatccaggcggaggcccggtgtctggtggagacattccaggggacagaaggacgcccattcgatccctccctgctgctggcccaggccacctccaacgtagtctgctccctcctctttggcctccgcttctcctatgaggataaggagttccaggccgtggtccgggcagctggtggtaccctgctgggagtcagctcccaggggggtcagacctacgagatgttctcctggttcctgcggcccctgccaggcccccacaagcagctcctccaccacgtcagcaccttggctgccttcacagtccggcaggtgcagcagcaccaggggaacctggatgcttcgggccccgcacgtgaccttgtcgatgccttcctgctgaagatggcacaggaggaacaaaacccaggcacagaattcaccaacaagaacatgctgatgacagtcatttatttgctgtttgctgggacgatgacggtcagcaccacggtcggctataccctcctgctcctgatgaaataccctcatgtccaaaagtgggtacgtgaggagctgaatcgggagctgggggctggccaggcaccaagcctaggggaccgtacccgcctcccttacaccgacgcggttctgcatgaggcgcagcggctgctggcgctggtgcccatgggaataccccgcaccctcatgcggaccacccgcttccgagggtacaccctgccccagggcacggaggtcttccccctccttggctccatcctgcatgaccccaacatcttcaagcacccagaagagttcaacccagaccgtttcctggatgcagatggacggttcaggaagcatgaggcgttcctgcccttctccttagggaagcgtgtctgccttggagagggcctggcaaaagcggagctcttcctcttcttcaccaccatcctacaagccttctccctggagagcccgtgcccgccggacaccctgagcctcaagcccaccgtcagtggccttttcaacattcccccagccttccagctgcaagtccgtcccactgaccttcactccaccacgcagaccagatgaaggaaggcaacttggaagtggtgggtgcccaggacggtgcctccagcctcaacagtgggcatggacagggttaatgtctccagagtgtacactgcaggcagccacatttacacgcctgcagttgttttccggagtctgtcccacggcccacacgctcacttgactcatgctgctaagatgcacaaccgcacacccatacacaactacaagggccacaaagcaactgctgggttagctttccacagacataaatatagtccatctgcaatcacaagcacatagccaggtaacccaccaactcccctggatctgcagcccacacgtgggagtctggctgtcaccttcacaagccacagaaacggccacacatgttcacagctcacacgccctctccattcatcgaacttctcagtgtccctgtccctggtgcctggcacagggaacagcatgccccctccggggtcatgccacccagagactgtcgctgtctatggccccaactcatgctccctctcttggctacaccactctcccagcctgtgaccaccgatgtccacacacccccaaccacttgtccacacagctacccacgtacgacatcgtcctggctccccagagtatcttcccactgagacacgccgcccccacagaggcacagtccccagccacctctgcaactgcagccctcagtcacccctttttaagcaccctgattctaccaaatgcaaacacatctgggtctgcgattatgcacagagactttggacatacgaggaccctcagaccggaggaacacctgcccaaccccaacacgtgcttatgtaaccacgtggaaagcggcccctgctgcccctccacacacacatacacactcactgatctacagcccctgttcggcgtcagagtccccactagacccagtggaaggggttagagaccaagtaggggccagtttccaattcaccctgtcagggagtgagccggatctgacgttccttgtgacttaagggtccggcttgggaattaaagtttgtttctggcctttagcctaaaaaaaaaaaaaaaaaaaaaaaaaaaaaaaaaaaaa

SEQ ID NO: 1284 - DNA, 2327 bp, Homo sapiens
gcgcggggcggggcttccgggcggggcaggctggcttccggcgggagcggggccgcggatggccgtatacagggcagcgctcggggcttcgctcgcggctgcccgactcttgcccctcggtcgctgttccccgtcgccggcgccccgctctacgttgtcgggcgccgccatggagcccgcgcctcgctggctggcggggctgcgcttcgacaaccgcgccctgcgcgccctgcccgtggaggcgccgccgcccggtcccgagggcgccccgtccgcgccgcggcccgtgcccggggcctgcttcacccgcgtgcagcccaccccgctgcggcagccgcgcctcgtggcgctgtcagagcccgcgctggcgttgctgggcctgggcgcgccgcccgcgcgcgaggccgaggccgaggccgcgctgttcttcagcggcaacgcgctcctgccgggcgccgagcccgccgcgcactgctactgcggccaccaattcggccagttcgccgggcagctgggcgacggcgccgccatgtacctgggcgaggtgtgcacggcgaccggcgagcgctgggagctgcagctcaagggcgccgggcccacgcccttctccagacaggccgacggtcgcaaggtcctacggtcaagcatccgggagtttctatgcagcgaagccatgttccacctgggagtccccaccacacgggccggcgcctgcgtcacgtccgagtccacggtggtgcgcgacgtgttctatgatggtaatcccaaatatgaacaatgcacggttgtgttgcgtgtagcttccactttcataaggtttggatcctttgagatttttaagtctgcagatgagcacacagggcgtgcaggccccagcgtggggaggaacgacattcgagtgcagctgctcgactatgtcatcagctccttttaccccgagatccaggctgctcatgccagcgacagcgtgcagagaaatgctgccttcttccgggaggtgacgcggcgcacggcgcggatggtggccgagtggcagtgtgtgggcttctgccacggcgtgctcaacaccgacaacatgagcatcctggggctcaccatcgactacgggccctttggcttcctggacaggtacgaccccgaccacgtgtgcaatgcctccgacaacaccggccgctacgcgtacagcaagcagcccgaggtgtgcaggtggaacctgcggaagctggccgaggccctgcagccggaactgcccctggagctgggggaggccatcctggccgaggagtttgacgccgagttccaaaggcactacctgcagaagatgcgcaggaagctgggcctcgtgcaggtggagctggaggaagacggggcgctggtgtccaagctcctggagaccatgcatctgaccggtgccgacttcacaaacaccttctacttgctgagctccttcccagtggagctagagtcgccaggcctggcggaattcctggccaggctgatggagcagtgtgcctccctggaggagctgaggctggccttccggccccagatggatccccggcagctatccatgatgctgatgctggcgcagtcaaacccgcagctgttcgcgcttatgggcacccgggcaggcatcgccagggagctggagcgtgtggagcagcagtctcggctggagcagctgagtgcggcagagctgcagagcaggaaccagggccactgggctgactggctacaggcgtacagagcccggctggacaaggacctggaaggcgctggggacgctgccgcctggcaggctgagcacgtgcgcgtgatgcacgccaacaacccgaagtacgtgctgaggaactacatcgcgcagaatgccatcgaggctgccgagcgcggggacttctcagaggtgcggcgggtgctgaaactactggagaccccttaccactgcgaggcgggggccgccacagacgccgaggccacggaagccgacggggcggacggcaggcagcgctcctacagcagtaagcccccgctctgggcagcagaactgtgcgtgacatgatcttcgtaacggcctcggcacgctccacacccctggagtctcccgaggcccccatgtgctgctgagtggccaagatgatgccaggctgccctatacactgggggattctgccctggcccatgcacacccgtctttccatgatggcagagacatccagtcaggacctgacccgtctctgtctgaggccggctcagcagtgcagcctggtccctgggggctggacccaggctcctaaataaaccagcaactccctcgaaaaaaaaaaaaa

SEQ ID NO: 1285 - DNA, 5572 bp, Homo sapiens
cctcccctcgcccggcgcggtcccgtccgcctctcgctcgcctcccgcctcccctcggtcttccgaggcgcccgggctcccggcgcggcggcggagggggcgggcaggccggcgggcggtgatgtggcgggactctttatgcgctgcggcaggatacgcgctcggcgctgggacgcgactgcgctcagttctctcctctcggaagctgcagccatgatggaagtttgagagttgagccgctgtgaggcgaggccgggctcaggcgagggagatgagagacggcggcggccgcggcccggagcccctctcagcgcctgtgagcagccgcgggggcagcgccctcggggagccggccggcctgcggcggcggcagcggcggcgtttctcgcctcctcttcgtcttttctaaccgtgcagcctcttcctcggcttctcctgaaagggaaggtggaagccgtgggctcgggcgggagccggctgaggcgcggcggcggcggcggcacctcccgctcctggagcgggggggagaagcggcggcggcggcggccgcggcggctgcagctccagggagggggtctgagtcgcctgtcaccatttccagggctgggaacgccggagagttggtctctccccttctactgcctccaacacggcggcggcggcggcggcacatccagggacccgggccggttttaaacctcccgtccgccgccgccgcaccccccgtggcccgggctccggaggccgccggcggaggcagccgttcggaggattattcgtcttctccccattccgctgccgccgctgccaggcctctggctgctgaggagaagcaggcccagtcgctgcaaccatccagcagccgccgcagcagccattacccggctgcggtccagagccaagcggcggcagagcgaggggcatcagctaccgccaagtccagagccatttccatcctgcagaagaagccccgccaccagcagcttctgccatctctctcctcctttttcttcagccacaggctcccagacatgacagccatcatcaaagagatcgttagcagaaacaaaaggagatatcaagaggatggattcgacttagacttgacctatatttatccaaacattattgctatgggatttcctgcagaaagacttgaaggcgtatacaggaacaatattgatgatgtagtaaggtttttggattcaaagcataaaaaccattacaagatatacaatctttgtgctgaaagacattatgacaccgccaaatttaattgcagagttgcacaatatccttttgaagaccataacccaccacagctagaacttatcaaacccttttgtgaagatcttgaccaatggctaagtgaagatgacaatcatgttgcagcaattcactgtaaagctggaaagggacgaactggtgtaatgatatgtgcatatttattacatcggggcaaatttttaaaggcacaagaggccctagatttctatggggaagtaaggaccagagacaaaaagggagtaactattcccagtcagaggcgctatgtgtattattatagctacctgttaaagaatcatctggattatagaccagtggcactgttgtttcacaagatgatgtttgaaactattccaatgttcagtggcggaacttgcaatcctcagtttgtggtctgccagctaaaggtgaagatatattcctccaattcaggacccacacgacgggaagacaagttcatgtactttgagttccctcagccgttacctgtgtgtggtgatatcaaagtagagttcttccacaaacagaacaagatgctaaaaaaggacaaaatgtttcacttttgggtaaatacattcttcataccaggaccagaggaaacctcagaaaaagtagaaaatggaagtctatgtgatcaagaaatcgatagcatttgcagtatagagcgtgcagataatgacaaggaatatctagtacttactttaacaaaaaatgatcttgacaaagcaaataaagacaaagccaaccgatacttttctccaaattttaaggtgaagctgtacttcacaaaaacagtagaggagccgtcaaatccagaggctagcagttcaacttctgtaacaccagatgttagtgacaatgaacctgatcattatagatattctgacaccactgactctgatccagagaatgaaccttttgatgaagatcagcatacacaaattacaaaagtctgaatttttttttatcaagagggataaaacaccatgaaaataaacttgaataaactgaaaatggacctttttttttttaatggcaataggacattgtgtcagattaccagttataggaacaattctcttttcctgaccaatcttgttttaccctatacatccacagggttttgacacttgttgtccagttgaaaaaaggttgtgtagctgtgtcatgtatatacctttttgtgtcaaaaggacatttaaaattcaattaggattaataaagatggcactttcccgttttattccagttttataaaaagtggagacagactgatgtgtatacgtaggaattttttccttttgtgttctgtcaccaactgaagtggctaaagagctttgtgatatactggttcacatcctacccctttgcacttgtggcaacagataagtttgcagttggctaagagaggtttccgaagggttttgctacattctaatgcatgtattcgggttaggggaatggagggaatgctcagaaaggaaataattttatgctggactctggaccatataccatctccagctatttacacacacctttctttagcatgctacagttattaatctggacattcgaggaattggccgctgtcactgcttgttgtttgcgcatttttttttaaagcatattggtgctagaaaaggcagctaaaggaagtgaatctgtattggggtacaggaatgaaccttctgcaacatcttaagatccacaaatgaagggatataaaaataatgtcataggtaagaaacacagcaacaatgacttaaccatataaatgtggaggctatcaacaaagaatgggcttgaaacattataaaaattgacaatgatttattaaatatgttttctcaattgtaacgacttctccatctcctgtgtaatcaaggccagtgctaaaattcagatgctgttagtacctacatcagtcaacaacttacacttattttactagttttcaatcataatacctgctgtggatgcttcatgtgctgcctgcaagcttcttttttctcattaaatataaaatattttgtaatgctgcacagaaattttcaatttgagattctacagtaagcgttttttttctttgaagatttatgatgcacttattcaatagctgtcagccgttccacccttttgaccttacacattctattacaatgaattttgcagttttgcacattttttaaatgtcattaactgttagggaattttacttgaatactgaatacatataatgtttatattaaaaaggacatttgtgttaaaaaggaaattagagttgcagtaaactttcaatgctgcacacaaaaaaaagacatttgatttttcagtagaaattgtcctacatgtgctttattgatttgctattgaaagaatagggtttttttttttttttttttttttttttttaaatgtgcagtgttgaatcatttcttcatagtgctcccccgagttgggactagggcttcaatttcacttcttaaaaaaaatcatcatatatttgatatgcccagactgcatacgattttaagcggagtacaactactattgtaaagctaatgtgaagatattattaaaaaggtttttttttccagaaatttggtgtcttcaaattataccttcaccttgacatttgaatatccagccattttgtttcttaatggtataaaattccattttcaataacttattggtgctgaaattgttcactagctgtggtctgacctagttaatttacaaatacagattgaataggacctactagagcagcatttatagagtttgatggcaaatagattaggcagaacttcatctaaaatattcttagtaaataatgttgacacgttttccataccttgtcagtttcattcaacaatttttaaatttttaacaaagctcttaggatttacacatttatatttaaacattgatatatagagtattgattgattgctcataagttaaattggtaaagttagagacaactattctaacacctcaccattgaaatttatatgccaccttgtctttcataaaagctgaaaattgttacctaaaatgaaaatcaacttcatgttttgaagatagttataaatattgttctttgttacaatttcgggcaccgcatattaaaacgtaactttattgttccaatatgtaacatggagggccaggtcataaataatgacattataatgggcttttgcactgttattatttttcctttggaatgtgaaggtctgaatgagggttttgattttgaatgtttcaatgtttttgagaagccttgcttacattttatggtgtagtcattggaaatggaaaaatggcattatatatattatatatataaatatatattatacatactctccttactttatttcagttaccatccccatagaatttgacaagaattgctatgactgaaaggttttcgagtcctaattaaaactttatttatggcagtattcataattagcctgaaatgcattctgtaggtaatctctgagtttctggaatattttcttagactttttggatgtgcagcagcttacatgtctgaagttacttgaaggcatcacttttaagaaagcttacagttgggccctgtaccatcccaagtcctttgtagctcctcttgaacatgtttgccatacttttaaaagggtagttgaataaatagcatcaccattctttgctgtggcacaggttataaacttaagtggagtttaccggcagcatcaaatgtttcagctttaaaaaataaaagtagggtacaagtttaatgtttagttctagaaattttgtgcaatatgttcataacgatggctgtggttgccacaaagtgcctcgtttacctttaaatactgttaatgtgtcatgcatgcagatggaaggggtggaactgtgcactaaagtgggggctttaactgtagtatttggcagagttgccttctacctgccagttcaaaagttcaacctgttttcatatagaatatatatactaaaaaatttcagtctgttaaacagccttactctgattcagcctcttcagatactcttgtgctgtgcagcagtggctctgtgtgtaaatgctatgcactgaggatacacaaaaataccaatatgatgtgtacaggataatgcctcatcccaatcagatgtccatttgttattgtgtttgttaacaaccctttatctcttagtgttataaactccacttaaaactgattaaagtctcattcttgtcaaaaaaaaaaaaaaaaaaaaaaaaaaa

SEQ ID NO: 1286 - DNA, 2323 bp, Homo sapiens; identical to SEQ ID NO: 611

SEQ ID NO: 1287 - DNA, 2254 bp, Homo sapiens
agagtgcacccgaatccacgggctcggaggcagcagccatctctcggccatagggcaggccagctggcgccgggggctattttgggcggcgggcaatgatggtgaccgcaaggcgaccttgtaaggcatttcccccctgactcccttccccgagcctctgcccgggggtcctagcgccgctttctcagccatcccgcctacaacttagccgtccacaacaggatcatctgatcgcgtgcgcccgggctacgatctgcgaggcccgcggaccttgacccggcattgaccgccaccgccccccaggtccgtagggaccaaagaaggggcgggaggaagactgtcacgtggcgccggagttcacgtgactcgtacacatgacttccagtccccgggcgcctcctggagagcaaggacgcgggggagcagagatgatccgagccgcgccgccgccgctgttcctgctgctgctgctgctgctgctgctagtgtcctgggcgtcccgaggcgaggcagcccccgaccaggacgagatccagcgcctccccgggctggccaagcagccgtctttccgccagtactccggctacctcaaaggctccggctccaagcacctccactactggtttgtggagtcccagaaggatcccgagaacagccctgtggtgctttggctcaatgggggtcccggctgcagctcactagatgggctcctcacagagcatggccccttcctggtccagccagatggtgtcaccctggagtacaacccctattcttggaatctgattgccaatgtgttatacctggagtccccagctggggtgggcttctcctactccgatgacaagttttatgcaactaatgacactgaggtcgcccagagcaattttgaggcccttcaagatttcttccgcctctttccggagtacaagaacaacaaacttttcctgaccggggagagctatgctggcatctacatccccaccctggccgtgctggtcatgcaggatcccagcatgaaccttcaggggctggctgtgggcaatggactctcctcctatgagcagaatgacaactccctggtctactttgcctactaccatggccttctggggaacaggctttggtcttctctccagacccactgctgctctcaaaacaagtgtaacttctatgacaacaaagacctggaatgcgtgaccaatcttcaggaagtggcccgcatcgtgggcaactctggcctcaacatctacaatctctatgccccgtgtgctggaggggtgcccagccattttaggtatgagaaggacactgttgtggtccaggatttgggcaacatcttcactcgcctgccactcaagcggatgtggcatcaggcactgctgcgctcaggggataaagtgcgcatggaccccccctgcaccaacacaacagctgcttccacctacctcaacaacccgtacgtgcggaaggccctcaacatcccggagcagctgccacaatgggacatgtgcaactttctggtaaacttacagtaccgccgtctctaccgaagcatgaactcccagtatctgaagctgcttagctcacagaaataccagatcctattatataatggagatgtagacatggcctgcaatttcatgggggatgagtggtttgtggattccctcaaccagaagatggaggtgcagcgccggccctggttagtgaagtacggggacagcggggagcagattgccggcttcgtgaaggagttctcccacatcgcctttctcacgatcaagggcgccggccacatggttcccaccgacaagcccctcgctgccttcaccatgttctcccgcttcctgaacaagcagccatactgatgaccacagcaaccagctccacggcctgatgcagcccctcccagcctctcccgctaggagagtcctcttctaagcaaagtgcccctgcaggccgggttctgccgccaggactgcccccttcccagagccctgtacatcccagactgggcccagggtctcccatagacagcctgggggcaagttagcactttattcccgcagcagttcctgaatggggtggcctggccccttctctgcttaaagaatgccctttatgatgcactgattccatcccaggaacccaacagagctcaggacagcccacagggaggtggtggacggactgtaattgatagattgattatggaattaaattgggtacagcttcaaaaaaaaaaaaaaaa

SEQ ID NO: 1288 - DNA, 895 bp, Homo sapiens
ttatttttctgtgtgtcccatacaggcccccaccatgaagggtttcacagccactctcttcctctggactctgatttttcccagctgcagtggaggcggcggtgggaaagcctggcccacacacgtggtctgtagcgacagcggcttggaagtgctctaccagagttgcgatccattacaagattttggcttttctgttgaaaagtgttccaagcaattaaaatcaaatatcaacattagatttggaattattctgagagaggacatcaaagagctttttcttgacctagctctcatgtctcaaggctcatctgttttgaatttctcctatcccatctgtgaggcggctctgcccaagttttctttctgtggaagaaggaaaggagagcagatttactatgctgggcctgtcaataatcctgaatttactattcctcagggagaataccaggttttgctggaactgtacactgaaaaacggtccaccgtggcctgtgccaatgctactatcatgtgctcctgactgtggcctgtagcaaaaatcacagccagctgcatctcgtgggacctccaagctcctctgactgaacctactgtgggaggagaagcagctgatgacagagagaggctctacaaagaagcgcccccaaagagtgcagctgctaattttagtcccaggaccagacatccccagactccacagatgtaatgaagtccccgaatgtatctgtttctaaggagcctcttggcagtccttaagcagtcttgagggtccatcctttttctctaattggtcgcctcccaccagactcacctgcttttcaactttttaggagtgcttcctcacagttaccaagaataaagaaagctggccaccataaaaaaaaaaaaaaaa

SEQ ID NO: 1289 - DNA, 2629 bp, Homo sapiens
accgccccgcgctccgctgccaggggcgggagggaggaatggttgcttcacgccccgggggaagagacgggaagctcggctctgggttgcgggccccggcgtctccgcgtggggcgcaccgtccgacccccccctcccggtgtgcagcgccccgcaccgccccgcctcgcctgggagaagccgccgggacgcgccgggctggagtgggcggttataggctttgagctaggccgtttccgggaggcggagctcagaccccatttcctttctccacatccaggtcaggtggcgtttgctgtggcggctaggcccgcgtgcgctggagacctccgcgctggcccccgcgagcctcctgccctggcccggcgctgcggctctgccgcggcggcagcatgggtggcccccggggcgcgggctgggtggcggcgggcctgctgctcggcgcgggcgcctgctactgcatttacaggctgacccggggtcggcggcggggcgaccgcgagctcgggatacgctcttcgaagtccgcaggtgccctggaagaagggacgtcagagggtcagttgtgcgggcgctcggcccggcctcagacgggaggtacctgggagtcacagtggtccaagacctcgcagcctgaagacttaactgatggttcatatgatgatgttctaaatgctgaacaacttcagaaactcctttacctgctggagtcaacggaggatcctgtaattattgaaagagctttgattactttgggtaacaatgcagccttttcagttaaccaagctattattcgtgaattgggtggtattccaattgttgcaaacaaaatcaaccattccaaccagagtattaaagagaaagctttaaatgcactaaataacctgagtgtgaatgttgaaaatcaaatcaagataaagatatacatcagtcaagtatgtgaggatgtcttctctggtcctctgaactctgctgtgcagctggctggactgacattgttgacaaacatgactgttaccaatgaccaccagcacatgcttcacagttacattacagacctgttccaggtgttacttactggaaatggaaacacgaaggtgcaagttttgaaactgcttttgaatttgtctgaaaatccagccatgacagaaggacttctccgtgcccaagtggattcatcattcctttccctttatgacagccacgtagcaaaggagattcttcttcgagtacttacgctatttcagaatataaagaactgcctcaaaatagaaggccatttagctgtgcagcctactttcactgaaggttcattgtttttcctgttacatggagaagaatgtgcccagaaaataagagctttagttgatcaccatgatgcagaggtgaaggaaaaggttgtaacaataatacccaaaatctgattggtcatatttttccaaagagtaatgcagtctggatataaacgtattttctgtcttccttataaggggattctcccagctgctaaatttaaacagtaaatatcacattttgtcattaacacagctataacttgccgtggttctcagatttattttggactattttgatgccaagtgaatataagagcttgtactgaaaccatttatttctttctattttgctatttgcaaatgcttgttatcttccctacatgaagtggcagtaacctttttcacatttaagctacccttctaccttttgaagtgatttgcagttactcatctgagacagcatcagtatttgactaaatcattgtttcacaactgaatagtcttgttcttttagtagcaacgaaatcctaagctcttgaggccattcacctgccaacctgaccatactgctttcaaaagtcttttctcatcagtagaatctattttggtcacttctagtcaatgaaaaatgtaaacttttaggagagaatgtttcttaggactcacccactccattcaatgttatatataaaatagtgtgatcaatcacaatgtccatctttagacagttggttaaataaattatctggtctttgaaaagaccgtgctgggcgcggtggctcttgcctgtaatcccagcactttgggaggctgaggcgggcagatcacctgagatcgggagtttgagaccaagcctgaccaatatggagaaaccctgtctctactaagaacacaaaattagctgggcatggtggtgcatgcctgtaatcccagctacttgggaggccgaggcaggagaattgcttgaacccgggaggcagaggttgcagtgagctgagatagcgccattgcactccagcctgggcaacaagagcaaaactctgtctcaaaaaaaaaaaaaaatgatggagctccgaatgtgcttaagtggaaagatatctatgaaatatggtggttttttaaaacacaaaaattatagaatatgggatcccgtgtgtgtgtgtgtgtgtttgaatgaaaaatgcttatgtattgacagaacacttctagaatgatacccaaactcctggagtgggagtggggaatgccttctacgtacacactgttctactgtttgaattttttaatatgagcccaaattgtataatctttttttaataaaggggagaaaaatc

SEQ ID NO: 1290 - DNA, 2081 bp, Homo sapiens
tcagcccacttccggggagggaggcagaggaacccctccccgccgctcacccctaagcccagccctcggctcccacccttgtgtacctgggccgaaccattcaccggagcgcgcagcgggtggagtgtggctcggaggaccgcggcgggtcaagcacctttctcccccatatctgaaagcatgccctttgtccacgtcgtttacgctcattaaaacttccagaatgcaacaggacggacttggagtagggacaaggaacggaagtgggaaggggaggagcgtgcacccctcctggccttggtgcgcgccgcgccccctaaggtactttggaagggacgcgcgggccagacgcgcccagacggccgcgatggcgctgttggccggcgggctctccagagggctgggctcccacccggccgccgcaggccgggacgcggtcgtcttcgtgtggcttctgcttagcacctggtgcacagctcctgccagggccatccaggtgaccgtgtccaacccctaccacgtggtgatcctcttccagcctgtgaccctgccctgtacctaccagatgacctcgacccccacgcaacccatcgtcatctggaagtacaagtctttctgccgggaccgcatcgccgatgccttctccccggccagcgtcgacaaccagctcaatgcccagctggcagccgggaacccaggctacaacccctacgttgagtgccaggacagcgtgcgcaccgtcagggtcgtggccaccaagcagggcaacgctgtgaccctgggagattactaccagggccggaggattaccatcaccggaaatgctgacctgacctttgaccagacggcgtggggggacagtggtgtgtattactgctccgtggtctcagcccaggacctccaggggaacaatgaggcctacgcagagctcatcgtccttgtgtatgccgccggcaaagcagccacctcaggtgttcccagcatttatgcccccagcacctatgcccacctgtctcccgccaagaccccacccccaccagctatgattcccatgggccctgcctacaacgggtaccctggaggataccctggagacgttgacaggagtagctcagctggtggccaaggctcctatgtacccctgcttcgggacacggacagcagtgtggcctctgaagtccgcagtggctacaggattcaggccagccagcaggacgactccatgcgggtcctgtactacatggagaaggagctggccaacttcgacccttctcgacctggcccccccagtggccgtgtggagcgggccatgagtgaagtcacctccctccacgaggacgactggcgatctcggccttcccggggccctgccctcaccccgatccgggatgaggagtggggtggccactccccccggagtcccaggggatgggaccaggagcccgccagggagcaggcaggcgggggctggcgggccaggcggccccgggcccgctccgtggacgccctggacgacctcaccccgccgagcaccgccgagtcagggagcaggtctcccacgagtaatggtgggagaagccgggcctacatgcccccgcggagccgcagccgggacgacctctatgaccaagacgactcgagggacttcccacgctcccgggacccccactacgacgacttcaggtctcgggagcgccctcctgccgaccccaggtcccaccaccaccgtacccgggaccctcgggacaacggctccaggtccggggacctcccctatgatgggcggctactggaggaggctgtgaggaagaaggggtcggaggagaggaggagaccccacaaggaggaggaggaagaggcctactacccgcccgcgccgcccccgtactcggagaccgactcgcaggcgtcccgagagcgcaggctcaagaagaacttggccctgagtcgggaaagtttagtcgtctgatctgacgttttctacgtagcttttgtatttttttttttaatttgaaggaacactgatgaagccctgccatacccctcccgagtctaataaaacgtataatcacaaaaaaaaa

SEQ ID NO: 1291 - DNA, 2179 bp, Homo sapiens
gatccgagccccgcctcctccccctgccccgcctctcccatccccgccccgccccgcccggcgacttaacgcgcccccgccccgcgcccggcctcggcagccgcctgtcgccgcgggagcagccgctatctctgtgtgtccgcgtgtgcgcccggtccccgcctgccgcaccatggagagctaccacaagcctgaccagcagaagctgcaggccttgaaggacacggccaaccgcctacgtatcagctccatccaggccaccactgcggcgggctctggccaccccacgtcatgctgcagcgccgcagagatcatggctgtcctctttttccacaccatgcgctacaagtcccaggacccccggaatccgcacaatgaccgctttgtgctctccaagggccatgcagctcccatcctctacgcggtctgggctgaagctggtttcctggccgaggcggagctgctgaacctgaggaagatcagctccgacttggacgggcacccggtcccgaaacaagctttcaccgacgtggccactggctccctgggccagggcctcggggccgcttgtgggatggcctacaccggcaaatacttcgacaaggccagctaccgagtctattgcttgctgggagacggggagctgtcagagggctctgtatgggaggccatggccttcgccagcatctataagctggacaaccttgtggccattctagacatcaatcgcctgggccagagtgacccggccccactgcagcaccagatggacatctaccagaagcggtgcgaggccttcggttggcatgccatcatcgtggatggacacagcgtggaggagctgtgcaaggcctttggccaggccaagcaccagccaacagccatcattgccaagaccttcaagggccgagggatcacgggggtagaagataaggagtcttggcatgggaagcccctccccaaaaacatggctgagcagatcatccaggagatctacagccagatccagagcaaaaagaagatcctggcaacccctccacaggaggacgcaccctcagtggacattgccaacatccgcatgcccagcctgcccagctacaaagttggggacaagatagccacccgcaaggcctacgggcaggcactggccaagctgggccatgccagtgaccgcatcatcgccctggatggggacaccaaaaattccaccttctcggagatcttcaaaaaggagcacccggaccgcttcatcgagtgctacattgctgagcagaacatggtgagcatcgcggtgggctgtgccacccgcaacaggacggtgcccttctgcagcacttttgcagccttcttcacgcgggcctttgaccagattcgcatggccgccatctccgagagcaacatcaacctctgcggctcccactgcggcgtttccatcggggaagacgggccctcccagatggccctagaagatctggctatgtttcggtcagtccccacatcaactgtcttttacccaagtgatggcgttgctacagagaaggcagtggaactagccgccaatacaaagggtatctgcttcatccggaccagccgcccagaaaatgccatcatctataacaacaatgaggacttccaggtcggacaagccaaggtggtcctgaagagcaaggatgaccaggtgaccgttatcggggctggggtgaccctgcacgaggccttggccgctgccgaactgctgaagaaagaaaagatcaacatccgcgtgctggaccccttcaccatcaagcccctggacagaaaactcattctcgacagcgctcgtgccaccaagggcaggatcctcaccgtggaggaccattattatgaaggtggcattggtgaggctgtgtccagtgcagtagtgggcgagcctggcatcactgtcacccacctggcagttaaccgggtaccaagaagtgggaagccggctgagctgctgaagatgtttggtatcgacagggatgccattgcacaagctgtgaggggcctcatcaccaaggcctagggcgggtatgaagtgtggggcgggggtctatacattcctgagattctgggaaaggtgctcaaagatgtactgagaggaggggtaaatatatgttttgagaaaaatgaattggccctgaaaaaaaaaaaaaaaaaa

SEQ ID NO: 1292 - DNA, 1311 bp, Homo sapiens
tcttgccttccggcccggcgcccgatttccgccttccgacccagctgtgggctgcgccccacgccagcccgcgccccgcatggctgccgccggggccaggcctgtggagctgggcttcgccgagtcggcgccggcgtggcgactgcgcagcgagcagttccccagcaaggtgggcgggcggccggcatggctgggcgcggccgggctgccggggccccaggccctggcctgcgagctgtgcggccgcccgctctccttcctgctgcaggtgtatgcgccgctgcctggccgcccggacgccttccaccgctgcatcttcctcttctgctgccgcgagcagccgtgctgtgccggcctgcgagtttttaggaatcaactacccaggaaaaacgatttttactcatatgagccaccttctgagaatcctcccccagaaacaggagaatcagtgtgtctccagcttaagtctggtgctcatctctgcagggtttgtggctgtttaggccccaaaacgtgctccagatgccacaaagcatattactgcagcaaggagcatcagaccctagactggagattgggacataagcaggcttgtgcacaaccagatcatctggaccatataattccagaccacaacttcctttttccagaatttgaaattgtaatagaaacagaagatgagattatgcctgaggttgtggaaaaggaagattactcagagattatagggagcatgggtgaagcacttgaggaagaactggattccatggcaaaacatgaatccagggaagataaaatttttcagaagtttaaaactcagatagcccttgaaccagaacagattcttagatatggcagaggtattgcccccatctggatttctggtgaaaatattcctcaagaaaaggatattccagattgcccctgtggtgccaagagaatattggaattccaggtcatgcctcagctcctaaactacctgaaggctgacagactgggcaagagcattgactggggcatcctggctgtcttcacctgtgctgagagctgcagcttgggtactggctatacagaagaatttgtgtggaagcaggatgtaacagatacaccgtaaaggcatcttaaagccttgaaaaatgttaataatcttttataccttgcaattccatttctgggattttatcctaaggaaatacttataccaaaaatagaggtgcagagatgttgacagattgcttacacagtgtctacttattagtgaaacaaaagtgtccagtgacagggaattaaataaattttggtacatccaca

SEQ ID NO: 1293 - DNA, 2298 bp, Homo sapiens
gagccgcgtagaaggaacgcggcggtgtgccccggaagcggaagtagattctcctatagaaaggctggactacgcggagtggtgacgtttcctcattgggcggaaggttcgctggcactccgttggtcttccagctggtgggagttgacgacgtggtgctgggcgttgggaccctactttatctagttcgggaagttgggttgtggggtcatacctgtctgtctgctcccagctttcttgggtttcttccgacggcgtggggcctcgctaaggaattcccggcccctcagggccacggctttagcggtgtcttttgcgagttcttcgtaagtacatcttaaagctgtcaagatggttctagcagaccttggaagaaaaataacatcagcattacgctcgttgagcaatgccaccattatcaatgaagaggtattgaatgctatgctaaaagaagtctgtaccgctttgttggaagcagatgttaatattaaactagtgaagcaactaagagaaaatgttaagtctgctattgatcttgaagagatggcatctggtcttaacaaaagaaaaatgattcagcatgctgtatttaaagaacttgtgaagcttgtagaccctggagttaaggcatggacacccactaaaggaaaacaaaatgtgattatgtttgttggattgcaagggagtggtaaaacaacaacatgttcaaagctagcatattattaccagaggaaaggttggaagacctgtttaatatgtgcagacacattcagagcaggggcttttgaccaactaaaacagaatgctaccaaagcaagaattccattttatggaagctatacagaaatggatcctgtcatcattgcttctgaaggagtagagaaatttaaaaatgaaaattttgaaattattattgttgatacaagtggccgccacaaacaagaagactctttgtttgaagaaatgcttcaagttgctaatgctatacaacctgataacattgtttatgtgatggatgcctccattgggcaggcttgtgaagcccaggctaaggcttttaaagataaagtagatgtagcctcagtaatagtgacaaaacttgatggccatgcaaaaggaggtggtgcactcagtgcagtcgctgccacaaaaagtccgattattttcattggtacaggggaacatatagatgactttgaacctttcaaaacacagccttttattagcaaacttcttggtatgggcgacattgaaggactgatagataaagtcaacgagttgaagttggatgacaatgaagcacttatagagaagttgaaacatggtcagtttacgttgcgagacatgtatgagcaatttcaaaatatcatgaaaatgggccccttcagtcagatcttggggatgatccctggttttgggacagattttatgagcaaaggaaatgaacaggagtcaatggcaaggctaaagaaattaatgacaataatggatagtatgaatgatcaagaactagacagtacggatggtgccaaagtttttagtaaacaaccaggaagaatccaaagagtagcaagaggatcgggtgtatcaacaagagatgttcaagaacttttgacacaatataccaagtttgcacagatggtaaaaaagatgggaggtatcaaaggacttttcaaaggtggcgacatgtctaagaatgtgagccagtcacagatggcaaaattgaaccaacaaatggccaaaatgatggatcctagggttcttcatcacatgggtggtatggcaggacttcagtcaatgatgaggcagtttcaacagggtgctgctggcaacatgaaaggcatgatgggattcaataatatgtaaagaaaatgccttaatataaactgactcagttgaatacctaatttgctgagacctcagcgtttcccttctttttgcgaattggggggaaagtgtatttttcttgcttatcatgcactctttccttttcttctcgcccgcttttcccctccttttctttttccttccttctttcctccctttaatataagggagaaatacatggtttttgtggaaatcattatatgtttgctttagattttcttctgttttcaccatcataacacttaagttaaatcatgatgtaaaattttagtacttaaaggtttttaattatctcgaaggccaagcattgcatttgtaaacagtcctggtcagtagttaaataatgtttcaattaaagtgctgtaaaataaacttcaaagtggttataagttaaaaaaaaaaaaaaaaaaa

SEQ ID NO: 1294 - DNA, 3615 bp, Homo sapiens
gaggccgcgcggggcccgggcttcggccgatcagcccgggaggccccgccgcgcccccttggcccgcgcgcccgtggtcacagtggaagaggcgcccgcgctgcgctgcccggaggagccgtcgcgcgcccgcttcctgttcggctggttcctgccagctcgaggacaaaacacgcgtgcgcgcggcgggcgagcgcgctcgccgcctcagtcgccagcgccgggcgcagtccgcctttttccggagcagactggccgcggtgctagtcggtagcagcggccgccgcagcggctccgcactggcgaaccgagggcagaaaaaggcggggttgacggctttttggtaggagtgggctggaccggacgccagagacaaaggctcccaaggcaagagggactgtggccctgcgtcggctctgctcgggactgctgaccccaggaatttacgccccttcgtttttctcttctgattcttctcttctcccaagcccgcgtcccctcacgcgtggcctctctccttgccgggagggccgcgatggaggtcccgcccaggctttcccatgtgccgccgccattgttcccctccgctcccgctactttagcctcccgcagcctctcccattggcggccgcggccgccgcggcagctagccccgctcctcccttcgctcgctcccagctccgcccggcagggggcgcgccgggcccagcgccacgtcaccgcccagcagccctcccgattggcgggcggggcggctataaagggagggcgcaggcggcgcccggatctcttccgccgccattttaaatccagctccatacaacgctccgccgccgctgctgccgcgacccggactgcgcgccagcacccccctgccgacagctccgtcactatggaggatatgaacgagtacagcaatatagaggaattcgcagagggatccaagatcaacgcgagcaagaatcagcaggatgacggtaaaatgtttattggaggcttgagctgggatacaagcaaaaaagatctgacagagtacttgtctcgatttggggaagttgtagactgcacaattaaaacagatccagtcactgggagatcaagaggatttggatttgtgcttttcaaagatgctgctagtgttgataaggttttggaactgaaagaacacaaactggatggcaaattgatagatcccaaaagggccaaagctttaaaagggaaagaacctcccaaaaaggtttttgtgggtggattgagcccggatacttctgaagaacaaattaaagaatattttggagcctttggagagattgaaaatattgaacttcccatggatacaaaaacaaatgaaagaagaggattttgttttatcacatatactgatgaagagccagtaaaaaaattgttagaaagcagataccatcaaattggttctgggaagtgtgaaatcaaagttgcacaacccaaagaggtatataggcagcaacagcaacaacaaaaaggtggaagaggtgctgcagctggtggacgaggtggtacgaggggtcgtggccgaggtcagggccaaaactggaaccaaggatttaataactattatgatcaaggatatggaaattacaatagtgcctatggtggtgatcaaaactatagtggctatggcggatatgattatactgggtataactatgggaactatggatatggacagggatatgcagactacagtggccaacagagcacttatggcaaggcatctcgagggggtggcaatcaccaaaacaattaccagccatactaaaggagaacattggagaaaacagcgggaacttcattgcaggccgtgtgtcaccctgaccacgtctatctctgggggtcgcacgttgcgggcagagcgcaaggcatacaccagaaaacgctgtcctgtggaggagatgttaaagtaacccatcttgcaggacgacattgaagattggtcttctgttgatctaagatgattattttgtaaaagactttctagtgtacaagacaccattgtgtccaactgtatatagctgccaattagttttctttgtttttactttgtcctttgctatctgtgttatgactcaatgtggatttgtttatacacattttatttgtatcatttcatgttaaacctcaaataaatgcttccttatgtgattgcttttctgcgtcaggtactacatagctctgtaaaaaatgtaatttaaaataagcaataattaaggcacagttgattttgtagagtattggtccatacagagaaactgtggtcctttataaatagccagccagcgtcaccctcttctccaatttgtaggtgtattttatgctcttaaggcttcatcttctccctgtaactgagatttctaccacacctttgaacaatgttctttcccttctggttatctgaagactgtcctgaaaggaagacataagtgttgtgattagtagaagctttctagtagaccatatttcttctggattgtaataaaattgttagtagctccttttactttgttcctgtctctggaaagccatttttgaattgctgattactttggctttaatcagtggtcacctagaaaaagctttgtaatcataacacaatgagtaattcttgataaaagttcagatacaaaaggagcactgtaaaactggtaggagctatggtttaagagcattggaagtagttacaactcaaggattttggtagaaaggtatgagtttggtcgaaaaattaaaatagtggcaaaataagatttagttgtgttttctcagagccgccacaagattgaacaaaatgttttctgtttgggcatcctgaggaagttgtattagctgttaatgctctgtgagtttagaaaaagtcttgatagtaaatctagtttttgacacagtgcatgaactaagtagttaaatatttacatattcagaaaggaatagtggaaaaggtatcttggttatgacaaagtcattacaaatgtgactaagtcattacaaatgtgactgagtcattacagtggaccctctgggtgcattgaaaagaatccgttttatatccaggtttcagaggacctggaataataaaaagctttggattttgcattcagtgtagttggattttgggaccttggcctcagtgttatttactgggattggcatacgtgttcacaggcagagtagttgatctcacacaacgggtgatctcacaaaactggtaagtttcttatgctcatgagccctccctttttttttttaatttggtgcctgcaactttcttaacaatgattctacttcctgggctatcacattataatgctcttggcctcttttttgctgctgttttgctattcttaaacttaggccaagtaccaatgttggctgttagaagggattctgttcattcaacatgcaactttagggaatggaagtaagttcatttttaagttgtgttgtcagtaggtgcggtgtctagggtagtgaatcctgtaagttcaaatttatgattaggtgacgagttgacattgagattgtccttttccctgatcaaaaaatgaataaagcctttttaaacaaaatccaaacttttaa

SEQ ID NO: 1295 - DNA, 2338 bp, Homo sapiens
gctccgcgcttctgcttccggcggcgctggtggtggcgcgcggcgcggcgcggcgatggcggcgggtggcagcgatccgcgggctggcgacgtagaggaggacgcctcacagctcatctttcctaaagagtttgaaacagctgagacacttctaaattcagaagttcatatgcttctggaacatcgaaagcagcagaatgagagtgcagaggacgaacaggagctctcagaagtcttcatgaaaacattaaactacacagcccgtttcagtcgtttcaaaaacagagagaccattgccagtgttcgtagcttgctactccagaaaaagcttcataagtttgagttggcctgtttggccaacctttgcccagagactgctgaggagtccaaggctctaatcccaagcttggagggacggtttgaagatgaggagctgcagcagattcttgatgatatccagacaaagcgcagctttcagtattaatctccaaacatcactgctgctcggagaaaccacatccccaggcataacaccaccttcccactgtctggggctgacttgcacagaaattctgttgaagacagttgagaattcctttggagaaaacagcccagcttggcgtggggttaggttgctgtttcaaataactcacaggcccaggtgacatggaatcttggagcagccttgtgcagtggcagccagtggcttcctgaacgtgcctctgcgaagtgtgagatgaggggtcacataaccacactgttgactacctcattcctggtttttggcctccacatcatcttttttcttaatatttcatgttttaatttcagggtgtttatactttttgaaactagaccagaagatagtagactttatagagaaagaccagttttacctagatactaaaggaagaattaaaccgctgttagtttgaaatgctttttttttttttttttaaatggagatagggtcttaactcttgtccaggctggaggagtgcagtcgtacagtcatggctcactgaagtcttgaccccgctgcctcagcctcccaaataactggggccacaggtgtgcaccacaactctcagctaatttttaaaattttttatagaggtggggttttactatgctgtccagactggtcttaaactcctgggctcaagtgatccccctgccttggcctcccaaactggtgagattacaggcatgagccaccacaactggcctgaaattcttaaaggatgggagtgtcgatgacagcaccttggcatcgttgtgcctaacctgggagacggaagaagcacgccatgggaagtgtttacacttggggacaagtgctaagtattgtggagcccatagccccttgagatagatggctactttgcctttcttcttgaactgtcttgcagaatgtggatttggggtaagtggtcttgaaggattcatttagtcaccctcaaattaagatttttacttcatctttcttgggcctgcacctccaagataacaaagaagaagcaatggtcgtgccaaagaggtccacaaccaggtgtgcactgttcactgcagcccatttgctgtatgaactgtggttgttgtgtgcccaatgacaaggctactaagaaattcatcatttgaaacgtagaggccgcagcagtcagcgatgtttctgaaatgagcatccttgacgcctgtgtacttcccaggctggatgtgaagctacattaccatgtgagttgtgccattcacagcacagtggtgaggaattgagctcatgaagcaggcaaggaccgaacacctccaccccaacgtagacctgcaggtgctgccccatgacctccaccaaagcccatataaggagcggagttgttaaggactgaagaaaaacttctctggagaaaaataaaattgcaattctacttaaaaaaatttttttttttttttacttcataggccaggcttgaagttctgaacactttgaagtctccaattatgagagatccagtctaagcctctggcctgctaattagcaataagtgctttatttggaaggagggagtcatccactcttgagccactgcagtgaagtcacttgatctcagtctgggggaaaacacttcaatagctaaacattctagctttgatttttctgaagggaatacacttgttttcaattttggggtttttctttggggcacttgcttgactctgtatgaacttgtgatccaaggaaaaaggagaaagaacagtgttggcttttaaaatcaggatggttttatgtttgctacgaaataaggcaagaataaaaaattcttatttttaaaaaaaaaaaaaa

SEQ ID NO: 1296 - DNA, 1555 bp, Homo sapiens
tcagcgcggctcatcttcgcccagccaggacacgcaggatcgcgttatctgtccctcccgcgggcacattgggagttgtagtctaattatatatttccgcccttagtgtggggagagcgggaactactcgacccacagagccgatcgcggagcggattctgcttttaggagtacccgccaacaagcgggaccgagcaggaatccgtatctgggaacaggatgcccctgtcccgctggttgagatctgtgggggtcttcctgctgccagccccctactgggcaccccgggagaggtggctgggttccctacggcggccctccctggtgcacgggtacccagtcctggcctggcacagtgcccgctgctggtgccaagcgtggacagaggaacctcgagccctttgctcctccctcagaatgaacggagaccagaattcagatgtttatgcccaagaaaagcaggatttcgttcagcacttctcccagatcgttagggtgctgactgaggatgagatggggcacccagagataggagatgctattgcccggctcaaggaggtcctggagtacaatgccattggaggcaagtataaccggggtttgacggtggtagtagcattccgggagctggtggagccaaggaaacaggatgctgatagtctccagcgggcctggactgtgggctggtgtgtggaactgctgcaagctttcttcctggtggcagatgacatcatggattcatcccttacccgccggggacagatctgctggtatcagaagccgggcgtgggtttggatgccatcaatgatgctaacctcctggaagcatgtatctaccgcctgctgaagctctattgccgggagcagccctattacctgaacctgatcgagctcttcctgcagagttcctatcagactgagattgggcagaccctggacctcctcacagccccccagggcaatgtggatcttgtcagattcactgaaaagaggtacaaatctattgtcaagtacaagacagctttctactccttctaccttcctatagctgcagccatgtacatggcaggaattgatggcgagaaggagcacgccaatgccaagaagatcctgctggagatgggggagttctttcagattcaggatgattaccttgacctctttggggaccccagtgtgaccggcaaaattggcactgacatccaggacaacaaatgcagctggctggtggttcagtgtctgcaacgggccactccagaacagtaccagatcctgaaggaaaattacgggcagaaggaggctgagaaagtggcccgggtgaaggcgctatatgaggagctggatctgccagcagtgttcttgcaatatgaggaagacagttacagccacattatggctctcattgaacagtacgcagcacccctgcccccagccgtctttctggggcttgcgcgcaaaatctacaagcggagaaagtgacctagagattgcaagggcggggagaggaggctctcaataaataatcgtgtaaccttcaaaaaaaaaaaaaaaaaaa

SEQ ID NO: 1297 - DNA, 1008 bp, Homo sapiens
atgaacatttcagatgtcatctcctttgatattttggtttcagccatgaaaacaggaaatcaaagttttgggacagattttctacttgttggtcttttccaatatggctggataaactctcttctctttgtcgtcattgccaccctctttacagttgctctgacaggaaatatcatgctgatccacctcattcgactgaacaccagactccacactccaatgtactttctgctcagtcagctctccatcgttgacctcatgtacatctccaccacagtgcccaagatggcagtcagcttcctctcacagagtaagaccattagatttttgggctgtgagattcaaacgtatgtgttcttggcccttggtggaactgaagcccttctccttggttttatgtcttatgatcgctatgtagctatctgtcaccctttacattatcctatgcttatgagcaagaagatctgctgcctcatggttgcatgtgcatgggccagtggttctatcaatgctttcatacatacattgtatgtgtttcagcttccattctgtaggtctcggctcattaaccactttttctgtgaagttccagctctactatcattggtgtgtcaggacacctcccagtatgagtatacagtcctcctgagtggacttattatcttgctactaccattcctagccattctggcttcctatgctcgtgtgcttattgtggtattccagatgagctcaggaaaaggacaggcaaaagctgtttccacttgttcctcccacctgattgtggcaagcctgttctatgcaaccactctctttacctacacaaggccacactccttgcgttccccttcacgggataaggcggtggcagtattttacaccattgtcacacctctactgaacccatttatctacagcctgagaaataaggaagtgacgggggcagtgaggagactgttgggatattggatatgctgtagaaaatatgacttcagatctctgtattga

SEQ ID NO: 1298 - DNA, 1746 bp, Homo sapiens
gggaagctcccctccgagactctggatagccgccgggggggcgttgcctggccggctggttgcgtagcaacggcaggcggtgcgtgacgtgcgcagccgcgttccgtcctgaggcgcgcccgccccggggtaagctcgcgccgccgcgtcagctcagcgctgggtctctcggtcccgcagccgtgaggaggacggtctgcatactcgctgcccgccggctccctcccccgcgtccctgcgaccgccgcggcgaagatgattttcagttcacccactagaggcaaagacgtaagagagctaccagcgtattgagaggagatacacaggcactacgagaatggagtttagaagaaggtcagagccctgggcagtgttgggccaggctttagggcctcaggagtgcaagtagctgatgaagtatgtcgcattttttatgacatgaaagttcgtaaatgctccacaccagaagaaatcaagaaaagaaagaaggctgtcattttttgtctcagtgcagacaaaaagtgcatcattgtagaagaaggcaaagagatcttggttggagatgttggtgtaaccataactgatcctttcaagcattttgtgggaatgcttcctgaaaaagattgtcgctatgctttgtatgatgcaagctttgaaacaaaagaatccagaaaagaagagttgatgttttttttgtgggcaccagaactagcacctctgaaaagtaaaatgatctatgcaagctccaaggatgcaattaaaaagaaatttcaaggcataaaacatgaatgtcaagcaaatggaccagaagatctcaatcgggcttgtattgctgaaaagttaggtggatccttaattgtagcctttgaaggatgccctgtgtagattattcagtgccacaaattgaaagcttccatgtttaatgttatcctcttgctatataaataaagcaaatatatttaggccagggtctcactgagggggagctgtcttgtcatcttttagagtaaactattctataaacatatgcaaacagccctaaataaatctaaagtctaaagttttattgatgtgaaattaaattcttattggccaaatgcctgttttgatgagttgatttataaagatttttgttaagctcaggattttaaattacacagttcacaaacagtaaaggccatgtgaagagaattattacatctttattaacctcagcatttactttgtttcttttgcttaggaaattgctcataatctggttataattttggtccaaattctttattcttccttgagctaagcagaataatggaatataatatgtcttcataatataacaacactaatacactaatagtaagattaagttaggcagtcttctaccaaatgtgtaatggagattgcctcaaaattgtgtccacataatccacgctcatcttgcaaagcgctatttcaggcacatcattggaatacaggaagtagccctgcacctgccagtgagctcgccattcactgattggaagagtgacctggcatcttggaaatcattgtgtgtcttcaggagaatgtgcagtgtcttgtaacaactaattataatgcaaattagggctacattgtaatctgctttgttaatgaaaatgataaaacagaatattgacaagctaggacacctgtggtatctttaattgtatctccttcagaagtttgcttcttatggtataataaagtatggaagaatattgagta

SEQ ID NO: 1299 - DNA, 8733 bp, Homo sapiens
ttggggagagctggtgagcaagagtctggcccgagttagctagagctgttgccatgacaagcattttcttaagaaagctctgctgttgagatcgtccaaagctgggggctgggagggggggcacgaacttcgtggggcaccatccctccgaagagagcaagatcagagacacccgcccagctctcctgcaccctttttctttcaggaacctgagaggtccttcccattggaggggcagggggaggagacccagcccactccccggccttagccagaaaggcaagagagcaaagccagcgtctctagcttggttgccacactggggagactggtgggtggtcaccccaccctaccctcatccatggaaacccggagggagagtcccgcctgaagaaacctggatctttgctagaaagagagagatccagttgtcatcggtatccaggaagctctcctcttcctcctcctgacgtctaccactacagttgctggttgttgctaaggttgctgccatggtaacatgcacatcctgtttacaccttcatctgggcaagttggtctaagctaggaacctacctaccctggacaaccactatcatcaccacctggggacaccaatcatcgtgacacggagtccaccttccactcagttcccccatcctcttcctcctctcgctgccagacttcatacggaagaaaggatctagacttcggacggctactcgggagcttattgcacaagatatattcaatctattccctcactgggcccccagagaagcaagaagtaggaagaagttgagacagggaggcaggagacactggtcagttgaagggaaacgctacatcttctctggttgaggggcttggtaacagcaggcaaaatgacgaacccatcagaccgtgtcttgcctgccaactcgatggccgagagccgtgaaggggactttggctgcacagtaatggaactgaggaagctcatggagctgcgttcaagggatgcactgacccagattaatgtccactatggaggtgtacagaatctctgcagtagactgaaaacctcccctgtggaaggtctgtctgggaaccctgcagatctggagaaacgtaggcaggtgtttggacacaacgtgatcccccccaaaaagcccaagactttcttagaattagtgtgggaagctcttcaagatgtcacgctcatcatcctggagattgcagccatcatctccctggtcctgtccttttatcgccctgctggtgaagaaaatgaactgtgtggtcaagtcgcaactaccccagaagatgaaaatgaggcacaagctggctggattgagggggcagccatccttttctcagtgatcatcgtggtgttagtgactgcctttaatgattggagcaaagagaagcaattccgggggctgcagtgccgcattgaacaggagcaaaagttctccatcatccgaaacggtcaactcatccagctccctgtggctgagattgtggttggtgatattgcccaagtcaaatacggtgatctgctgcctgcagatggaatcctgatccaagggaatgatctgaagattgatgagagctctctgacaggggaatctgaccatgtcaagaagtccctggacaaagaccccatgttgctctcagggacccatgtcatggaaggttctggccggatggtggtgacagctgttggtgtcaactctcagactggaatcatccttactctcttgggggtcaatgaggatgacgaaggggagaaaaagaagaaaggtaaaaaacaaggagtccctgaaaatcgcaacaaagcaaagacccaagacggagtggccctggaaatccagccactcaacagccaggagggaatcgacaatgaggaaaaggacaagaaggcagtcaaggtgcctaaaaaggagaagtcagtgctgcagggcaagctgactcgcctggctgttcagattgggaaagccggtctgctcatgtctgctctcacggttttcatcctgattctatactttgtgattgacaactttgtgataaatcgcagaccatggctccctgagtgtactcccatctacatccagtactttgtcaagttcttcatcatcggcatcactgtactggtggtggctgtgccagaggggctgcctctggctgtcaccatctcactggcctactctgtgaagaaaatgatgaaagacaataacctagtacggcacttggatgcttgtgagaccatgggcaacgccaccgccatctgctctgataagacaggcacgttgaccatgaaccgcatgactgtggtacaagcttatattgggggcatccattaccgtcaaatcccaagccctgatgtcttcctgcccaaagtcctggacctcattgtcaatggcatttctatcaacagtgcttatacctccaagattctgcctccagagaaggagggaggcctgcctcggcaggtgggcaacaagaccgagtgtgctctgctaggctttgtcacagatctgaagcaggattatcaggctgtgcgtaatgaagtgcccgaggagaagctctacaaggtgtacacctttaactcagtgcgcaagtcaatgagcaccgtcatcaggaatcccaacggtggcttccgtatgtacagcaagggcgcctctgagatcatcttgcgcaagtgtaatcgaatcctggaccggaaaggggaagcagtgccattcaagaataaagacagagatgatatggtacgcactgtcatcgagcccatggcctgtgatggactccggactatctgcatagcttaccgggacttcgatgacacagagccctcttgggacaatgagaatgagatcctcaccgaactgacctgtatcgcggtggtgggcattgaggaccctgtgcgcccagaggtgccagatgctattgccaaatgcaaacaagctggcattactgtcagaatggtgacaggtgacaacatcaacacagcccgggccattgccaccaaatgtggcattctgacacctggggatgacttcctgtgcttagaaggcaaagaattcaaccggctcatccgcaacgagaaaggcgaggtagagcaagaaaagctggacaagatctggcctaagcttcgggtcctggcgcgatcttctcccactgacaagcacaccctggtgaaaggcataattgacagcactgttggggaacaccggcaggtcgtggctgtcactggtgatggcacaaatgacgggcctgctctgaagaaagcggatgttggttttgccatgggcatcgcaggcacagatgtagcaaaggaggcttcagacatcatcctaacagatgacaacttcaccagcattgtgaaggcagtgatgtggggacgaaatgtctatgacagcatctccaagttcctgcagttccagctcactgtcaatgtggtggccgtgattgtagccttcactggagcctgtatcactcaggattccccattgaaagctgtgcagatgttgtgggttaatctgatcatggacacttttgcttcattggccctggccacagagccccctacggaatctctgttgaagcggcgcccctatggccgaaataagcctctgatctcacgcactatgatgaagaacatcttgggccatgcattctatcagctcattgtcatctttatccttgtctttgcgggtgagaaattctttgatattgatagtgggaggaaggcacctctacattcaccacccagccagcactataccattgtttttaacaccttcgtgctgatgcagctcttcaatgaaatcaactcccgaaagatccatggagagaagaacgtcttttcaggcatctaccgcaacattatcttctgctctgtagtcttgggcacattcatctgccagattttcatcgtggaatttgggggtaaacccttcagttgtacaagcctcagcctgtctcagtggctgtggtgtctcttcattgggattggagaacttctgtggggccagttcatctccgcaatacctacccgatccctgaagttcctgaaggaggctgggcatggcaccaccaaagaggagatcaccaaggatgccgagggactggatgagattgaccatgctgagatggagctgcgccgaggccagatcctctggttccggggcctgaaccgtatccagactcagatcaaagtggtcaaagcgttccatagttccctccacgaaagcattcagaaaccctacaaccaaaagtccatccacagcttcatgacccaccctgaattcgccatagaggaggagttgccacgaacaccactcctggatgaggaagaggaggaaaatcctgacaaggcttctaagtttgggactagggtgctcctgttggatggtgaggtcactccatatgccaatacaaacaacaatgcggtggattgcaaccaagtgcagctcccccagtcggacagctctctacagagcctagagacatcagtttgaattttctttctctgactctcatccctattttacctatttccattttcgtctatcccatctatgaggtgatgatgggacttttcattgtcacgtcagctgctgtgttaacagcagtgtgtgtgaagtgaacctctacctgaccatgaagaggcaagagcacagacttacaaggatttcaacttaagcttgacttggggtttgtagcgggacccagtcaaaccccattcaggtcatggtagaatctactccttggtagtcacttgtcatttttaaagaaatgatgacaatcctcttggcatcaccccaccccacattctccccgatgttcctctcctgaattctggattttgtcctacaagtctgtgccatttataagctaagttgagggttcagagggagacaaatatccccaagtgaaatatgttgcggtagagatggaatgtataaaatccgccagtagtgtgattgtttttcaatttttcccactttgaaaacttacacctaaaggcctgtaggcctctaactctttctgccctttcattcaaacctctccaaagttctttgtcttttgtcttcccttcctttccttttttttttttttttttatgatgattaagaaaatggaaaggatatggatgaattgtgtaaacttagatccttctcccttttggcccaaaagaacccttgatttagttccagaatccaaccagtttctttgttaaaagggtccttttgaagcaattaagtgctggtaagaatatttctctgttgttgccaggttaccttctgcttttaaattgccatcttgtaaagtgtatgtggttcttaagtgccagggagatcagccttgcccatgaaggttgcatatgtgtggtatacagtttttacctgaaagcctgagctttctcttattcctaaagtggtggcaaaagaatgaactgggtatgaccctgcccccttactgggcttggatattgaggaccagacgctgccaaatctaggacaagacagaccatcaaagcagacttttgtgggctcctctttggggtgaccactgctttcaaagccatctgccaaggctctccagggcaggacctgactggtggggaatgagtgttcagaagccttgggagaggccaaagagccattctagcatgatctgagaaaaccttcctgcagaggccagaaaccttgagcttaggtgcctggggaccagcttcgacattctctccagtttctgattctaatttttgccacgtgtcacaacttttccagtctctgagaaggtcccagcctttctcaaatattctgattttgaaaatatgtatccaaagtgggaggcccctgtgacattttgccaacttaaacgagaaaaagaccccccgcacccggcacactcccccttcctccagccccgcttcagccacatgctccagctgctgcccagtaaagccctgtgcctttttttcccctgaatactgcccaaagcatccccttcccatctgcctctcaggagttggggactttgctaggagattttttaagtgttccttactgggacaacgtggagccacgtttgcaggagctccatttgtatccctgctggtgttgacttctgtgtaggggccagttcatgtccctgactctcacctcccattagataaatgaagcccacccccctttctagagtgatgagagtcaagaagaggggatgtatgaacggccaaattcccatgtgagaggaagatgacctgatccacctagccttttcttctggatctgtcctccctcacccctttcacctgagctgtccacagtaggaaacataaagaaacaatgtcccctacatatccccatgactacataatccatcatcgtaggaaataggaaagcaaatttgattttggttttgtaaaacgtacatgcttcaataattcttttttgtgtcttaaatactcataggggaaaaaaacagctcacccaaggtgttaggtttcacatatatattcatcaactattttagaagatttaattctatcaaatcttgtattacctcagatcattttaaatagcaagccaataacgagctttgaaggctattttaccattcctgttcacaaaaggttctcatggtgcctgacaggttacccttgagggcttgtgtctactttttaaaagtcaatggttttttttcttgtgttctagtttccataataggagagaaaatatagaaatatatgcaaaaattatagttttctttagatcagaaactgatatttttgggtcagccatatgtattttgtttaaaggatttaaaataaagtgccgtcatgtagccctgtggaagggagcacataaccagctgtttggcatgacaggtgacttagtatatttgtaattggttttaaaaccaatacaccatactttctttctgcaaacagccatctttatacttagggaagaaaaattgttgggttctagacttttttaatataaattttgttgatatggaattaggtaagtttaagtgtctatgtgcatatgttttttatataagttttttctattcagtttcactgatccaactggcagtgggtaaatatggcataagttaataacacttttccccaaaatggtgctttggatttgaaaagggtctgatggggagaaggagaacgtatcatcctagcttcctctcttaataaacctagaaaaacgggtagtaaactgtggatagtcaggaaaacacccagcaagggacacagctgtcaggaaatgaatcttccccccaacccccaccatgcagatggatagacagaatctttcctgactagtcattaggatcaggggcctctgttggatttgtgtttcttgaagaatagctggcagagtggtataaaagacacgaatatctcctggtctataaggatactctgatttggggtttgcatttttcatggtttttatttcctgttccccctggagttttccattagtgagtttttgtgcaaggatcttatttgtgatgccttccctcccctagaaagattttgtgcaatatattaaatggggacagaattctaaatggataaaacaatggctggttctagccctgagtgacagtcttaaggctagatccttcccatagtatcatctgtcctctggaatgactctcctgtccctaaaggggttaagagagagatcacctagaaatccctctggacacttgtgggttctttagggtttgagtttcttcttccccttgagcttcagagaggagagttggcatggttaaatctgaatggttacctcactgctgaaaacccagaggggcgtggcacactcgcttgtgtggaaaagcctctaaatgcatcccttcctttctttcctgcttcctttgccttacaattgaagcagcccgtggtaccatcacagtatgcagagacttcctcacctttcatatctagggaccacccccgatgcattggtgagggtgggcacttataaatgcctgctattgttaagccattccagcctcttcctctgaatagaccagacgccctttcacttagttcagtgccagtccttttgccttcccaaccctgctgttaggcctgctgttccctttgctcttgattaggagagatggaaggagatgagctcccataactgaattggcctttggttcatgttttctccccatatgtatatatgccatatgtgaatatgccatatatatgtgccaacaaatctatctacgttgttcttttcaaattagcacgcagataggaattttgagtttcttcttcttttagtaactagtataacaagcactggtatttttgtacaaaaaagaaaaacaaaagattgactattgtggtctgcatgacataaacaaacaaatggtgatatcaaagcaacgtataccccagtccagtgtgtgttgccataatttgcaattcagcttaacagtgcacccaatctatatttgcattttgatattatttaagctctatgtacaaggttttgcatgtatttatatggttcttagggaaaaaaaatgctataaactgcaaatctgaaattcaaatgtgttgttccactgagaccagaagaagaagaggagttttaaaagggataatttgttggagccaataaagctttttgctgatgaacagaaaccaatactgctgtgcactgagaataaaaactcatgcccacttgtaaaaaa

SEQ ID NO: 1300 - DNA, 2495 bp, Homo sapiens
gcgcgctccgctcggcagcctgtgggacgcgaccgcggcgctagtctcgttcctttgtgctgcggcggcggcttctcgagtcctccccgacgcgtcctctaggccagcgagccccgcgctctccggtgacggaccatgtcggcggcgggagcgggcgcgggcgtagaggcgggcttctccagcgaggagctgctctcgctccgtttcccgctgcaccgcgcctgccgcgacggggacctggccacgctctgctcgctgctgcagcagacaccccacgcccacctggcctctgaggactccttctatggctggacgcccgtgcactgggccgcgcatttcggcaagttggagtgcttagtgcagttggtgagagcgggagccacactcaacgtctccaccacacggtacgcgcagacgccagcccacattgcagcctttgggggacatcctcagtgcctggtctggctgattcaagcaggagccaacattaacaaaccggattgtgagggtgaaactcccattcacaaggcagctcgctctgggagcctagaatgcatcagtgcccttgtggcgaatggggctcacgtcgacctgagaaatgccagtggcctgacagcagcagacattgcacaaacccagggtttccaagagtgtgcccagtttctcttgaacctccagaattgtcatctgaaccatttctataacaatggcatcttaaatgggggtcatcagaatgtatttcctaatcatattagtgtgggaacaaatcgaaagagatgcttggaagactcagaagactttggagtaaagaaagctagaactgaagctcaaagcttggattctgccgtgccactcacgaatggcgacacagaagacgatgctgacaaaatgcacgttgatagggagtttgctgttgtaacagatatgaaaaacagtagctccgtatcgaatacattgacaaatggatgtgtcatcaatggacatttggacttcccctccacgaccccgctcagtgggatggaaagcaggaatggccagtgcttgacaggaactaacggaattagcagtggattagccccaggacagccgtttccgagtagccagggttctctctgcattagtgggactgaggagccagagaagaccctgagagctaaccctgagttgtgcggttctctgcacctgaacgggagtccaagtagctgcatagccagtaggccttcctgggtggaagacattggggataacctgtactatggacactaccacgggtttggggacactgctgaaagcatcccagaactgaacagtgtggtcgagcattccaagtccgtgaaggtgcaggagcggtacgacagtgccgtgctgggcaccatgcacctgcaccacggctcctagagacgctgacctggctctcggaaacgcaggagtccttcctggtagccagctcagaatacccatgtagcagcaacttgaacgaatgtcacaacttgtacgttttttatatacttcaactttctgaaaaagtaaacttcgacaagttcccagcaactgcttgtttgtgcatgagtagggcttactaagtgcatagatgtttctacagtgaggtgtcctttttataaggtgcacttttggagtttttctgatgccaatctcaacattgtctttttaatactgtcaccagatattgccatttttctttttgttaaaagattatatgatcaagataaattggggtggtaaatcaggtgcctggtaatttatctctttgcacatgggcatcattttaaaaagcttgcttccactcttttctgtagaatttgacggaacacagctatttccctatgcaaggtacagccttacaaagatttctgcagtgatttgtgtgaagaagagaacgtttgtctttttcaatgaagctttgcagatcaccatgtggttgaaggttttagttgtggacacagtggtccctccttaatgatgaagatcactgccttgggcttcatggaaaacaggcccagcctggggctgcgtttggatttattgtttttattccacacttcctacttggtctctggaagttttaccacatgtaacagattcctttatatgtagtggaaatcactatttgtagaaactgtcaggtcaaaatatttaactgactgttgacatgtattttcttttttccttgtttttgttttttggggttttctgctttaagatatataccactatgtatatccagttaactgagagaattttgactctcttaataaaactgcattaagtttttgattttgtagaaattagcttttgtctaggcaactagtggttatactctgcaaatattgtaatgaatttttacttttttgatttttgtaataaaaattggtgcagataaaatgtcaaatgaacaaaccagtgttctaagagtgttactaacattttgttctaaaactgtccttcacaaattgaataaaaaactctcacactca

SEQ ID NO: 1301 - DNA, 10973 bp, Homo sapiens
cccggagcggcgcgggcggcctggagccccgggagcggcgcgcgcggtcccggcccagcggctctcctggcctcgcgctgcacattctctcctggcggcggcgccacctgcagtagcgttcgcccgaacatggcgacacggagcagcaggagggagtcgcgactcccgttcctattcaccctggtcgcactgctgccgcccggagctctctgcgaagtctggacgcagaggctgcacggcggcagcgcgcccttgccccaggaccggggcttcctcgtggtgcagggcgacccgcgcgagctgcggctgtgggcgcgcggggatgccaggggggcgagccgcgcggacgagaagccgctccggaggaaacggagcgctgccctgcagcccgagcccatcaaggtgtacggacaggttagtctgaatgattcccacaatcagatggtggtgcactgggctggagagaaaagcaacgtgatcgtggccttggcccgagatagcctggcattggcgaggcccaagagcagtgatgtgtacgtgtcttacgactatggaaaatcattcaagaaaatttcagacaagttaaactttggcttgggaaataggagtgaagctgttatcgcccagttctaccacagccctgcggacaacaagcggtacatctttgcagacgcttatgcccagtacctctggatcacgtttgacttctgcaacactcttcaaggcttttccatcccatttcgggcagctgatctcctcctacacagtaaggcctccaaccttctcttgggctttgacaggtcccaccccaacaagcagctgtggaagtcagatgactttggccagacctggatcatgattcaggaacatgtcaagtccttttcttggggaattgatccctatgacaaaccaaataccatctacattgaacgacatgaaccctctggctactccactgtcttccgaagtacagatttcttccagtcccgggaaaaccaggaagtgatccttgaggaagtgagagattttcagcttcgggacaagtacatgtttgctacaaaggtggtgcatctcttgggcagtgaacagcagtcttctgtccagctctgggtctcctttggccggaagcccatgagagcagcccagtttgtcacaagacatcctattaatgaatattacatcgcagatgcctccgaggaccaggtgtttgtgtgtgtcagccacagtaacaaccgcaccaatttatacatctcagaggcagaggggctgaagttctccctgtccttggagaacgtgctctattacagcccaggaggggccggcagtgacaccttggtgaggtattttgcaaatgaaccatttgctgacttccaccgagtggaaggattgcaaggagtctacattgctactctgattaatggttctatgaatgaggagaacatgagatcggtcatcacctttgacaaagggggaacctgggagtttcttcaggctccagccttcacgggatatggagagaaaatcaattgtgagctttcccagggctgttcccttcatctggctcagcgcctcagtcagctcctcaacctccagctccggagaatgcccatcctgtccaaggagtcggctccaggcctcatcatcgccactggctcagtgggaaagaacttggctagcaagacaaacgtgtacatctctagcagtgctggagccaggtggcgagaggcacttcctggacctcactactacacatggggagaccacggcggaatcatcacggccattgcccagggcatggaaaccaacgagctaaaatacagtaccaatgaaggggagacctggaaaacattcatcttctctgagaagccagtgtttgtgtatggcctcctcacagaacctggggagaagagcactgtcttcaccatctttggctcgaacaaagagaatgtccacagctggctgatcctccaggtcaatgccacggatgccttgggagttccctgcacagagaatgactacaagctgtggtcaccatctgatgagcgggggaatgagtgtttgctgggacacaagactgttttcaaacggcggaccccccatgccacatgcttcaatggagaggactttgacaggccggtggtcgtgtccaactgctcctgcacccgggaggactatgagtgtgacttcggtttcaagatgagtgaagatttgtcattagaggtttgtgttccagatccggaattttctggaaagtcatactcccctcctgtgccttgccctgtgggttctacttacaggagaacgagaggctaccggaagatttctggggacacttgtagcggaggagatgttgaagcgcgactggaaggagagctggtcccctgtcccctggcagaagagaacgagttcattctgtatgctgtgaggaaatccatctaccgctatgacctggcctcgggagccaccgagcagttgcctctcaccgggctacgggcagcagtggccctggactttgactatgagcacaactgtttgtattggtccgacctggccttggacgtcatccagcgcctctgtttgaatggaagcacagggcaagaggtgatcatcaattctggcctggagacagtagaagctttggcttttgaacccctcagccagctgctttactgggtagatgcaggcttcaaaaagattgaggtagctaatccagatggcgacttccgactcacaatcgtcaattcctctgtgcttgatcgtcccagggctctggtcctcgtgccccaagagggggtgatgttctggacagactggggagacctgaagcctgggatttatcggagcaatatggatggttctgctgcctatcacctggtgtctgaggatgtgaagtggcccaatggcatctctgtggacgaccagtggatttactggacggatgcctacctggagtgcatagagcggatcacgttcagtggccagcagcgctctgtcattctggacaacctcccgcacccctatgccattgctgtctttaagaatgaaatctactgggatgactggtcacagctcagcatattccgagcttccaaatacagtgggtcccagatggagattctggcaaaccagctcacggggctcatggacatgaagattttctacaaggggaagaacactggaagcaatgcctgtgtgcccaggccatgcagcctgctgtgcctgcccaaggccaacaacagtagaagctgcaggtgtccagaggatgtgtccagcagtgtgcttccatcaggggacctgatgtgtgactgccctcagggctatcagctcaagaacaatacctgtgtcaaagaagagaacacctgtcttcgcaaccagtatcgctgcagcaacgggaactgtatcaacagcatttggtggtgtgactttgacaacgactgtggagacatgagcgatgagagaaactgccctaccaccatctgtgacctggacacccagtttcgttgccaggagtctgggacttgtatcccactgtcctataaatgtgaccttgaggatgactgtggagacaacagtgatgaaagtcattgtgaaatgcaccagtgccggagtgacgagtacaactgcagttccggcatgtgcatccgctcctcctgggtatgtgacggggacaacgactgcagggactggtctgatgaagccaactgtaccgccatctatcacacctgtgaggcctccaacttccagtgccgaaacgggcactgcatcccccagcggtgggcgtgtgacggggatacggactgccaggatggttccgatgaggatccagtcaactgtgagaagaagtgcaatggattccgctgcccaaacggcacttgcatcccatccagcaaacattgtgatggtctgcgtgattgctctgatggctccgatgaacagcactgcgagcccctctgtacgcacttcatggactttgtgtgtaagaaccgccagcagtgcctgttccactccatggtctgtgacggaatcatccagtgccgcgacgggtccgatgaggatgcggcgtttgcaggatgctcccaagatcctgagttccacaaggtatgtgatgagttcggtttccagtgtcagaatggagtgtgcatcagtttgatttggaagtgcgacgggatggatgattgcggcgattattctgatgaagccaactgcgaaaaccccacagaagccccaaactgctcccgctacttccagtttcggtgtgagaatggccactgcatccccaacagatggaaatgtgacagggagaacgactgtggggactggtctgatgagaaggattgtggagattcacatattcttcccttctcgactcctgggccctccacgtgtctgcccaattactaccgctgcagcagtgggacctgcgtgatggacacctgggtgtgcgacgggtaccgagattgtgcagatggctctgacgaggaagcctgccccttgcttgcaaacgtcactgctgcctccactcccacccaacttgggcgatgtgaccgatttgagttcgaatgccaccaaccgaagacgtgtattcccaactggaagcgctgtgacggccaccaagattgccaggatggccgggacgaggccaattgccccacacacagcaccttgacttgcatgagcagggagttccagtgcgaggacggggaggcctgcattgtgctctcggagcgctgcgacggcttcctggactgctcggacgagagcgatgaaaaggcctgcagtgatgagttgactgtgtacaaagtacagaatcttcagtggacagctgacttctctggggatgtgactttgacctggatgaggcccaaaaaaatgccctctgcttcttgtgtatataatgtctactacagggtggttggagagagcatatggaagactctggagacccacagcaataagacaaacactgtattaaaagtcttgaaaccagataccacgtatcaggttaaagtacaggttcagtgtctcagcaaggcacacaacaccaatgactttgtgaccctgaggaccccagagggattgccagatgcccctcgaaatctccagctgtcactccccagggaagcagaaggtgtgattgtaggccactgggctcctcccatccacacccatggcctcatccgtgagtacattgtagaatacagcaggagtggttccaagatgtgggcctcccagagggctgctagtaactttacagaaatcaagaacttattggtcaacactctatacaccgtcagagtggctgcggtgactagtcgtggaataggaaactggagcgattctaaatccattaccaccataaaaggaaaagtgatcccaccaccagatatccacattgacagctatggtgaaaattatctaagcttcaccctgaccatggagagtgatatcaaggtgaatggctatgtggtgaaccttttctgggcatttgacacccacaagcaagagaggagaactttgaacttccgaggaagcatattgtcacacaaagttggcaatctgacagctcatacatcctatgagatttctgcctgggccaagactgacttgggggatagccctctggcatttgagcatgttatgaccagaggggttcgcccacctgcacctagcctcaaggccaaagccatcaaccagactgcagtggaatgtacctggaccggcccccggaatgtggtttatggtattttctatgccacgtcctttcttgacctctatcgcaacccgaagagcttgactacttcactccacaacaagacggtcattgtcagtaaggatgagcagtatttgtttctggtccgtgtagtggtaccctaccaggggccatcctctgactacgttgtagtgaagatgatcccggacagcaggcttccaccccgtcacctgcatgtggttcatacgggcaaaacctccgtggtcatcaagtgggaatcaccgtatgactctcctgaccaggacttgttgtatgcaattgcagtcaaagatctcataagaaagactgacaggagctacaaagtaaaatcccgtaacagcactgtggaatacacccttaacaagttggagcctggcgggaaataccacatcattgtccaactggggaacatgagcaaagattccagcataaaaattaccacagtttcattatcagcacctgatgccttaaaaatcataacagaaaatgatcatgttcttctgttttggaaaagcctggctttaaaggaaaagcattttaatgaaagcaggggctatgagatacacatgtttgatagtgccatgaatatcacagcttaccttgggaatactactgacaatttctttaaaatttccaacctgaagatgggtcataattacacgttcaccgtccaagcaagatgcctttttggcaaccagatctgtggggagcctgccatcctgctgtacgatgagctggggtctggtgcagatgcatctgcaacgcaggctgccagatctacggatgttgctgctgtggtggtgcccatcttattcctgatactgctgagcctgggggtggggtttgccatcctgtacacgaagcaccggaggctgcagagcagcttcaccgccttcgccaacagccactacagctccaggctggggtccgcaatcttctcctctggggatgacctgggggaagatgatgaagatgcccctatgataactggattttcagatgacgtccccatggtgatagcctgaaagagctttcctcactagaaaccaaatggtgtaaatattttatttgataaagatagttgatggtttattttaaaagatgcactttgagttgcaatatgttatttttatatgggccaaaaacaaaaaacaaaaaaaaaaaaaaggaaagaaaggaatgaataaactttgtagtaatcaactgtgaacttcaaaccaggttgattttagtaacccaattgctttgatttgacattaatgtagtcttacagggctgtgcttgctgggcatgcttttacgtctgtgagataatttcggttcagtaaattggccaatctttttatttttctaagacacagaaatgtatttaataaaaacctcgagagagtgatgggtggaaccccttctccttgaaagtgtgtacagatattccattttgtttggatatagtttataggaaagtgtgtggatgtattatggcggaaggtttctttatgttattttgttaatttattgggactctgtgtaaggccaggctttagtggtcattagacaccacatgtgttatgagccccttacccatagggttgggggtgggaagagaagcatatttttttgccattccggaagcaatccatttttattcacttgtgtgtcatgtaatggtctttggcaggagagagcactgagtcattgctggagttcagttcaacagagctgcagcttgggaagccctgtaagcccacagcttcctctcttatattaattgatggaattttactgtatgtgcctctgtacaagatgtagctttgagagctacaaaatgataacactgctttattacacactggtttcattgtcattgcaaaaacttaccctggttgtgggggagagttctagatctgtgccatgatccatacactggctaatagagtacataatttttccattttccattttttgtttttacttactactgaaggatctcagatgtaaaattatgtatttggtttgagatggccacttattgtccttaaaaatccatactgatatatgcagtcattttgaattggacagtgccttctctttttttttctcctcttcttccatctccctcacccatgcccccacccaatctaaagagacagtgctgtacattctcatagagatagagaagatctaaaaagttgagactactcaatccagttaacaacagcaggagcactagagtttgttcatttattctctctgtaaaacaagctgtgctttttttcttctgcctttaaaatgccacccgtgtattcaaaccatggccacttgatacttatgtagaatccatcgtgggctgatgcaagccctttatttaggcttagtgttgtgggcaccaatgtcgagcatcgttgtgacttgtgctgtatgattctcactgaagaatttcctttcagccaagaagcagtgaggtctgggaatattccaaagtcatgtctctgaatatgtgtccttgacgtgcaagctttgtaaaaccccatccccgcttaggtgcgaggcatcaccttctcacaagtgtttagtttcttttaaccacaagtatcattcttgggtgataatatagtttcattctacttagggattgtttagaaaacaaagaaagagccaattaaattttttagtttttgaaatttttatttatatgtatacttagatgagtattttaagctgtcgacctttagtttgccatacgggtaggactgtatttcatgttaacaactggtggtaatgataagccttcttctagcgtattttctcttctttcctgtcactttcctaagtttttttttttaaagactggaattttttttggctttatcttgtcttaccgtagagatttgttcaaaactctaagccctaccacctcccctttaataagctctttaaatagttgaatcattaacaacctggtgggaggcaagtcatttaattgaaccactaggaagtgtattttcttttctttttctgccaactttttggtggcatttgtaaaagctgatataaaaggctctgagatgttattttcagttattccataggcaagcctttttacagagcatatgtctccagttggcagcttgagatatttccgagcatccggttctagctaccagtgcctcccaatgcttagtgcacagtactgtagactggccatcacccctctccttggaaaatgccactgtgctgtttgaaaaaaagcagccttttagggctagagtattttatataaacagaagagctaagttcctgaagactaagctagatagctgcagctatatgtaaattgtatatttttatgaacttttgaagcacacactcctgtttccctctgtgtagctttgtggggatttcatgtatatatgctgtctgaaagaatccagaggttggagtgccaatagaaaatgaaaacaaatgccttgtactacaggcagcctctgaaggtgaccacataactgtcttcactgtgaccaatcggagtccctgcttgcttgtgaagaaggggcttttgtaccttgttggagatgccacctcagaagttcacactgtgcaggaaaaaggttttattctctcctggcatacattagaatgtcagatgcttgcatccatgtggaccacgatgggcctctaaaaattggtgggcagggggtttgcttatgagttttctctggaaaccgattttactcctggatgtattgaatgccccttgagctttatgagatacgagtccacatggataaaatgttagagagtggagttctacagaggattccaggaagaggccatgtctgtgcagtcctagttccagacaggtgagaagctccaggaactactggctaccttgacaagctgggtaaatagttatcattctgggtaactggttgaaactctgacttttggacaagtaattcctggggttctgtctttggtagcatcaccagggatatttgggtgggacagacagaagacacacagctgcctgttctctcctgcccatcatgtttggcccactagatgaagctgtactcagcaatttagggaatgtaacccttctcagaactggccattttcaggggaagcttgggagagcaatagtatggtgagccccttagagatgagcgcctactccttcttggcgaatgctgccttcagatgcttaccaagtggtcactgcatctagtaagattatatttccagtacacttccttagggcagaaacaccatcctatcaggtttggtcagtcccttcttcatgaagggagtcatggggaattcctgaaaattttcttccttctgcagacagttggatgagtcccttagagaaggcatccagagacataactaaactgaatatcatcccatattgattttaggaattgactctaaaactctgtgcagaatcttgtgttgggattgtatcttgacattcctgttgtgttatttttcttaactggagtgtgtgctgcctttcaggtacaatttttgtgtaataaaagccagtgcattaagtttatatagactactttctatgcaagactgagatatggaatagataggaagagatatgtactgctgggtacatggacagtaagtgtgttttcagatggagtaccagcaccgaaaatgggttgagggaggatgggttgtatgtatgtttctgcccactaattttgagcagccatattatgaattaaatcgtcacagccaagtaataacccaagaatggtatgagtttcatgtgtaatagctcaaatggaataagcatgaatgctggagtggaccattatcctcaaatattctatgtcacttctcatttaaagactcttgttatgaactattagaaactttaggcaaaatcaaaagtatttgcggcaaaataaaggcctattctactcttatttaaagtgaaacactgtatacttgtttctctccaaagcgaaattaagtatttataatttcaattgcctcgataagtttccaagtcactgaaatctgctgaaggttttactgtattgttgcacaactttaagataatttttgtctcaatgtcaacttttttcactgaataaaaatttaactgggtcaagaaaacacctctttgaaaatccactgtctctgtgtgtctcgagctgttctttagagcgcaataaagatggctgacgcagtctccaaacccc

SEQ ID NO: 1302 - DNA, 847 bp, Homo sapiens
acagcgagcggagccgcggtccggacggcagcgcgtgccccgagctctccgcctccccccgcccgccagccgaggcagctcgagcccagtccgcggccccagcagcagcgccgagagcagccccagtagcagcgccatggccgggtggaacgcctacatcgacaacctcatggcggacgggacctgtcaggacgcggccatcgtgggctacaaggactcgccctccgtctgggccgccgtccccgggaaaacgttcgtcaacatcacgccagctgaggtgggtgtcctggttggcaaagaccggtcaagtttttacgtgaatgggctgacacttgggggccagaaatgttcggtgatccgggactcactgctgcaggatggggaatttagcatggatcttcgtaccaagagcaccggtggggcccccaccttcaatgtcactgtcaccaagactgacaagacgctagtcctgctgatgggcaaagaaggtgtccacggtggtttgatcaacaagaaatgttatgaaatggcctcccaccttcggcgttcccagtactgacctcgtctgtcccttccccttcaccgctccccacagctttgcacccctttcctccccatacacacacaaaccattttattttttgggccattaccccataccccttattgctgccaaaaccacatgggctgggggccagggctggatggacagacacctccccctacccatatccctcccgtgtgtggttggaaaacttttgttttttggggttttttttttctgaataaaaaagattctactaacaaaaaaaaaaaaaaaaaaaaaaaaaaaaaaaaaaaaaaaaaa

SEQ ID NO: 1303 - DNA, 1746 bp, Homo sapiens
ctgtgagctgccgagtgctaggcacccgggctcttctgggggctccagtcagaggcgccgcccaagagaccctgggccggcgccgggcgcagctgcctctccgtctttgtgtctgtctctgtgtctgtctggctatctccgagtttgcctccgcttccagaactaagccacccagacaccatcatctcgaaaaccccagcccttctcccatggcaggctacttgccccccaaaggctacgccccttcgcccccacctccctaccctgtcacccctgggtacccggagccggcgctacatcctgggcccgggcaggcgccagtgcccgcccaggtacctgccccagctcccggcttcgccctcttcccctcgcctggccccgtggccttggggtctgctgcccccttcttgccactgccaggggtgccttctggcctcgaattcctggtgcagattgatcagattttgattcaccagaaggctgagcgagtggaaacgttcctaggctgggagacctgtaatcggtatgaactgcgctctggggccgggcagcccctgggtcaggcggccgaggagagcaactgctgcgcccgtctgtgctgtggcgcccgccggccgctgcgtgtccgcctggccgaccccggggaccgtgaggtgctgcgtttgctccgcccgctgcactgtggctgcagctgctgcccctgtggcctccaggagatggaagtacaggctccaccaggcaccaccattggccacgtgctacagacctggcatcccttcctccccaagttctccatccaggatgccgatcgccagacagtcttgcgagtggtggggccctgctggacctgtggctgtggcacagacaccaactttgaggtgaagactcgggatgaatcccgcagtgtgggccgcatcagcaagcagtgggggggcctggtccgagaagccctcacagatgcagatgactttggcctacagttcccgctggacctggatgtgagggtgaaggctgtgctgctgggagccacattcctcattgactacatgttctttgagaagcgaggaggcgctgggccctctgccgtcaccagttagaggccaccatggtgtgaggagaccatcacctcgaccagaactccagatggtcacctgccctggcccctcctctgggcagcccctttcctccatgtacactgcaggggacagaaggggggccccatccctaccctactccctggccgcctgcccctgtggttcccaaggaggggtatgtatgagagccgctctcctgctacctcccaccactgtcccagcagtccctcggcacacaggcatatcagctttcacactttccccatgcactctctcccacccccttccagggcctctgctccaaaggaggcctctggaacccaggactctggggttttacaagagggctggggtgtggaagggcaagctgcaccaaagacggtggatatagccaccgcccccccgccgctgcctagcatctgcttggccaattagttcagcctcagaccatggcactttgagggggtctctacctccccatcaacagctgcagggggaccccagtgccaacttcctctcccactagggccctgccttcagctggtgcttgctgcgattcctgtgccttatgtaactgcccttccttcccttgccctaggaaaaaggctgcatctttatatgttacattcatataaactttgtaactttttgg

SEQ ID NO: 1304 - DNA, 2339 bp, Homo sapiens
acgcggtgccgcggggcgggagtagaggcggagggaggggacacgggctcattgcggtgtgcgccctgcactctgtccctcactcgccgccgacgacctgtctcgccgagcgcacgccttgccgccgccccgcagaaatgcttcggttacccacagtctttcgccagatgagaccggtgtccagggtactggctcctcatctcactcgggcttatgccaaagatgtaaaatttggtgcagatgcccgagccttaatgcttcaaggtgtagaccttttagccgatgctgtggccgttacaatggggccaaagggaagaacagtgattattgagcagagttggggaagtcccaaagtaacaaaagatggtgtgactgttgcaaagtcaattgacttaaaagataaatacaaaaacattggagctaaacttgttcaagatgttgccaataacacaaatgaagaagctggggatggcactaccactgctactgtactggcacgctctatagccaaggaaggcttcgagaagattagcaaaggtgctaatccagtggaaatcaggagaggtgtgatgttagctgttgatgctgtaattgctgaacttaaaaagcagtctaaacctgtgaccacccctgaagaaattgcacaggttgctacgatttctgcaaacggagacaaagaaattggcaatatcatctctgatgcaatgaaaaaagttggaagaaagggtgtcatcacagtaaaggatggaaaaacactgaatgatgaattagaaattattgaaggcatgaagtttgatcgaggctatatttctccatactttattaatacatcaaaaggtcagaaatgtgaattccaggatgcctatgttctgttgagtgaaaagaaaatttctagtatccagtccattgtacctgctcttgaaattgccaatgctcaccgtaagcctttggtcataatcgctgaagatgttgatggagaagctctaagtacactcgtcttgaataggctaaaggttggtcttcaggttgtggcagtcaaggctccagggtttggtgacaatagaaagaaccagcttaaagatatggctattgctactggtggtgcagtgtttggagaagagggattgaccctgaatcttgaagacgttcagcctcatgacttaggaaaagttggagaggtcattgtgaccaaagacgatgccatgctcttaaaaggaaaaggtgacaaggctcaaattgaaaaacgtattcaagaaatcattgagcagttagatgtcacaactagtgaatatgaaaaggaaaaactgaatgaacggcttgcaaaactttcagatggagtggctgtgctgaaggttggtgggacaagtgatgttgaagtgaatgaaaagaaagacagagttacagatgcccttaatgctacaagagctgctgttgaagaaggcattgttttgggagggggttgtgccctccttcgatgcattccagccttggactcattgactccagctaatgaagatcaaaaaattggtatagaaattattaaaagaacactcaaaattccagcaatgaccattgctaagaatgcaggtgttgaaggatctttgatagttgagaaaattatgcaaagttcctcagaagttggttatgatgctatggctggagattttgtgaatatggtggaaaaaggaatcattgacccaacaaaggttgtgagaactgctttattggatgctgctggtgtggcctctctgttaactacagcagaagttgtagtcacagaaattcctaaagaagagaaggaccctggaatgggtgcaatgggtggaatgggaggtggtatgggaggtggcatgttctaactcctagactagtgctttacctttattaatgaactgtgacaggaagcccaaggcagtgttcctcaccaataacttcagagaagtcagttggagaaaatgaagaaaaaggctggctgaaaatcactataaccatcagttactggtttcagttgacaaaatatataatggtttactgctgtcattgtccatgcctacagataatttattttgtatttttgaataaaaaacatttgtacattcctgatactgggtacaagagccatgtaccagtgtactgctttcaacttaaatcactgaggcatttttactactattctgttaaaatcaggattttagtgcttgccaccaccagatgagaagttaagcagcctttctgtggagagtgagaataattgtgtacaaagtagagaagtatccaattatgtgacaacctttgtgtaataaaaatttgtttaaagttaaaaaaaaaaaaaaaaaaaa

SEQ ID NO: 1305 - DNA, 3193 bp, Homo sapiens
gccgcgtccggcccggtcctgtcccgcagcgtcccgccagccagctccttgcacccttcgcggccgaggcgctccctggtgctccccgcgcagccatggctcagcacttctccctggccgcctgcgacgtggtcggattcgacctggaccacactctgtgtcgctacaacctgcccgagagcgccccgctcatttataatagctttgcccagttcctagttaaggagaaagggtacgataaggaattgctcaatgtgaccccagaggattgggatttctgttgcaaaggtttggcattggatctagaagatgggaacttccttaaacttgcaaataatggcactgttctcagggcaagccatggcaccaagatgatgactccagaggtgctggcagaggcatatggcaagaaagagtggaagcacttcttgtcggacactggaatggcttgccgctcaggaaagtattacttttacgacaactactttgacctgccaggagctcttctgtgtgccagggtggtggactatttaacaaaactgaacaatggtcaaaaaacatttgatttttggaaggatatagttgctgctatacaacacaattataaaatgtcagcttttaaggaaaactgtggaatatattttccagaaataaaaagagatccaggcagatatttacatagttgtcctgaatctgtgaaaaaatggcttcgacagctaaagaatgctgggaaaattcttctgttaattaccagttctcacagtgattactgtagacttctctgcgaatatattcttgggaatgattttacagacctttttgacattgtgattacaaatgcattgaagcctggtttcttctcccacttaccaagtcagagacctttccggacactcgagaatgatgaggagcaggaggcactgccatctctggataaacctggctggtactcccaagggaacgctgtccacctctatgaacttctgaagaaaatgactggcaaacctgaacccaaggttgtttattttggtgacagcatgcattcagatattttcccagctcgtcactatagtaattgggagacagtcctcatcctggaagaactcagaggggatgaaggcacgaggagtcagaggcctgaggagtcagagcctctagagaagaaaggaaaatatgagggaccaaaagcaaaacctttaaatacttcatctaaaaaatggggctctttttttattgattcagttttgggactggaaaatacagaagactccttggtttatacatggtcttgtaagagaatcagtacttacagcactattgcaattccaagtattgaagcaatcgcagaattacctctggactacaaatttacaagattctcttcaagcaattcaaaaacagctggctactatccaaatcctccactggtcttatcaagtgatgagacactgatatccaaataagttgtctttactgaaaaatgaagtgaagacccatatatgcagttaaaaaaaagttaattttcaaaaaatactgtaaaagactttaaggaacaagttttattgaccaataagttgatatttgtccataggtctcctttctataaatcatcttgatgtttaacaactcttattatattaaaatctcagtatcctaaaacttagaaccttattgatattttctatacagtagttttgtgattagaattcacctggggacacacactcacacgcacagtcactcttacacatatgcctagtccagtggttctcaaagtgtgatccatagactaatagcatagcattacctgagaacttgataatgcatatttgcaggccccacgcaaaacctgctgaatcagaagctctgagagtaaggcctaccaatctggtttaacaagcccgtcaggtgattctgatttacagtacagtttgagacccactggctagaacatatcctccagagacttggcttaattggtctgggtaaatatggctgagcgttgttatcttttgttatcttttatatgccctaggaaagtacaaccagaattgaaaaccaactgatctataccagttctttcaattaatagtcaagaacattgagtccagtgagattaagtgatttttgcaggctatgaggttttatgctattcctgtgttctccaaaacaagaaaataaaaagacatgacttattctctgttcatacagcaagtatggaaaaaagatgatctagaagtcaactatctcaacctccattgttacccactaggtttttttctaataatgttaaaggctatttaatttatttaatcaactttaagcattacattctcaattggggacaaaaattggttcttggggtgaaaaaatattagatatggcttgtggacttccaatatcatcctatccaacaaaatcttattccttagtattaatttatctcattgggaagaaatttgtagttaaaactatttaatgtaatttgaatttaatttctgtaattgggaaggagggtaataatgaacaaaaagtttgagaaaaaaatgctttaatgggttttacaggcatgctacaatccaggactgtggtgttctatgtgccgtgtatggtcatattagtagctatttgttgcaagatacttgaagccaaatgtttgcagtataggttcctggctactgtttatgctgtgatttcactctgtctatcatgggcagtattagaaaacacactggttttcactatctggtttacaaacactatcattattttacctggattgaagtgcagaatttggcatatcgatgcatgcaatggaaagaaaaaaaatttgttaaaatttgtaaatgttcagctaaatctcagatatactgtgggatgagtatctcagggtaagtaacaaaaaaacaaacaaaaaaaatcactgaaatttttccctcacagtcagtagctttgtttgatatttaacaataagtatatggtgatatacttgaaatttatgtccagaatgtcactggaatattacaatgagcataaataatcaagcttaggactaaatgaaagatactatctcatgtatgctttaaatagagaatttatttcttttaaaaataaagctatttttccttaaaaaaaaaaaaaaaaaaaaaaaaaaaaaaaaaaaaaaaaaaaaaaaaaaaaaaaaaaaaaaaaa

SEQ ID NO: 1306 - DNA, 5872 bp, Homo sapiens
atggataccttgagagctgttccccttttttcaatatctggcctcttctcctttccctacagggtctcccatgggattgctgggatcttgctgggtgagatggcagtgtgtgcaaaaaagcgccccccagaagaagaaaggagggcgcgggctaatgaccgagaatacaatgagaaattccagtatgcgagtaactgcatcaagacctccaagtacaatattctcaccttcctgcctgtcaacctctttgagcagttccaggaagttgccaacacttacttcctgttcctcctcattctgcagttgatcccccagatctcttccctgtcctggttcaccaccattgtgcctttggttcttgtcctcaccatcacagctgttaaagatgccactgatgactatttccgccacaagagcgataaccaggtgaataaccgccagtctcaggtgctgatcaatggaatcctccagcaggagcagtggatgaatgtctgtgttggtgatattatcaagctagaaaataaccagtttgtggcggcggatctcctcctcctttccagcagtgagccccatgggctgtgttacatagagacagcagaacttgatggcgagaccaacatgaaagtacgtcaggcgattccagtcacctcagaattgggagacatcagtaagcttgccaagtttgacggtgaagtgatctgtgaacctcccaacaacaaactggacaaattcagcggaaccctctactggaaggaaaataagttccctctgagcaaccagaacatgctgctgcggggctgtgtgctgcgaaacaccgagtggtgcttcgggctggtcatctttgcaggtcccgacactaagctgatgcaaaacagcggcagaacaaagttcaaaagaacgagtatcgatcgcctaatgaataccctggtgctctggatttttggattcctggtttgcatgggggtgatcctggccattggcaatgccatctgggagcacgaggtggggatgcgtttccaggtctacctgccgtgggatgaggcagtggacagtgccttcttctctggcttcctctccttctggtcctacatcatcatcctcaacaccgttgtgcccatttcactctatgtcagtgtggaggtcatccgtctgggccacagctacttcatcaactgggataagaagatgttctgcatgaagaagcggacgcctgcagaagcccgcaccaccaccctaaacgaggagctgggccaggtggagtacatcttctccgacaagacgggcaccctcacccagaacatcatggttttcaacaagtgctccatcaatggccacagctatggtgatgtgtttgacgtcctgggacacaaagctgaattgggagagaggcctgaacctgttgacttctccttcaatcctctggctgacaagaagttcttattttgggaccccagcctgctggaggctgtcaagatcggggacccccacacgcatgagttcttccgcctcctttccctgtgtcatactgtcatgtcagaagaaaagaacgaaggagagctgtactacaaagctcagtccccagatgagggggccctggtcaccgcagccaggaactttggttttgttttccgctctcgcacccccaaaacaatcaccgtccatgagatgggcacagccatcacctaccagctgctggccatcctggacttcaacaacatccgcaagcggatgtcggtcatagtgcggaatccagaggggaagatccgactctactgcaaaggggctgacactatcctactggacagactgcaccactccactcaagagctgctcaacaccaccatggaccaccttaatgagtacgcaggggaagggctgaggaccctggtgctggcctacaaggatctggatgaagagtactacgaggagtgggctgagcgacgcctccaggccagcctggcccaggacagccgggaggacaggctggctagcatctatgaggaggttgagaacaacatgatgctgctgggtgcaacggccattgaggacaaacttcagcaaggggttccagagaccattgccctcctgacactggccaacatcaagatttgggtgctaaccggagacaagcaagagacggctgtgaacatcggctattcctgcaagatgctgacggatgacatgactgaggttttcatagtcactggccatactgtcctggaggtgcgggaggagctcaggaaagcccgggagaagatgatggactcatcccgctccgtaggcaacggcttcacctatcaggacaagctttcttcttccaagctaacttctgtcctggaggccgttgctggggagtacgccctggtcataaatggtcacagcctggcccacgcactggaggcagacatggagctggagtttctggagacagcgtgtgcctgcaaagctgtcatctgctgccgggtgacccccttgcagaaggcacaggtggtagaactggtcaagaagtacaagaaggctgtgacgcttgccattggagacggagccaatgatgtcagcatgatcaaaacggctcacattggtgtggggatcagtgggcaggaagggatccaggctgtcttggcctccgattactccttctcccagttcaagttcctgcagcgcctcctgctggtgcatgggcgctggtcctacctgcgaatgtgcaagtttctttgctatttcttctacaaaaactttgctttcaccatggtccacttctggtttggcttcttctgtggcttctcagcccagaccgtctatgaccagtatttcatcaccctgtataacatcgtgtacacctccctgccagtcctggctatgggggtctttgatcaggatgtccccgagcagcggagcatggagtaccctaagctgtatgagccgggccagctgaaccttctcttcaacaagcgggagttcttcatctgcatcgcccagggcatctacacctccgtgctcatgttcttcattccctatggggtgtttgctgatgccacccgggatgatggcactcagctggctgactaccagtcctttgcagtcactgtggccacatccttggtcattgtggttagcgtgcagattgggctcgacacaggctactggacggccatcaaccacttcttcatctggggaagccttgctgtttactttgccatcctctttgccatgcacagcaatgggctcttcgacatgtttcccaaccagttccggtttgtggggaatgcccagaacaccttggcccagcccacggtgtggctgaccattgtgctcaccacagtcgtctgcatcatgcccgtggttgccttccgattcctcaggctcaacctgaagccggatctctccgacacggtccgctacacacagctcgtgaggaagaagcagaaggcccagcaccgctgcatgcggcgggttggccgcactggctcccggcgctccggctatgccttctcccatcaggagggcttcggggagctcatcatgtctggcaagaacatgcggctgagctctctcgcgctctccagcttcaccacccgctccagctccagctggattgagagcctgcgcaggaagaagagtgacagtgccagtagccccagtggcggtgccgacaagcccctcaagggctgaaggccgaggatggatgccctgtgccagtgaccagagcacccagggctggccagtcactgagggaacagcgtctcggaactgctggtcctcattccttgcttcccgtccccccggtagactctgtcctgctggtcccaccacacatggctgggacatctgttcccagctgtaggcccttccaccagctggggagctagagggagcaggcccaagggcagagcagaggctgaggcacggggagccagccccactcggggaccagaagtggaaccaaaaacaagaaaaaactgtgagagattgtgtctgcccctgccctgcctgggacccacagggagactataatctccttatttttttactcctactccccagaggggccctagtgcctctgttcctgaattacataagaatgtaccatgccgggaagccagagacctgcaggggcctcggcccctcacatcgtgtatgtctctccttgatttgtgttgtgtccagtttggttttgtctttttttatttggcaagtggaggaggcttttatgtgacttttatgttgtggttggtgtcttaactctcctgggaaaaggaggctggcacacactgggatgccgcagcctggccggctgtggggtggtttgggaggatccatgtcggctctgcctgcagtgaccagtgctctgtggggcagaggagctgaccagggagggaggtacccatgagcagagggtagtgggagagtgtaaaggagggtttggtcctgtctgcttcctcaccttgagagtaaagtgctgccctctgcccccaacacacacacatatcaattcctggattccttagtcctgctggccttgggctggagcctaggaaagtggcccccaaatccttagtgagctaaagctgggtctgaaatttggtcagtggggaggggtagttttcttttcttttttctttttctttttttctttttttttttgagatggagtctcactcttgtcacctaggcaagagtgcaatggcacaatctcagctcactgcaacctccacctcctgggttcaagcgattctcctgcctcagcctcctgagtagctgggattacaggcacacaccaccacgcttggttaatttttgtatttttagtagagatgtttcaccatgttggccaggctagtcttgaattcctgacctcctgacctgcccacctcaacctcccaaagtgctgagattacaggcgtgagccaccacacccagctcagggaggcgtagttttctttaattttaaatttaaacccaagtttattggcagactcccttttgacctccctttgcctccccatctggtgctttcttgcatctacaccccagggccctgtggtggggctgcagggggaagctgtgcacctgagatgaggctggaacgggaattggcctctctgctcccttcttcagtaagcaaggagccccgcccctcaggcccagcctctggcaagaggtggtggaatccttgtgccgggtagtagaggaggataagggcaaaaccaggcccaggccagtgcctggcttggtctggatgggacactgtcagagtttggccacagcctgtcctttacttcatccacacctatgaagctattccctaaataaggcatttcccaagttagtcgctacctaatcagccttgagaagaatcctttcctcttctttgatagtgggtcgggggattcttcaggaatggtttggagctgggagtgggtagggggattttaaatgttccatatgggagccccaaaggaactggatgggctgcagtgaggtgggggcgggtgggcagggaatgggagaggggaagtcttggcagggaaatcccttttggccacacagtttacaaacccagtatcatgtctgtctgtgtgtctctcaaggtgagagtctgatttttataccaaagaggaaatgattttttttcatattttgtttgtctatattatataaatatatatatacagttatatatatatatattattttttggttctctctcgttttttagggagggaagaaagtaccaagttgcattgagctgtaattaaggaacattataatttatgacacatttctatacttgcaaaaattatatcattttatggatataagagaaaaatgcctttttataaaatttcaatttctgaaaaaaaaaaaaaaa

SEQ ID NO: 1307 - DNA, 2487 bp, Homo sapiens
gctattggtaagactcgcgggaaaagaaagggtgagcgcggctggaagcgcgcatgcgctgtggctaatgccgtaggctccttcagggctgagccatcccgcgtgtcttgcgctcggtggaaatgcccagccgagggacgcgaccagaggacagctctgtgctgatccccaccgacaattcgaccccacacaaggaggatctaagcagcaagattaaagaacaaaaaattgtggtggatgaactttctaaccttaagaagaataggaaagtatataggcaacaacagaacagcaatatattctttcttgcagaccgaacagaaatgctgtctgagagcaagaatatattggatgaactgaaaaaagaataccaagaaatagaaaacttagacaagaccaaaatcaagaaatagtcaacctgatttcacataacaatgtgtggcatttgttgttctgtaaacttttctgctgagcatttcagtcaagatttaaaagaggacttactatataatcttaaacagcggggacccaatagtagtaaacaattgttaaagtctgatgttaactaccagtgtttattttctgctcacgtcctacacttgaggggtgttttgactacccagcctgtggaagatgaaagaggcaatgtgtttctatggaatggagaaatttttagtggaataaaggttgaagctgaagagaatgacactcaaattttgtttaattatctttcctcctgtaagaatgaatctgagattttgtcactcttctcagaagtacaaggtccctggtcatttatatattatcaagcatctagtcattatttatggtttggtagggatttttttggtcgccgtagcttgctttggcattttagtaatttgggcaagagtttctgcctctcttcagttggcacccaaacatctggattggcaaatcagtggcaagaagttccagcatctggacttttcagaattgatcttaagtctactgtcatttccagatgcattattttacaactgtatccttggaaatatatttctagggagaatattattgaagaaaatgttaatagcctgagtcaaatttcagcagacttaccagcatttgtatcagtggtagcaaatgaagccaaactgtatcttgaaaaacctgttgttcctttaaatatgatgttgccacaagctgcattggagactcattgcagtaatatttccaatgtgccacctacaagagagatacttcaagtctttcttactgatgtacacatgaaggaagtaattcagcagttcattgatgtcctgagtgtagcagtcaagaaacgtgtcttgtgtttacctagggatgaaaacctgacagcaaatgaagttttgaaaacgtgtgataggaaagcaaatgttgcaatcctgttttctgggggcattgattccatggttattgcaacccttgctgaccgtcatattcctttagatgaaccaattgatcttcttaatgtagctttcatagctgaagaaaagaccatgccaactacctttaacagagaagggaataaacagaaaaataaatgtgaaataccttcagaagaattctctaaagatgttgctgctgctgctgctgacagtcctaataaacatgtcagtgtaccagatcgaatcacaggaagggcgggactaaaggaactacaagctgttagcccttcccgaatttggaattttgttgaaattaatgtttctatggaagaactgcagaaattaagaagaactcgaatatgtcacttaattcggccattggatacagttttggatgatagcattggctgtgcagtctggtttgcttctagaggaattggttggttagtggcccaggaaggagtgaaatcctatcagagcaatgcaaaggtagttctcactggaattggtgcagatgagcaacttgcaggttattctcgtcatcgtgtccgctttcagtcgcatgggctggaaggattgaataaggaaataatgatggaactgggtcgaatttcttctagaaatcttggtcgtgatgacagagttattggtgatcatggaaaagaagcaagatttcctttcctggatgaaaatgttgtctcctttctaaattctctgccgatttgggaaaaagcaaacttgactttaccccgaggaattggtgaaaaattacttttacgccttgcagctgtggaacttggtcttacagcctctgctcttctgcccaaacgggccatgcagtttggatcaagaattgcaaaaatggaaaaaattaatgaaaaggcatctgataaatgtggacggctccaaatcatgtccttagaaaatctttctattgaaaaggagactaaattgtaatgtgattcacaatgtaacaatataaaaataagtttttatataattatataaaagtaagatactctgctgctttactattgtataatatagtagttttaaagttcaaaaaaaaaaaaaaaaa

SEQ ID NO: 1308 - DNA, 1709 bp, Homo sapiens
acactggggtggtgcttagccggcgccagaccgaccctcgacttcggagaggcagcgcggttcctctgggtgcttccgcctccccttctcctgcttctccagcctcttcggcctcctcgcccgccgcgggaacccgagaccccagtgtatgccccacccctgaccccgctcgcgacatgtccaccccggctcggcggcgcctcatgcgggacttcaagaggttgcaggaggatcctccagccggagtcagcggggctccgtccgagaacaacataatggtgtggaacgcggtcattttcgggcctgaagggaccccgtttgaggatgtctatgcagatggtagtatatgtctggacatacttcagaaccgttggagtccaacctatgatgtgtcttccattctaacatccatacagtctctgttggatgaacccaatcccaatagtccagcaaacagccaggctgctcagctgtaccaggagaacaaacgggaatatgaaaagcgtgtttctgcaatagtagaacaaagctggcgtgattgttgaccccgggtacagtttaaagaagctggccataagaaaaatatatattgatgtgtttgtcacctccctactcctgtcattacatttactttattaaaagcaaaataactgttgtgctgtttccatcttccttgccaagttttcctaccccttctaccctctccttaaacatcagaaaacaccctctatgaaatcaaatgtactgtacctgggttacttgcaaaaattactaatgcttcagtttttctgttgtatttcatttccagttttcaggcagttatttttattattgtactttaagcttttaagatgaattgttatacaagaggtgcttatgcttagcttgatgaccaggatgttatttttaacaaaatgattgctgaagtgtttcatcctggctggtccttcacttgtgttggatttagaagtgaatgtgtttggaatatggcctacagagaatagaaacaaatccatgtaaacaattttgaaggaggcatgggagctaaaaatcctgtgatactaagatctcagtcatatgaattacaacgtagtatttactggcaagaaggagaaagttgaaggactcagctaaaggagtacagcaattgtagtaactgacacatcctctctttgcaagctgctgactgggcacactcatgccaagtttcagaattattggtcttctgggtttttgctttttaaaagaggtgtgggagcagaggaatggaaacaatcgtgagtttttgagctagggaaagttggagctcctttaatctttttaaaggatcagtgctgccctaagtgaataaactcaattgtccatctttattttagagttttaatgaattcaaggaagggagcatagcatatctgtggcaaactattttccactcaaatcctgagttattgctgcatgctttaatttcttccctttcagcatctgagaaccttaaagccaatgtctgcgatctttttttggatatttatacttttagatatatagtacctttaagtagcagtatgggacaaggcttgtaaatgttttgtctaatgttctattgtcaccttttatgcatttatcacttccaaatctaactttgcacaagtaacccatgtaaaaaaaaatgtacatttttcaaaagttgtaaataaaaataaccttaaaaa

SEQ ID NO: 1309 - DNA, 2731 bp, Homo sapiens
gcactgcctctggcacctggggcagccgcgcccgcggagttttccgcccggcgctgacggctgctgcgcccgcggctccccagtgccccgagtgccccgcgggccccgcgagcgggagtgggacccagcccctaggcagaacccaggcgccgcgcccgggacgcccgcggagagagccactcccgcccacgtcccatttcgcccctcgcgtccggagtccccgtggccagggattattggacctgcctggtttaaactattgtcttagttaattttgtgctgctctaacaaaatatcacagactgagtaatttataagcaatagtagcttatttggctcacagttctggaggctgagaagatcgtgaggctgcatctggcaagggccttcttgctgcttcataacatggcagaagacatcatgcgggtgtgtgtctggggaagagacttacagaagtggagttgctgagtcaaagatctaaccatgagctaccctggctatcccccgcccccaggtggctacccaccagctgcaccaggtggtggtccctggggaggtgctgcctaccctcctccgcccagcatgccccccatcgggctggataacgtggccacctatgcggggcagttcaaccaggactatctctcgggaatggcggccaacatgtctgggacatttggaggagccaacatgcccaacctgtaccctggggcccctggggctggctacccaccagtgccccctggcggctttgggcagcccccctctgcccagcagcctgttcctccctatgggatgtatccacccccaggaggaaacccaccctccaggatgccctcatatccgccatacccaggggcccctgtgccgggccagcccatgccaccccccggacagcagcccccaggggcctaccctgggcagccaccagtgacctaccctggtcagcctccagtgccactccctgggcagcagcagccagtgccgagctacccaggatacccggggtctgggactgtcacccccgctgtgcccccaacccagtttggaagccgaggcaccatcactgatgctcccggctttgaccccctgcgagatgccgaggtcctgcggaaggccatgaaaggcttcgggacggatgagcaggccatcattgactgcctggggagtcgctccaacaagcagcggcagcagatcctactttccttcaagacggcttacggcaaggatttgatcaaagatctgaaatctgaactgtcaggaaactttgagaagacaatcttggctctgatgaagaccccagtcctctttgacatttatgagataaaggaagccatcaagggggttggcactgatgaagcctgcctgattgagatcctcgcttcccgcagcaatgagcacatccgagaattaaacagagcctacaaagcagaattcaaaaagaccctggaagaggccattcgaagcgacacatcagggcacttccagcggctcctcatctctctctctcagggaaaccgtgatgaaagcacaaacgtggacatgtcactcgcccagagagatgcccaggagctgtatgcggccggggagaaccgcctgggaacagacgagtccaagttcaatgcggttctgtgctcccggagccgggcccacctggtagcagttttcaatgagtaccagagaatgacaggccgggacattgagaagagcatctgccgggagatgtccggggacctggaggagggcatgctggccgtggtgaaatgtctcaagaataccccagccttctttgcggagaggctcaacaaggccatgaggggggcaggaacaaaggaccggaccctgattcgcatcatggtgtctcgcagcgagaccgacctcctggacatcagatcagagtataagcggatgtacggcaagtcgctgtaccacgacatctcgggagatacttcaggggattaccggaagattctgctgaagatctgtggtggcaatgactgaacagtgactggtggctcacttctgcccacctgccggcaacaccagtgccaggaaaaggccaaaagaatgtctgtttctaacaaatccacaaatagccccgagattcaccgtcctagagcttaggcctgtcttccacccctcctgacccgtatagtgtgccacaggacctgggtcggtctagaactctctcaggatgccttttctaccccatccctcacagcctcttgctgctaaaatagatgtttcatttttctgactcatgcaatcattcccctttgcctgtggctaagacttggcttcatttcgtcatgtaattgtatatttttatttggaggcatattttcttttcttacagtcattgccagacagaggcatacaagtctgtttgctgcatacacatttctggtgagggcgactgggtgggtgaagcaccgtgtcctcgctgaggagagaaagggaggcgtgcctgagaaggtagcctgtgcatctggtgagtgtgtcacgagctttgttactgccaaactcactcctttttagaaaaaacaaaaaaaaagggccagaaagtcattccttccatcttccttgcagaaaccacgagaacaaagccagttccctgtcagtgacagggcttcttgtaatttgtggtatgtgccttaaacctgaatgtctgtagccaaaacttgtttccacattaagagtcagccagctctggaatggtctggaaatgtca

SEQ ID NO: 1310 - DNA, 2204 bp, Homo sapiens
aaacgaacaacgctttcgggtgggcccgggaccatagagggtcgctccgccactttcctagagcgaccgcggcggcgccagagcgcggcgaggccctcacttccggcggcgcgggaggcgcccagcgagccagagtggtggctggtcccgcgcgaaaattctgagctgtacacctctaggaaatgaaacactagttcagaagaagcctgtaaactctcttacaaatacatttggttattcaccatgaggttagcaaagcctaaagcgggtatttctcggagctcaagccaaggaaaggcctatgagaacaagcgcaaaacaggccggcagcggcagaagtggggcatgactattcgatttgactcaagcttcagtagactcagaagaagcttggatgacaaaccctataaatgtactgaatgtgaaaagagtttcagtcagagttcaactctttttcaacaccagaagatccatactggaaagaaatcccataaatgtgctgattgtgggaaaagtttctttcagagttctaatctcattcagcatcgacggatccatacgggggaaaagccctacaaatgtgatgagtgtggagaaagcttcaaacagagctcaaatctcattcagcaccagagaattcatactggagaaaaaccctatcagtgtgatgagtgtggccggtgtttcagccagagctcccaccttattcaacatcagagaacccacactggggagaaaccctaccagtgcagtgaatgtggcaaatgtttcagtcagagctctcatctgaggcagcacatgaaggtgcataaagaagagaagcctcgtaaaacccggggcaaaaatatcagggtgaagactcacttaccctcttggaaagctggtacaggaaggaagtctgtggctggtctccgttaagtatagggctttttgacagctttttgagacctcttaagaaaaaataaaaagtaaaaaatgaaaggaatcttttttagaaatagagatgctttatagtagatcacttaaatactggatcttttgctagtgtgaaaacattgggaatttaatgacattattgagctgaaagaaattacatgagtccagctaccctcatttcttttttatgtgacatggagcacaaagaactgaaaatatgttttgagggagcatgacatccttgacctcatttgaaattacttccattttcaaaaaccatcatgttttgtagatacattttgagaaaaaccatcatgttttgaggatacatttgtgaaagtgcaggcatgccaatgactactcagttttaggactttctgtggaagaaaaaagggagaagaaatcaattccactacttttgaagttctgcaacagatgagattttgtttgtaaagttttgtagtatattaaccattggtttatcactctagattcaacatattaaaatgtattcaagctcacagatttttaatcagtaaggcctatctatattagttgtcttttatttcttctccttgtggacagttgttaatgaaaggagtaaggatttccctttttttgttttgtttgttttgttttttttaaccaaattcttagagatactatagaatccaaatgagaactgaattggacctcaagtcttctattcctactaatagagttctttgtgatggtaactgctgtgtcgtttgttttccacaagttgggatggattcatgtcgatacatccccatgcccttgacctcttctggcattctcctgtgctctgacaaactgagccagccttttagatctacatgaataaacaaactattttaccaagaaaaatctcagcttgcttactgcttaattaaaaacctacaatttacacacctccctgccttcaagactgtgagctttggatagccctgcttaaatgtttgtcaacaacaagagtcgtaatgtgtcagtacattgtagctcctttgaaatttaactctttctgtgttacatgaattgttttaaggagtccggcaaacatgtttcttcacttccatgagaatggtgccaagtgtcagactctaatgagccctcagctcaggttttaatttctattgaatgctaacattcttctgattttttggtatcttttataatcatatcggtttctgctgtattaatgacaattattcatgaaaataaaaaatgaaatattttgtatactacta

SEQ ID NO: 1311 - DNA, 2474 bp, Homo sapiens
ggcaggcggcgggggcggggcctggaggagcctacaccgactctggaggaagactggagcctttgcggcggcgctgcccctcccctggtccccgcgagctcggagggcccggctggtgctgcgggggccccgggaggttgaaaactaagcatggggaagagctgcaaggtggtcgtgtgtggccaggcgtctgtgggcaaaacttcaatcctggagcagcttctgtatgggaaccatgtagtgggttcggagatgatcgagacgcaggaggacatctacgtgggctccattgagacagaccggggggtgcgagagcaggtgcgtttctatgacacccgggggctccgagatggggccgaactgccccgacactgcttctcttgcactgatggctacgtcctggtctatagcacagatagcagagagtcttttcagcgtgtggagctgctcaagaaggagattgacaaatccaaggacaagaaggaggtcaccatcgtggtccttggcaacaagtgtgacttacaggagcagcggcgtgtagacccagatgtggctcagcactgggccaagtcagagaaggtgaagctgtgggaggtgtcagtggcggaccggcgctccctcctggagccctttgtctacttggccagcaagatgacgcaaccccagagcaagtctgccttccccctcagccggaagaacaagggcagcggctccttggatggctgaagagctgccgttcctctttcacgatcccagccccatttcagtgtctggggctctggtagatgtgttgagggcaaagtagaggacaagctgtctttcccagtcagccagggagctccccgccaggccacgccccagccactttgctccctctcacctctgggaagtgcaaatactcttggttgacatccccttcctcagccctcccagcctactccccatcccagcttttagaggatctgctccactgtctcctggggcagttgtgggtcactgtcccttccagctgccccagacaggaagcagagtcaccacgcagcagtgtcccttcttgggtctgagttcctattataggtaggggccccaccctctgggcttcccatcagcgacacacacacacttatggcaccagcctggactccagaaaaagggtgtccaggtattgtgtgtatgcatttagttgtgcacacacaaatatgctcctatactggcattaggcgtctcctcatccctcaccctgacctttctcctgtccttttcttggctggaagaagttggcctcctgggagtgtagttttctgttttaaatcccccacccctggctgggctcagtggctcacccctgtaatcccagcactttgggaggccaaggcgggtcgattacttgaggtcaggagttcacgaccagcctggccaacattgtgaaaccccatctctgccaaaaatacaaaagttagccgggcgtagtggcacatgcctgtaatcccagctacccggggaggctgaggcaggagaattgcttgaactcagaaggcggaggctgcagtgagccgagatcgtgccactgcactccagcctggtcaacagagcaagactccatctcgaagaaaaaaaaaaaaaattccccacccctaccaattgttttacttcctcttcctgctcagggagcagatgggcctcactggttgagatggaatagaataactgggctatgagtcaccagcccactttgtgacccagcaagacctttcccctctctgggcatcagtttctcatctgtaagatgaccagagttgcttagatgatctcctagatcctttccagttctcttgatttcgtaaagccaatggcttctccctctttaaggtgctatgccaaccagccctggaggctgggatctgccgctccctccagccaccagggggcaggagtgcactacctgctgtcagtcaccagagtggccgctcagtgcccagcccgccagcctcgctcttggaggctgctctttatcctgcctgtggttttcagctcagagctggacttctatttataagttacctgtatttatatttatatgcccgctctcatggtgaaggctggacaaggtgctcctctggcccctccttcttacctcagatgcctgaacagaacaaggcaaacccgtagcagcctctcaggagctgacaggtcctctttcggggctcaggagggtgggcacacacccagcggcctgcagagtaagcttattacccacaactgtgcccgctttgtgcttctaaggtgcacacctagcctaggtgagacactgcagccaggcaaccaccgacacacgccccttctcaaagccagaggtgagtggggcaggtgcccggggctgggtgagtggaattaggacacacacaggcttgggcttcaagttcatttattgatgcattggttggacacaataaaaccacaattgttatcaaaaa

SEQ ID NO: 1312 - DNA, 6580 bp, Homo sapiens
aaaaataactcatattgtctctgaggttcttttccagtgaagtgtttagtattgctgctatttggagtacaaagttggagcttttaaagaacctgggagttcaaaagtataaggagaaataaatgaaaagcagaaatattttgaggcaataagtatagactcaaatctatattatgacccacttgtagcaccacttggaattctaccaataagagatttatttgggcaaactataatggttgttggaaattgcaaatcttagtgtgaattattttagtccagttggtttctttctttctcttacctgaaatgaactatactgaggcaataggagctttgtatagtaatttaggagtgtaaaacaacttagggaaaaggattattaagcaggatgattgggatgacatcatgtgaaatttaggaattggaggcattgggaattgagagggtgctaacaaaggaaaacagcttattttagaatttgtctggaggatgtagaattgaagaagttttggtatttcttctgcagcggccccagtgcccttgaccaggaacatctcttggagtcagtagttttcatgaggctgacctaggaacttggccaacatatgcaacattgttctatttaaaatattccttgaattaaattcgatagtatcaatttaaaacataaagttttcactcaactcctttagaagttagattttagcttgtacttgtctttacctcttctgctgattatcagttgacaacactgagattactttcattttcctgtaagtcattatgaatttttctggtcaaccatgagttatcagtggaagcaataagtaggaagtactgtaaaagaattacaataaaataagagaaaccacttggagagcaagagggcttgtggacttgggggagcggttgtgagaaatgtctcagaacttaatttacaaataacattggtagattgacatgttgtctttcctataaagtaactttacctctgtcttaatagtaaactactatgaaagtgaattcgtgttcctcttgatttgtgaactgatgaaaattacaaaatgtggagttttttccccagataaagtaaatggtggaatattcaggtttatttgatacctagaaaatacctgaaattttccgtggtaataggcacattttgaaactgttttttttttctctgacaattgaatatattttatatatagttgattttgattattgaagactaaggaaaatttaagtttgaatgttagaaaatgaattttgcaaatttgaagtaattttattctttatgttttgggattgtagttatgttagatattcctcagttggggtaattgtcttgcatcattatctcttatcataatctgtttttcttcacacagtgttatagttttgccgctggactcttccctcccttcccccaccccatcaggatgatatgagacttgaaagaagacgatgcatacaggaggagagacttcagcatgcaaaccttcatctgttcggcttgcaccgtcattttcattccatgctgctggccttcagatggctggacagatgccccattcacatcagtacagtgaccgtcgccagccaaacataagtgaccaacaggtttctgccttatcatattctgaccagattcagcaacctctaactaaccagaggcggatgccccaaaccttccgtgacccagcaactgctcccctgagaaaactttctgttgacttgatcaaaacatacaagcatattaatgaggtttactatgcaaaaaagaagcgaagacaccaacagggccagggagacgattctagtcataagaaggaacggaaggtttacaatgatggttatgatgatgataactatgattatattgtaaaaaacggagaaaagtggatggatcgttacgaaattgactccttgataggcaaaggttcctttggacaggttgtaaaggcatatgatcgtgtggagcaagaatgggttgccattaaaataataaagaacaagaaggcttttctgaatcaagcacagatagaagtgcgacttcttgagctcatgaacaaacatgacactgaaatgaaatactacatagtgcatttgaaacgccactttatgtttcgaaaccatctctgtttagtttttgaaatgctgtcctacaacctctatgacttgctgagaaacaccaatttccgaggggtctctttgaacctaacacgaaagtttgcgcaacagatgtgcactgcactgcttttccttgcgactccagaacttagtatcattcactgtgatctaaaacctgaaaatatccttctttgtaaccccaaacgcagtgcaatcaagatagttgactttggcagttcttgtcagttggggcagaggatataccagtatattcagagtcgcttttatcggtctccagaggtgctactgggaatgccttatgaccttgccattgatatgtggtccctcgggtgtattttggttgaaatgcacactggagaacctctgttcagtggtgccaatgaggtagatcagatgaataaaatagtggaagttctgggtattccacctgctcatattcttgaccaagcaccaaaagcaagaaagttctttgagaagttgccagatggcacttggaacttaaagaagaccaaagatggaaaacgggagtacaaaccaccaggaacccgtaaacttcataacattcttggagtggaaacaggaggacctggtgggcgacgtgctggggagtcaggtcatacggtcgctgactacttgaagttcaaagacctcattttaaggatgcttgattatgaccccaaaactcgaattcaaccttattatgctctgcagcacagtttcttcaagaaaacagctgatgaaggtacaaatacaagtaatagtgtatctacaagccccgccatggagcagtctcagtcttcgggcaccacctccagtacatcgtcaagctcaggtggctcatcggggacaagcaacagtgggagagcccggtcggatccgacgcaccagcatcggcacagtggtgggcacttcacagctgccgtgcaggccatggactgcgagacacacagtccccaggtgcgtcagcaatttcctgctcctcttggttggtcaggcactgaagctcctacacaggtcactgttgaaactcatcctgttcaagaaacaacctttcatgtagcccctcaacagaatgcattgcatcatcaccatggtaacagttcccatcaccatcaccaccaccaccaccatcaccaccaccatggacaacaagccttgggtaaccggaccaggccaagggtctacaattctccaacgaatagctcctctacccaagattctatggaggttggccacagtcaccactccatgacatccctgtcttcctcaacgacttcttcctcgacatcttcctcctctactggtaaccaaggcaatcaggcctaccagaatcgcccagtggctgctaataccttggactttggacagaatggagctatggacgttaatttgaccgtctactccaatccccgccaagagactggcatagctggacatccaacataccaattttctgctaatacaggtcctgcacattacatgactgaaggacatctgacaatgaggcaaggggctgatagagaagagtcccccatgacaggagtttgtgtgcaacagagtcctgtagctagctcgtgactacattgaaacttgagtttgtttcttgtgtgtttttatagaagtggtgttttttttccaaaaacaaagtgcaaagctgcttgaatcaggaggagattaacacactgaaccgctacaagagggcaaagctgattttttttttaacttgaaaagattgcaaagggacattgaagtgtttaaaagagccatgtccaaacccatcttcatggatagctcagaggtatcctctttttgctcccccattttaacttgccacatcccagtcacagtggggtttttttgtctttctattcagcaaaagttaatattcagatgttggtcttggtcatttgccaactaattttaaagtaaaaggcactgcacataatttgcataaagggccccatgagggtgttttttttttttctttttgtcccccccatccccctttttttttgttttgttctgttttgttttgggtgggagggtgggaaatttgggtttttaagtcctctaaacacacttgggcacggaaatgcagtactgtaaggaagagggacctccagcttccacaaacaccatcttcagctgtatgaaagggacggttgtggtgaagtttgtcaggcacagtaagcatgctgagtggcggggatcagaactctcctatctgaacctactgaggagcaaagcagcaattacatgggatcctgtggctctcccgttgcagaggccacaggaagataggatggaacgtgactggtctcctaaccaaggtgcactgagaagcaatcaacgggtcggtcgtggccagtcctggggaggtctgagtggtggtctttgggataacctttggccttatggatttggactcgaaattagaagagcctaccatttcagatgcaatcacttttggacatgcttttgcagacagtccttaatgctgaaaacacagagaatgggtaattcaagaggcctttcttttaaaatagacttttgtgacccactaattgtaaggtattgcaaggtcactttgcgtgtgtcataaagttgacttccttattggttgaaggtcacagaagtagtggtttgctttgatggaaatagctacagctgtgtcccttcctgctttttactttttcttttgctttttctcggcacgtggtatctccaccatttcttctgcacaaagatgtcttctgttcatcctgaacatttttaaaaaatgcagaattttatgtgactgcttttttgcctcacaattatgctgtgaattttacaaaaatttattttcttttttgataatttattgtaccaaagctgtttttatagcacatagatgtctgtaaccaataatgtagcagttctgcactttgacacaaggtgtaactagaccatttttaaatgtcagttgaaaattatggctgtactattgcttaaacaaaactggaactgttgttgaatccatagccaatacatttacagcaatctgtgtactgaacatagtagattgacatctaattcaagattacaacatctgttacattctaagtgtgttcaggcttctgaaggtaaagggacactggatccagaagctatggaaccagcagttgattcttgtattcctgattaacctacttgtaaacttgaaagcaagaccttgattgcaccaacaggtccagagtatgagtgcaagcaaagcagaactctcatgcgtgacctgagcagacaggctggtatttaacaggtgcctcgtgttgagattacgctgccttaatgtaacacagtctggcagttgctaaatttgtgttcccattttaaattgaccaattttggggtgtgacacttttgagcggttgaattgggagaatgaagataagtaatttacctgtccaggatcaaaagaagcctagaaaagaagcagtaatctacctctgccgataacctgtttaagatgactcagcagaacaccgcgtttcattctattggtcaattccatgtggctgactaggtcaattttttttctgaacaaaagcaggtttttatatgtaaacagtgagaaaagaaaggctaaacactatgtaaatgtgaatggaaacttggaaatactcgtttttataaactacaaaaactttttgttgtttatcaggaaatccatatttattttgtaattaactgtcaagcctgtggatgatttttttgaacttggtagttcataaaggtttacagtgaataaaaggatatcatcttgagtatagcaatatcaaaaggaattcagtagttactgctgtttaggaatataaggttaagatatcatatgggtcaggtcattttttttttctgtgctggttgccacatcttagcaagcaccaaaaaactaaagcagtttttaaaccgatatttacgtaaagaaaatcataaaatccaatgcttctgcatactgtgttatgttacagtccagttttgtgtgctttactacacagtttggttacaggacttctgtgcattgtaaacataaacagcatggaaaaggttaaatacctgtgttcagattgtaagatctagtccggacttgctgtgtatattgtaacgttaaatgaaaaaagaacccccctttgtattatagtcatgcggtcttatgtatgataaacagttgaataatttgtcctcagactctttactatgcttttttaaaaattaatttaagaaaaatgtaaacatagtaaaaatcttcctatgcaattaaactggtccaggtctggtaggtatagtatcaaagttgagttaaatgtgtaaaaaggaaactatttgagatacattgacataggcatcagcaatctctgaaagtaaaaattggaggtttaacaga

SEQ ID NO: 1313 - DNA, 3670 bp, Homo sapiens
cgcagcaaacacatccgtagaaggcagcgcggccgccgagaaccgcagcgccgctcgcccgccgccccccaccccgccgccccgcccggcgaattgcgccccgcgcccctcccctcgcgcccccgagacaaagaggagagaaagtttgcgcggccgagcggggcaggtgaggagggtgagccgcgcgggaggggcccgcctcggccccggctcagcccccgcccgcgcccccagcccgccgccgcgagcagcgcccggaccccccagcggcggcccccgcccgcccagccccccggcccgccatgggcgccgcggcccgcaccctgcggctggcgctcggcctcctgctgctggcgacgctgcttcgcccggccgacgcctgcagctgctccccggtgcacccgcaacaggcgttttgcaatgcagatgtagtgatcagggccaaagcggtcagtgagaaggaagtggactctggaaacgacatttatggcaaccctatcaagaggatccagtatgagatcaagcagataaagatgttcaaagggcctgagaaggatatagagtttatctacacggccccctcctcggcagtgtgtggggtctcgctggacgttggaggaaagaaggaatatctcattgcaggaaaggccgagggggacggcaagatgcacatcaccctctgtgacttcatcgtgccctgggacaccctgagcaccacccagaagaagagcctgaaccacaggtaccagatgggctgcgagtgcaagatcacgcgctgccccatgatcccgtgctacatctcctccccggacgagtgcctctggatggactgggtcacagagaagaacatcaacgggcaccaggccaagttcttcgcctgcatcaagagaagtgacggctcctgtgcgtggtaccgcggcgcggcgccccccaagcaggagtttctcgacatcgaggacccataagcaggcctccaacgcccctgtggccaactgcaaaaaaagcctccaagggtttcgactggtccagctctgacatcccttcctggaaacagcatgaataaaacactcatcccatgggtccaaattaatatgattctgctccccccttctccttttagacatggttgtgggtctggagggagacgtgggtccaaggtcctcatcccatcctccctctgccaggcactatgtgtctggggcttcgatccttgggtgcaggcagggctgggacacgcggcttccctcccagtccctgccttggcaccgtcacagatgccaagcaggcagcacttagggatctcccagctgggttagggcagggcctggaaatgtgcattttgcagaaacttttgagggtcgttgcaagactgtgtagcaggcctaccaggtccctttcatcttgagagggacatggcccttgttttctgcagcttccacgcctctgcactccctgcccctggcaagtgctcccatcgccccggtgcccaccatgagctcccagcacctgactccccccacatccaagggcagcctggaaccagtggctagttcttgaaggagccccatcaatcctattaatcctcagaattccagtgggagcctccctctgagccttgtagaaatgggagcgagaaaccccagctgagctgcgttccagcctcagctgagtctttttggtctgcacccacccccccacccccccccccccgcccacatgctccccagcttgcaggaggaatcggtgaggtcctgtcctgaggctgctgtccggggccggtggctgccctcaaggtcccttccctagctgctgcggttgccattgcttcttgcctgttctggcatcaggcacctggattgagttgcacagctttgctttatccgggcttgtgtgcagggcccggctgggctccccatctgcacatcctgaggacagaaaaagctgggtcttgctgtgccctcccaggcttagtgttccctccctcaaagactgacagccatcgttctgcacggggctttctgcatgtgacgccagctaagcatagtaagaagtccagcctaggaagggaaggattttggaggtaggtggctttggtgacacactcacttctttctcagcctccaggacactatggcctgttttaagagacatcttatttttctaaaggtgaattctcagatgataggtgaacctgagttgcagatataccaacttctgcttgtatttcttaaatgacaaagattacctagctaagaaacttcctagggaactagggaacctatgtgttccctcagtgtggtttcctgaagccagtgatatgggggttaggataggaagaactttctcggtaatgataaggagaatctcttgtttcctcccacctgtgttgtaaagataaactgacgatatacaggcacattatgtaaacatacacacgcaatgaaaccgaagcttggcggcctgggcgtggtcttgcaaaatgcttccaaagccaccttagcctgttctattcagcggcaaccccaaagcacctgttaagactcctgacccccaagtggcatgcagcccccatgcccaccgggacctggtcagcacagatcttgatgacttccctttctagggcagactgggagggtatccaggaatcggcccctgccccacgggcgttttcatgctgtacagtgacctaaagttggtaagatgtcataatggaccagtccatgtgatttcagtatatacaactccaccagacccctccaacccatataacaccccacccctgttcgcttcctgtatggtgatatcatatgtaacatttactcctgtttctgctgattgtttttttaatgttttggtttgtttttgacatcagctgtaatcattcctgtgctgtgttttttattacccttggtaggtattagacttgcacttttttaaaaaaaggtttctgcatcgtggaagcatttgacccagagtggaacgcgtggcctatgcaggtggattccttcaggtctttcctttggttctttgagcatctttgctttcattcgtctcccgtctttggttctccagttcaaattattgcaaagtaaaggatctttgagtaggttcggtctgaaaggtgtggcctttatatttgatccacacacgttggtcttttaaccgtgctgagcagaaaacaaaacaggttaagaagagccgggtggcagctgacagaggaagccgctcaaataccttcacaataaatagtggcaatatatatatagtttaagaaggctctccatttggcatcgtttaatttatatgttatgttctaagcacagctctcttctcctattttcatcctgcaagcaactcaaaatatttaaaataaagtttacattgtagttattttcaaatctttgcttgataagtattaagaaatattggacttgctgccgtaatttaaagctctgttgattttgtttccgtttggatttttgggggaggggagcactgtgtttatgctggaatatgaagtctgagaccttccggtgctgggaacacacaagagttgttgaaagttgacaagcagactgcgcatgtctctgatgctttgtatcattcttgagcaatcgctcggtccgtggacaataaacagtattatcaaagagaaaaaaaaaaaaaaaaa

SEQ ID NO: 1314 - DNA, 8505 bp, Homo sapiens
ctcacttccgcccaggtgaggcagggccgacaccgagcccgcccgacccgggctcccacctgctcctccagcgcaccaggtgtctttaagagtgattgaagagaataattcaaaatgcctgaaaatcctgctacagataaactgcaggtgctgcaggtacttgatcgcctgaaaatgaaattgcaggagaagggtgacacgtcgcagaatgagaagttatctatgttttatgagacactaaagagtcctctcttcaaccagatactcacacttcagcagtccatcaagcaactgaagggtcaactcaaccatataccctcagattgttcagccaactttgatttttctaggaaaggtttgttagtgttcacagatggttccattactaatggaaatgtccacaggccctctaataactcgactgtatctgggttatttccgtggaccccgaagttgggaaatgaagactttaactcagtcattcaacagatggctcagggccggcaaattgaatatatagatatagaacggccttcaactggaggccttggattcagtgtggtggccctcagaagtcaaaatctcggaaaagttgatatcttcgtgaaggatgtccagccagggagtgtagcagacagggatcaaagattaaaggaaaatgatcaaatattggccattaatcacacgccattggatcagaacatttcccatcagcaagcaattgcattattacaacaaaccactggatctttgagactgattgtggccagggaaccagtccacacaaaaagcagtacttctagcagcctaaatgatacaactctgcctgaaacagtttgttggggccatgttgaagaggttgagctcattaatgatggctctggactaggttttggaatagttggaggaaaaacaagtggcgtggttgtgaggactatagttcctggaggattagcagatcgagatggaagactccagacaggggaccacatcttgaagattggtggcacaaacgtgcagggaatgaccagtgagcaagttgcacaagttctaaggaactgtgggaattcagtcaggatgctcgttgctagagatccagctggtgacatttcagtcaccccccctgcccctgcagccttacctgttgccctgcctactgtagccagcaagggccctggttctgacagttctctttttgaaacttataatgttgagcttgtgagaaaagatgggcagagtcttggaattagaattgttggctatgttggaacatctcatacaggggaagcttcagggatttatgtgaaaagtataatacctggcagtgctgcgtaccacaatggccacattcaagtgaatgacaaaatagttgctgtcgatggcgtgaacattcagggttttgccaaccatgatgttgttgaagtattacgaaatgcagggcaggtggtacacctaaccctagttcgaaggaagacatcctcatctacttctccacttgaaccaccttcagacagaggaactgttgtagaaccactgaaaccaccagctctctttctaactggagcagtggaaactgaaactaatgtggatggtgaagatgaggaaattaaagaaagaattgatactttaaaaaatgacaacatacaagccttagaaaaattggaaaaagtcccagactctccagaaaatgagctgaaatccagatgggaaaacctgttgggtcctgattatgaagtaatggttgctactttggacacacagattgcagatgatgctgagttacagaaatattcaaagctgctgcctattcacactctgaggcttggtgtggaagtggattcctttgatgggcaccattatatttcttcaattgtttctggtggtcctgttgatacattgggtctcctacagccagaagatgagctgcttgaggtcaatggcatgcagctttatggaaaatctcgccgagaagcagtctcctttcttaaagaagtgccacccccttttactttggtttgctgtcggaggttgtttgatgatgaagcttctgtagatgaaccaaggcgcactgaaacctctcttcctgagacagaggttgaccacaatatggatgtcaatactgaagaagatgatgatggggaattagcactgtggtcccctgaagtcaagattgttgaactagtaaaagattgtaaaggtttgggattcagcattttggattaccaggaccctttagatcctacaagatcagtgattgtgatccgctccctggtagcagatggtgtagcagaaagaagtgggggactattacctggagaccgcctggtctcagtcaatgaatactgtttggacaacacctcacttgctgaagctgtggaaatattgaaagctgtgccaccaggcctagtacaccttggcatctgtaagcctttggtggaagataatgaagaagaaagttgttatattttacattcaagcagtaatgaagacaagactgaattttcaggaacaattcatgatataaattcatctttaatactcgaagcacccaagggatttagagatgaaccatattttaaagaagaacttgtggatgaaccatttctagatctgggaaagtctttccattcccaacaaaaagagatagagcaaagcaaggaggcctgggagatgcatgaatttctgactcctagattgcaggaaatggatgaagaaagagaaatgcttgttgatgaagaatatgagttatatcaagatccctcaccatccatggagttgtatcccttgtcgcacattcaagaggccactcctgtgccctctgtgaatgaacttcactttggtacacagtggttgcatgataatgaaccatccgagtctcaagaggcaagaaccgggaggactgtctattcccaggaggcacagccgtatggctattgccctgaaaatgtgatgaaagaaaattttgtcatggagtccctaccatctgtaccatcaactgaaggaaacagtcaacaaggcagatttgacgacctggaaaatcttaattcattagcaaaaactagtctggatttaggcatgatcccgaatgatgtccaaggtcctagcttgctcattgaccttcctgttgtggctcaaaggagggagcaagaagatttgcctttatatcaacaccaagcgacacgagttatttccaaggcctcagcatacacaggaatgttgtcttctagatatgccactgatacatgtgagttacctgagagagaagaaggcgaaggagaagaaactccaaattttagccactggggtccaccgagaattgttgagatttttagagaacccaatgtgtctcttgggatcagtattgttggtggacaaactgttataaaacgtctaaagaatggagaggagcttaaaggtatattcatcaaacaagttttagaagacagtccagcagggaagacgaacgcacttaaaactggagataaaatacttgaggtgtctggagtagatttgcagaatgcctcacacagcgaagcagttgaggccattaagaatgcaggaaaccctgtggtgttcattgttcagagtttgtcatccactccacgagtcattcctaacgtacataacaaggccaacaaaatcaccggtaaccagaaccaggacacccaagaaaagaaagaaaagaggcaaggaactgctccaccgccaatgaaacttcctcctccttataaagctctgactgatgacagtgatgaaaatgaagaagaagatgcctttaccgaccaaaaaatcagacaaagatatgcagatctgcctggagaactgcacattattgaacttgaaaaagataagaatggacttggactcagccttgctggtaataaagaccgatcacgcatgagcatatttgtggtgggaattaacccggaaggacctgctgccgcagatggacgaatgcgtattggagatgaactcttagagataaacaatcagattctgtatggaagaagtcaccaaaatgcatctgccattattaagactgccccatcaaaggtcaagctggttttcatcagaaacgaggatgcagtcaatcagatggccgttactccctttccagtgccatcaagttctccatcttctattgaggatcagagcggcaccgaacctattagtagtgaggaagatggcagcgtcgaagttggtattaaacaattgcctgaaagtgaaagcttcaaactggctgtcagccagatgaaacagcaaaaatatccaacaaaagtctccttcagttcacaagagataccattagcaccagcttcatcataccattcaacagatgcagacttcacaggctatggtggtttccaggctcctctgtcagtggaccccgcaacgtgtcccattgtccctggacaggaaatgattatagaaatatccaagggacgttcagggcttggtctcagcattgtgggaggaaaagacacacccttgaatgctatagttatccatgaagtctatgaagaaggggcagcagccagagatggaagactttgggctggtgaccagatattagaggttaatggggttgacctgaggaactccagccacgaagaagccatcacagccctgaggcagaccccccagaaggtgcggctggtggtgtatagagatgaggcacactaccgggatgaggagaacttggagattttccctgtggatctgcagaagaaagctggccggggcctgggcctgagcatcgttgggaaacgaaatggaagcggagtgtttatttctgacatcgtgaaaggcggagccgcagacctggatgggagattgattcagggagatcagatcttatctgtgaatggggaggacatgagaaatgcctcacaggagacagtggccaccatcctcaagtgtgcacagggacttgtgcagctagagattggaagactccgagctggttcctggacctccgcaaggacgacatcacagaacagtcagggtagtcagcagagtgcacacagcagctgtcatccctccttcgctcctgtcatcactggcctgcaaaacctggttggcacaaaaagagtttcagatccttcccagaaaaattcaggcacagatatggaaccaaggactgttgagataaacagggagctcagtgatgcccttggaatcagtattgctggaggaagaggaagtcccttaggagatatccccgtatttattgccatgattcaggctagcggagtggccgcacggacacagaagcttaaagttggagatcggattgtcagcattaacgggcaacctttggatgggctgtctcacgcggatgtggttaatctgctgaagaacgcctacgggcgcattatcctgcaggttgtagcagataccaatataagcgccatagcagctcagcttgaaaacatgtctacaggctaccaccttggttcgcccactgctgaacaccatccagaagacacagaggagcagctgcagatgacggccgattaaaacgaggggatcagattttagctgttaatggcgagaccctggaaggtgttactcatgagcaagcagtcgccattctaaaacaccagagagggactgtaaccttaactgtgctgtcatgagcctcgggcctgatcacaagatagatgttgttgtttagaatatccacaggcagatgaagttctgagtgggtatgaaaagcaccctcaactaaaatgcaccttcattcttatttcttgccctctctgctcaggagaaatggctgaggtttcatgtgaatttcccaaatcaacaatcatctcctaatgtttcccagttcctgtcacctgttggcgaggttgatttctaaaacttaaatgagtctacctgttttgcatttaatttcagtgttccgatttctttttttttttttttttttttttttgagacggagtctcactctgtcacccaggctggagtgcaatggcgcaatcttggctcactgcaacctcggcctcccaggttggagcgattctcctgcctcagcctcccgagtagctgggattacaggcatgcatcaccacactgggtttatttttgtttttttagtagagatggagcttccccatgtgggccaggctggtcttgaacttctgacctcaggtgatctgcctgccttggcctcccaaagtgctgggattccaggcgtgagccactgcgcccagcccagtattctgattttaaccaactggttctgattatatttaccaaaactggagttaacttctctttccttatactcttctctccctatcccctactcacaccgaggcttaacagcaacctcagatctcatccaatggacagaaacaaatgttaagcaacttgtcatctcactcatgatttacttatgctaattgtctcttcaagtaagcaagaaaacattagcagtgtaattaatttaccagtgatccccaagatgaaataccagattctcctatgggaaattactgtgctgtcttctgtatgacttatggtcaaataagtctcaaattcatttctctggatagatctttatatgctagtcattggtgattttgatgagtcaatttacagactgtaatcttctaaaaattctgaaagactaattgttttctgtgccatataaatgcataccactgagcaaatgaaccttattctcagcaggaacaactagcatacatgttctgaattctaacagtgctaaattacattcaagtccaggaagatcacctggaattaatggcatttcagttggcaggcatcattcccacccctcggtcttaggaaaaggaggtagaagccccagaaccacacggcagagatcagcaagttttgtctcaagtcagacaaggtctaggtggccttggccttatgcaaagtgggtgacatatttgattatatttccctttacctccatagtagtcaggccagcagcatggactgcaagaacctaagggagcaacatacttagctgcaaagtgagcaaatgaattgagcctaggaatatgtgatgaaaatgcatggctgatgtttcctgatctccaaggagactcccatttgctgaagttttgcatgctaagaaatcaactacagcagaaaatacaagaatacctttaagttgattattggcaatcttattcatatattagcaagaaaaagggagagatgcttactggtggatgctatagagtcctctgtttttaaaagtaccatggccgggtgcagtggctcacgcctgtaatcccagcactttgggaggccagggcaggcgaatcatgaggtcaggagttcgagaccagcctggccaatatggtgaaaccctgtctctactaaaaatacaaaaattagctgggtgcagtggcaggcgcctgtaatcccagctactccggaggttgaagcaggaaaattgcttgaacctgggaggtggaggttgcagtgagccaagttcgtgccactccactccagcctgggtgacagagcaagactctgtctcgaaaaagaaaaaaaaccatgaaggatgagtactagagtcagtaatagaagtagttcagcattatttaactacaacacaatgctgcaaatatttcacagtaattatcaaaatttaatgggctctaatttaaaatgttatttaataagtatagattttaattgagaattatctttgagtagatgtaatcacaaagtgcattaactcttgttggaatattttatggctattccaaagtatagagtgcctaaattttgtgttgaaaatgtctttcatgacggtattaagttttctgaaattacacatggcttttaaaatttctaatgtatccaagatgtgcaatgttgttaggatctcattcttcagtgcatgaaaagctactaccctcagaacattttgtgttaattgtacctgcaagaacacctcaggcaagccaagaagaaatgaaacccaaataaaacttgaaaatgcaccttaaaaatatatatacatataatagttttgaaatgggattctgctttattttgatggaatggccattaaatacacattttgagataatacattgttgtggtgtttctttatacattatccttttaggtcgtgctagtaaaagtatattgatgaaggaattatgatgctttatacttcttactgcactaaattgatagaactagtacttgtcataatcggttctgtctccgctcacatgactaatacgtaattgcctttccaaaaagatatttttgcctcagaacttactgacaagctgagaggctatgaagatggaaatttgtgaaagaagtagtgctcttatatttggcctcatcatttgggccatttcagtatagtaatgatatcactaatcggaattagcatgagagggaagtaagccaggaagaataaaactgctgaatgtttgtatgtgtaagatatttccaaagattctaaataaatgtagttgcctacagagcaaa

SEQ ID NO: 1315 - DNA, 5039 bp, Homo sapiens
gcgattcggctggctctgccacaccaccgcgcgcccccgctccgcccgcccctccgggcgcgtcttttccgggctcgcgctgagtcccgcctccgccggctgtccgggtgcgcgcgcgccgctgcggctttttctctggcctccgccgcgcgctcctcctcgtcccagcgctagcgggcacgcggttcctttttgcgagctttccgagtgccaggcgccggccggctgcgaagacgcggtgggccgcccctccgattgaaatcacagaagatattcgtgttcttcttaagagaaaaagaggacatttaaaaacgctatggcaaagagaataaaagctaagcccacttcagacaaacctggaagtccatatcgctctgtcacacacttcgactcactagctgtaatagacatccctggagcagatactctggataaattatttgaccatgctgtatccaagtttgggaagaaggacagccttgggaccagggaaatcctaagtgaagaaaatgaaatgcagccaaatggaaaagtttttaagaagttaattcttgggaattataaatggatgaactatcttgaagtgaatcgcagagtgaataactttggtagtggactcactgcactgggactaaaaccaaagaacaccattgccatcttctgtgagaccagggccgaatggatgattgcagcacagacctgctttaagtacaactttcctcttgtgactttatatgccacacttggcaaagaagcagtagttcatgggctaaatgaatctgaggcttcctatctgattaccagtgttgaacttctggaaagtaaacttaagactgcattgttagatatcagttgtgttaaacatatcatttatgtggacaataaggctatcaataaagcagagtaccctgaaggatttgagattcacagcatgcaatcagtagaagagttgggatctaacccagaaaacttgggcattcctccaagtagaccaacgccttcagacatggccattgttatgtatactagtggttctactggccgacctaagggagtgatgatgcatcatagcaatttgatagctggaatgacaggccagtgtgaaagaatacctggactgggaccgaaggacacatatattggctacttgcctttggctcatgtgctagaactgacagcagagatatcttgctttacctatggctgcaggattggatattcttctccgcttacactctctgaccagtccagcaaaattaaaaaaggaagcaaaggagactgtactgtactgaagcccacacttatggctgctgttccggaaatcatggatagaatttataagaatgttatgagcaaagtccaagagatgaattatattcagaaaactctgttcaagatagggtatgattacaaattggaacagatcaaaaagggatatgatgcacctctttgcaatctgttactgtttaaaaaggtcaaggccctgctgggagggaatgtccgcatgatgctgtctggaggggccccgctatctcctcagacacaccgattcatgaatgtctgcttctgctgcccaattggccagggttatggactgacagaatcatgtggtgctgggacagttactgaagtaactgactatactactggcagagttggagcacctcttatttgctgtgaaattaagctaaaagactggcaagaaggcggttatacaattaatgacaagccaaaccccagaggtgaaatcgtaattggtggacagaacatctccatgggatattttaaaaatgaagagaaaacagcagaagattattctgtggatgaaaatggacaaaggtggttttgcactggtgatattggagaattccatcccgatggatgtttacagattatagatcgtaagaaagatctagtgaagttacaagcaggagagtatgtatctcttgggaaagtagaagctgcactgaagaattgtccacttattgacaacatctgtgcttttgccaaaagtgatcagtcctatgtgatcagttttgtggttcctaaccagaaaaggttgacacttttggcacaacagaaaggggtagaaggaacttgggttgatatctgcaataatcctgctatggaagctgaaatactgaaagaaattcgagaagctgcaaatgccatgaaattggagcgatttgaaattccaatcaaggttcgattaagcccagagccatggacccctgaaactggtttggtaactgatgctttcaaactgaaaaggaaggagctgaggaaccattacctcaaagacattgaacgaatgtatgggggcaaataaaatgttgttgtcttattgacagttgtgcaggaggtagcctggtggttttcaacctctagaattttaagcctttgttgaactgttagaatgtaaggtatatcattctaaagatagagtaaaaagaaaacaaaaccaaaagttattaaaattgttgtccggtttactttaacttagttttgcatagttctagtgcagctgaaattgaaaagttatttccctttagctgtgttattatagagcagaaattctgtttttaaaaattagcctaagatatacttgtttttgtaaagaaaaatatttaatgttgaacaaaataaattggagttggagtagaatgtagtttgaggaaatttgcagcttccaatgcctcttgtcttcctatttcagaagtttaaatattaagcatgacagaaaatatgtattaacactactcaaagcaaaagtgctgcagggctttaaaattctcttccaaccatttatcttgaaggaaaaattcaatagtaatataatacacaaaatcaaataataccttagaaggtattaagattataattgttgcataggttagatatagagtcattgtaatgttgtgaataattacagtgcctaaaataagaatagaacaacatatacaacaccaaaaaatatctagtaatatatttaaagggaaattgagctgctttttttgaaactttgagatctaaaaataactgtaattatttgaatgactaagaggaaagtacattttttgaaatgctgaaaattgcctttctgtgtttattcaaactgaaaagctgagaccaagagcaaggaaggtaaaaagttaacaggcaaacattttctcttagaaaaggtgataaaatcataagtatttggaattagaacccttgcacagcactgaacctgggaaagagatttaaactctgaatttatctttgataacagggattgattttaaaatgtacatgtattaaattacatttgtaatttaaggtctgtttgctgttgctgattttattcttgatcagtagtttgcatttcagaaagcctttcattttgctttaattttagcaaagcgggttataatgaatgacttccccaatatcttgcttgaacttacaggtgattaacttggatgagttttgggaagttaaagggaagaaaacactgttatcattttttcctgtttgggaagagcttagaaactggaaatactagatttgggagaagggcagagttacttgataagggactgatgtttgtgcagtaacttgggagtgtggtttctttttgaatctttaattaaaacctgggattatatatccctgataaatattcacacttgaaccatagttactgtaaaatgcaaaaaatcttaatactgttattctttgcactttttcttaatcattttttatatatatgcatatatatatgtgtgtgtgtgtgttgcttatgttgttttgtacagatgtgggccaccattgcaacaaaatacattctttttgctctaaaatatttatgaagaaaatacttaaatgttatgtatatggtggtaataagggaaaaatcaagtattataaacaagaatgaaggtttttgtaaagatttctgttcagcgttttgcaaggtaaaattttaggcaagttttccctgaagttatgtgtatgtgagtattctcattcttcccaacttgcctttgaagagtgaaataccattattatcaagtagactactgttcagcttttattcctgccctgctgtttatcccttaagaatgagtttcttagacttttccaatatgtgattttttttcccatttagaatggtgattttaaatgtgtgagtgcatgtactatcttatctcagatatttgcacccccaatctgcccccaactcccaaaagctagaacactgccaactgatctgttataggtcctttagaaacacataattaacacttaaggttgggtgctgctaattctttgcaaaaatccaaatattgttaagggaccagggagatgccactaccccttgattttccatctaaaaatatacatgtttatgtaaacaaatctttccatatccatagtgacttttcaagtatttaagcctaaagattttgatctcacatttttatacctgtttaaattgctcacagttattacatacacatcagccatcaactaaagttgtactttaaaaatttactacaatatgtacatttctaagtcaaacacttgtgacttttgctttaattccatgaatgttcctgcctccttgatatttgtatttattctttttttctctagagtagaggtataattgtgtgatatttcagaaatacagataaatgattcaaaaagtcacagttaaggagaatcatgtttctttgatcatgaataactgattagtaagtcttgcctatattttcctgatagcatatgacaaatgtttctaaggtaacaagatgagaacagataaagattgtgtggtgttttggatttggagagaaatattttaatttttaaatgcagttacaaattataatgtattcatatttgtactttctgttaaaatgcatgattgcagaattgtttagattttgtgtttattcttgatgaaaagctttgtttgttcttgtttttaagtttgcactcaaatcttaagaaataaatccacccatgttatcaaaaaaaaaaaaaaaaaa

SEQ ID NO: 1316 - DNA, 884 bp, Homo sapiens
cgaggttcgggtcgtggggcggagggaagagcgggcgggcgggaggcgccggcgccagacgcggagggaaggagctacgagtagccgccgagaggccgcggagccagcgacgaccgacccagccgagccgccgccgccgccgcgcccccatggcggccgccaaggacactcatgaggaccatgatacttccactgagaatacagacgagtccaaccatgaccctcagtttgagccaatagtttctcttcctgagcaagaaattaaaacactggaagaagatgaagaggaactttttaaaatgcgggcaaaactgttccgatttgcctctgagaacgatctcccagaatggaaggagcgaggcactggtgacgtcaagctcctgaagcacaaggagaaaggggccatccgcctcctcatgcggagggacaagaccctgaagatctgtgccaaccactacatcacgccgatgatggagctgaagcccaacgcaggtagcgaccgtgcctgggtctggaacacccacgctgacttcgccgacgagtgccccaagccagagctgctggccatccgcttcctgaatgctgagaatgcacagaaattcaaaacaaagtttgaagaatgcaggaaagagatcgaagagagagaaaagaaagcaggatcaggcaaaaatgatcatgccgaaaaagtggcggaaaagctagaagctctctcggtgaaggaggagaccaaggaggatgctgaggagaagcaataaatcgtcttattttattttcttttcctctctttcctttcctttttttaaaaaattttaccctgcccctctttttcggtttgtttttattctttcatttttacaagggacgttatataaagaactgaactc

SEQ ID NO: 1317 - DNA, 10585 bp, Homo sapiens
ctcccacctcgatgcggtgccgggctgctgcgtgatggggctgcggagcggcgccctgcggctcgcggcggccgctgctcgcgctgaggtgcgtcggtgcccggccccccgcgcccccgcgcgccgcggctcctgttgacccggtccgcccgtcggtctgcagcgcggctgaggaaacttggctgtaacttcaaaagaagatttgattctttatttctggactgcatatatatatataacaaggccattaaaatgtcgggagcctcagtgaaggtggctgtccgggtaaggcccttcaattctcgagagaccagcaaggaatccaaatgcatcattcagatgcaaggcaactcgaccagtattattaacccaaagaatccaaaggaagctccaaagtccttcagcttcgactattcctactggtctcatacctcacccgaagatccctgttttgcatctcaaaaccgtgtgtacaatgacattggcaaggaaatgctcttacacgcctttgagggatataatgtctgtatttttgcctatgggcagactggtgctggaaaatcttatacaatgatgggtaaacaagaagaaagccaggctggcatcattccacagttatgtgaagaactttttgagaaaatcaatgacaactgtaatgaagaaatgtcttactctgtagaggtgagctacatggaaatttactgtgaaagagtacgagatttgctgaatccaaaaaacaagggtaatttgcgtgtgcgtgaacacccacttcttggaccctatgtggaggatctgtccaagttggcagttacttcctacacagacattgctgacctcatggatgctgggaacaaagccaggacagtggcagctacaaacatgaatgaaacaagtagccgttcccacgctgtgtttacgattgttttcacccagaagaaacacgataatgagaccaacctttccactgagaaggtcagtaaaatcagcttggtggatctagcaggaagtgaacgagctgattcaactggtgccaaagggactcgattaaaggaaggagcaaatattaataagtctcttacaactttgggcaaagtcatttcagccttggccgaggtgagtaaaaagaagaagaaaacagattttattccctacagggattctgtacttacttggctccttcgagaaaatttaggtggcaattctcggactgcaatggttgctgctctgagccccgcggatatcaactacgatgagactttgagcactctgagatatgcagatcgtgcaaaacaaattaaatgcaatgctgttatcaatgaggaccccaatgccaaactggttcgtgaattaaaggaggaggtgacacggctgaaggaccttcttcgtgctcagggcctgggagatattattgatacatccatggggtccctcacttcatccccatcttcctgctcactcagtagtcaggtgggcttgacgtctgtgaccagtattcaagagaggatcatgtctacacctggaggagaggaagctattgaacgtttaaaggaatcagagaagatcattgctgagttgaatgaaacttgggaagagaagcttcgtaaaacagaggccatcagaatggagagagaggctttgttggctgagatgggagttgccattcgggaagatggaggaaccctaggggttttctcacctaaaaagaccccacatcttgttaacctcaatgaagacccactaatgtctgagtgcctactttattacatcaaagatggaattacaagggttggccaagcagatgctgagcggcgccaggacatagtgctgagcggggctcacattaaagaagagcattgtatcttccggagtgagagaagcaacagcggggaagttatcgtgaccttagagccctgtgagcgctcagaaacctacgtaaatggcaagagggtgtcccagcctgttcagctgcgctcaggaaaccgtatcatcatgggtaaaaaccatgttttccgctttaaccacccggaacaagcacgagctgagcgagagaagactccttctgctgagaccccctctgagcctgtggactggacatttgcccagagggagcttctggaaaaacaaggaattgatatgaaacaagagatggagaaaaggctacaggaaatggagatcttatacaaaaaggagaaggaagaagcagatcttcttttggagcagcagagactggactatgagagtaaattgcaggccttgcagaagcaggttgaaacccgatctctggctgcagaaacaactgaagaggaggaagaagaggaagaagttccttggacacagcatgaatttgagttggcccaatgggccttccggaaatggaagtctcatcagtttacttcattacgggacttactctggggcaatgccgtgtacctaaaggaggccaatgccatcagtgtggaactgaaaaagaaggtgcagtttcagtttgttctgctgactgacacactgtactcccctttgcctcctgaattacttcccactgagatggaaaaaactcatgaggacaggcctttccctcgcacagtggtagcagtagaagtccaggatttgaagaatggagcaacacactattggtctttggagaaactcaagcagaggctggatttgatgcgagagatgtatgatagggcaggggagatggcctccagtgcccaagacgaaagcgaaaccactgtgactggcagcgatcccttctatgatcggttccactggttcaaacttgtggggagctcccccattttccacggctgtgtgaacgagcgccttgccgaccgcacaccctcccccactttttccacggccgattccgacatcactgagctggctgacgagcagcaagatgagatggaggattttgatgatgaggcattcgtggatgacgccggctctgacgcagggacggaggagggatcagatctcttcagtgacgggcatgacccgttttacgaccgatccccttggttcattttagtgggaagggcatttgtttacctgagcaatctgctgtatcccgtgcccctgatccacagggtggccatcgtcagtgagaaaggtgaagtgcggggatttctgcgtgtggctgtacaggccatcgcagcggatgaagaagctcctgattatggctctggaattcgacagtcaggaacagctaaaatatcttttgataatgaatactttaatcagagtgacttttcgtctgttgcaatgactcgttctggtctgtccttggaggagttgaggattgtggaaggacagggtcagagttctgaggtcatcactcctccagaagaaatcagtcgaattaatgacttggatttgaagtcaagcactttgctggatggtaagatggtaatggaagggttttctgaagagattggcaaccacctgaaactgggcagtgccttcactttccgagtaacagtgttgcaggccagtggaatcctcccagagtatgcagatatcttctgtcagttcaactttttgcatcgccatgatgaagcattctccacggagcccctcaaaaacaatggcagaggaagtcccctggccttttatcatgtgcagaatattgcagtggagatcactgaatcatttgtggattacatcaaaaccaagcctattgtatttgaagtctttgggcattatcagcagcacccacttcatctgcaaggacaggagcttaacagtccgcctcagccgtgccgccgattcttccctccacccatgccactgtccaagccagttccagccaccaagttaaacacgatgagcaaaaccagccttggccagagcatgagcaagtatgacctcctggtttggtttgagatcagtgaactggagcctacaggagagtatatcccagctgtggttgaccacacagcaggcttgccttgccaggggacatttttgcttcatcagggcatccagcgaaggatcacagtgaccattatccatgagaaggggagcgagctccattggaaagatgttcgtgaactggtggtaggtcgtattcggaataagcctgaggtggatgaagctgcagttgatgccatcctctccctaaatattatttctgccaagtacctgaagtcttcccacaactctagcaggaccttctaccgctttgaggctgtgtgggatagctctctgcataactcccttcttctgaaccgagtgacaccctatggagaaaagatctacatgaccttgtcggcctacctagagctggatcattgcatccagccggctgtcatcaccaaggatgtgtgcatggtcttctactcccgagatgccaagatctcaccaccacgctctctgcgtagcctctttggcagcggctactcaaagtcaccagattcgaatcgagtcactggcatttacgaactcagcttatgcaaaatgtcagacacaggtagtccaggtatgcagagaaggagaagaaaaatcttagatacgtcagtggcatatgtgcggggagaagagaacttagcaggctggcggccccgtggagacagcctcatccttgagcaccagtgggagctggagaagctggagctcctacatgaggtggaaaaaacccgccactttttgctgctgcgtgagagacttggtgacagcatccccaaatccctgagcgactcgttatcccccagcctcagcagtgggaccctcagcacctccaccagtatctcctctcagatctcaaccactacctttgaaagcgccatcacacctagcgagagcagtggctatgattcaggagacatcgaaagcctggtggaccgagagaaagagctggctaccaagtgcctgcaacttctcacccacactttcaacagagaattcagccaggtgcacggcagcgtcagtgactgtaagttgtctgatatctctccaattggacgggatccctctgagtccagtttcagcagtgccaccctcactccctcctccacctgtccctctctggtagactctaggagcaactctctggatcagaagaccccagaagccaattcccgggcctctagtccctgcccagaatttgaacagtttcagattgtcccagctgtggaaacaccatatttggcccgagcaggaaaaaacgaatttctcaatcttgttccagatattgaagaaattagaccaagctcagtggtctctaagaaaggataccttcatttcaaggagcctctttacagtaactgggctaaacattttgttgtcgtccgtcggccttatgtcttcatctataacagtgacaaagaccctgtggagcgtggaatcattaacctgtccacagcacaggtggagtacagtgaggaccagcaggccatggtgaagacaccaaacacctttgctgtctgcacaaagcaccgtggggtccttttgcaggccctcaatgacaaagacatgaacgactggttgtatgccttcaacccacttctagctggcacaatacggtcaaagctttcccgcagatgcccgagccagtcgaaatactaagtgactctgccgagtgccctcactcgccttcgagagataaagaaagcgttacctctcatttctctttgtgattcttgacggtgactcttgtatgtaatcctgtggcttaactacttctccctccttgtccagcacttttctagctctcccgttccccatctccattgctctgtactcttttcttttttcttgtgctgagaatctcgttagtagcatgtggcctaacaaaaggaaaaaatgtttttaaacacacacacacacacacacacacacacacacatacacagacaaaaacacaaaaactctgaggggatctggtgaatctccaaattattgtgggtgtactttggcttccttttgtatgataggtccccatcatgaccacctctgatgtctgtgctgctgtcaccaggcacctttgtttttcaagacaacatactttttttttcttttctctgtttgtgatatcactttaatttttcttgggtggcttagagactaagggaggagacatctggcctttttagaacctgagaggaaaaaaagagtctttttttcccctctgtctctttttgccatggctaatccctgcatttccattcagggaaaaggtggtagtgagcatagaactgcaacagttatattctgagtcaaagttggggctttttacggcataattatggaatttttatttactggtagagaggagacgagaggctttttcagtgggcctgggacagtggctgctcttgactttgtgtgaagggaaatgccaaggatgcttctggtggacttcaggggaccccagggtttggccgtgggccgtgatggcagcaggcggtgggatgcttgtagctcctcacagcaggattcctgcccactgttttttctctgttgggagggaagctcttttctaggagtgtctcagttctgcttttggcattagtgatggtggtggtacagttggaattagtgccatgtcatacacaaatgttccacaaggcgggagtgtttcactttctggtgataaacttgatggtcattgttatgattaagataatgccgggcaggccgggcacagtggctcacgcctgtaatccaagcacttggggaggccgaggcgggcagatcacgagatcaggagttcaagaccagcctggccaatatgatgaaaccccgtctctactaaaaatacaaaattagtcgggtatggtggcacatgcctgtaattccagctgcttgggagcctgaggcaggagaactgcttgaacccaggaggcagaggttgcagtgagccaagatcgcgctattgcactccagcctgggtgacagagcaagactctgcctcagaaaaaaaaaaaaataataatgctgggtagtgaccttgtgattgttacagctccctttgatcaaagaaatatagctttcaggcataaacctggaagtctccctctgaatccagcagttgttttcattgatgcttgtcaggttgaagatgctttcagtgatgctctctatactcataaataagcaaatgtggcaggctttgctttctggatcccaggattaaaactaaccgtgaccactactccaaacaaaacacaatatgcctaggggcacggatgaacgtccagggagcccgggccccaggctttgttgcgtgttccctgctcctctccatctggtgtggaaacactgcccagggagaaaggaggaagctcactgtggacagtcttctttccttctgacagaccaggtcatctggcttccgagatcatcagagaagataagtctgtctctttcagctgccagtaagttttccaggatgagaggggaaaaagaaagcctccagtgacttcagttgctttgccagttgtcttgggattgttttacaccatcctttacttcccttgctcagacctctctgtttcaccattgctcaggcattcaggaaagtatctgctcactcccacttggtgagtcctcggccttgaggttgctgactctcaggcgttaggcagctggatgacttcccgcttcacgcagcaaaggccaggggcttgcgcgcctctgcagagttgttgctagggagacttgtgtcatcatccacaaccttgtttctcacttcctggttgggctcatctctgaagaacaggtctcccagcttcgctccttatcactgcattgtgaagaggaggaaaagtgaatcacggagagagaaaggaaaggatagaatcacaggctgcgtctgcacctgaaaagtgacccgcggaaactctatggcggattttttttttaactttcttcttcctgttaaaacataggtcactaactgtgatgttatttgttttctaagtggtatgtgagattttctaatgtagttagaagtttcattgtctgatggacacaatatgcccttccggttctattcaaaccagcaggatctgtcggtgcttagagatggctgcctggactggaatcaaatctaatttcagggaaatgaagatggaatttgaaggtcacttttaaaattaagtcattgatgctgctgttacagagtgtgacagaggatccatgtctgtgacacaggacggtgggaagcctgagagagagtgaaattatgtgatacactgaaatgacttttgtttttcttctaactcatacaaaactggtttggaaagtctttgctttggaagcgtcagacattagaacaggccaaactggactgtctgttcatagcgtgcctgaataagaaggcctcttagggagccagagggagcagagtggtcgtgtcctgcgtgctcttcaccctctggggcgcccctgctgcggctggcaggtgcagacagcctttgctggtccccagcacgtccagggtgggtgctcccttgcccgacagaaccatccccactgtgaggctgtgagagatttgtggcaggaactgtttatgaggctctagttgttgctgttgtggcgggaaagttaagaaacatagcccttaaggaaaccacctttatgtattttcttaaagcacgcctttaaataagcaaaaactttaaaaggcaggaaagagaattcttaggcaaattcagagaaataagtgctagttaatactaatcacctcctcctctgtctctcatcctcctttctcccatcaaagcaaaatatggcctcaccaccagccccaaatcagtgctcagaccctctctgtgtctgtgtgccctcctgggagtcagtcagcgctcaggccaggactgtgcagggccagccagcccatgcgctagtcaggagcacaggcaaggggtgcttgtggcagtggccgggcacctgagccccagctcgttgttaaacgtgctgacggcaaggggcaatggagtgagtttcccaactaagaaaccactattatatattttttcccttcagtcacatagacttcagacaactctcctattttttatggatttttcagctcatttcagatgaaggaactaagtcattgtgaactgtctcttgagatctaaaaacaagatgacttttcctggcacatattccaaagcaaagactttgttgcctgctgcttattgtctaatttacagggatatttaattttgtcaggtctatgtatatttatccagctatacttacttgcacagtggattggagagaaaggattctccagtgtgcacactcatcggtactctttctgcatttccctcgtgctgtgtcccgctcgggttccaatggacagtatcagggcttgtttgacttaggtctttcagttttcctttcggttcccttttaaaaatgtgattgttaacctgcctcttgaaagattcaaccgggtgtggtggctcacgcctgtaatcccagcacattgggaggccaaggcaggtggatcacctgaggtcagaagtttgagaccagcctggccaacatggtgaaaccccgtctctactaaaaatacaaaaagtagccaggcgtggtggcgtgtgcctgtagtcccagctacttgggaggctgaggcaggagaatagcttgaacctgggaggtggaggctgcagtgagttgagactgcaccattgcactccagcctgggtgacaaagcaggactccgtctcaaaaaaaaagaaaagattcatgatgctgctgctcccagaaggtttgctggatgtgtttacataggactctaacttgtgtgcactacagttgttcaccagggccagtgattcaccccagtgtgtggccagaccatgactgtgtagcaggaatgttttaatttgtgcttccttagtaaattgaaatatcagctgagagattatttgctgctgttattcaaaaggccatttatgaagttagtatttgagccccataagatctttaaaaagcctccaatcatttaaaggaagaaatcagagttgctataaaattcagtaaaaagctcatagccaaacggctgtgctcagatggaaagtctgagctgaggttggtctcttgccaaaccgtggctgttgtgtgttgttcttcatgtcttcgagttcattttttttcattctgcctattctggcatcagctcacttgaggagtccctcagccttcttgtatttaaggcatcgtcttagactttgtggctctaaagtacctgtctgttgagatttcaagtctcttgtcaccatcctcacacatgacaacaaaacccataatgcataagtggcctttttgaaccaagactttgcaaactgatctctcccccgtgaaggagttgagcacattagcaacaatgtacattaattttggattttcattttcatgttttattttgtaaatattatctgatgtttggagcttgagtatacagactgtaaatatagttcttgtatttgtactaattctgattcttttgctgtatagccttagatgtgcaatgcagacactatctaactgtgtgtggtaaccttgcgtcacggagctgttagtgaacgaggtaaaaataataaaggtacagccagtgcatcagaaaaaa

SEQ ID NO: 1318 - DNA, 3676 bp, Homo sapiens
gagagacgagggcagcggaggaggcgaggagcgccgggtaccgggccgggggagccgcgggctctcggggaagagacggatgatgaacaagctttacatcgggaacctgagccccgccgtcaccgccgacgacctccggcagctctttggggacaggaagctgcccctggcgggacaggtcctgctgaagtccggctacgccttcgtggactaccccgaccagaactgggccatccgcgccatcgagaccctctcgggtaaagtggaattgcatgggaaaatcatggaagttgattactcagtctctaaaaagctaaggagcaggaaaattcagattcgaaacatccctcctcacctgcagtgggaggtgttggatggacttttggctcaatatgggacagtggagaatgtggaacaagtcaacacagacacagaaaccgccgttgtcaacgtcacatatgcaacaagagaagaagcaaaaatagccatggagaagctaagcgggcatcagtttgagaactactccttcaagatttcctacatcccggatgaagaggtgagctccccttcgccccctcagcgagcccagcgtggggaccactcttcccgggagcaaggccacgcccctgggggcacttctcaggccagacagattgatttcccgctgcggatcctggtccccacccagtttgttggtgccatcatcggaaaggagggcttgaccataaagaacatcactaagcagacccagtcccgggtagatatccatagaaaagagaactctggagctgcagagaagcctgtcaccatccatgccaccccagaggggacttctgaagcatgccgcatgattcttgaaatcatgcagaaagaggcagatgagaccaaactagccgaagagattcctctgaaaatcttggcacacaatggcttggttggaagactgattggaaaagaaggcagaaatttgaagaaaattgaacatgaaacagggaccaagataacaatctcatctttgcaggatttgagcatatacaacccggaaagaaccatcactgtgaagggcacagttgaggcctgtgccagtgctgagatagagattatgaagaagctgcgtgaggcctttgaaaatgatatgctggctgttaaccaacaagccaatctgatcccagggttgaacctcagcgcacttggcatcttttcaacaggactgtccgtgctatctccaccagcagggccccgcggagctccccccgctgccccctaccaccccttcactacccactccggatacttctccagcctgtacccccatcaccagtttggcccgttcccgcatcatcactcttatccagagcaggagattgtgaatctcttcatcccaacccaggctgtgggcgccatcatcgggaagaagggggcacacatcaaacagctggcgagattcgccggagcctctatcaagattgcccctgcggaaggcccagacgtcagcgaaaggatggtcatcatcaccgggccaccggaagcccagttcaaggcccagggacggatctttgggaaactgaaagaggaaaacttctttaaccccaaagaagaagtgaagctggaagcgcatatcagagtgccctcttccacagctggccgggtgattggcaaaggtggcaagaccgtgaacgaactgcagaacttaaccagtgcagaagtcatcgtgcctcgtgaccaaacgccagatgaaaatgaggaagtgatcgtcagaattatcgggcacttctttgctagccagactgcacagcgcaagatcagggaaattgtacaacaggtgaagcagcaggagcagaaataccctcagggagtcgcctcacagcgcagcaagtgaggctcccacaggcaccagcaaaacaacggatgaatgtagcccttccaacacctgacagaatgagaccaaacgcagccagccagatcgggagcaaaccaaagaccatctgaggaatgagaagtctgcggaggcggccagggactctgccgaggccctgagaaccccaggggccgaggaggggcggggaaggtcagccaggtttgccagaaccaccgagccccgcctcccgccccccagggcttctgcaggcttcagccatccacttcaccatccactcggatctctcctgaactcccacgacgctatcccttttagttgaactaacataggtgaacgtgttcaaagccaagcaaaatgcacaccctttttctgtggcaaatcgtctctgtacatgtgtgtacatattagaaagggaagatgttaagatatgtggcctgtgggttacacagggtgcctgcagcggtaatatattttagaaataatatatcaaataactcaactaactccaatttttaatcaattattaatttttttttctttttaaagagaaagcaggcttttctagactttaaagaataaagtctttgggaggtctcacggtgtagagaggagctttgaggccacccgcacaaaattcacccagagggaaatctcgtcggaaggacactcacggcagttctggatcacctgtgtatgtcaacagaagggataccgtctccttgaagaggaaactctgtcactcctcatgcctgtctagctcatacacccatttctctttgcttcacaggttttaaactggttttttgcatactgctatataattctctgtctctctctgtttatctctcccctccctcccctccccttcttctccatctccattcttttgaatttcctcatccctccatctcaatcccgtatctacgcacccccccccccccaggcaaagcagtgctctgagtatcacatcacacaaaaggaacaaaagcgaaacacacaaaccagcctcaacttacacttggttactcaaaagaacaagagtcaatggtacttgtcctagcgttttggaagaggaaaacaggaacccaccaaaccaaccaatcaaccaaacaaagaaaaaattccacaatgaaagaatgtattttgtctttttgcattttggtgtataagccatcaatattcagcaaaatgattcctttctttaaaaaaaaaaaatgtggaggaaagtagaaatttaccaaggttgttggcccagggcgttaaattcacagatttttttaacgagaaaaacacacagaagaagctacctcaggtgtttttacctcagcaccttgctcttgtgtttcccttagagattttgtaaagctgatagttggagcatttttttatttttttaataaaaatgagttggaaaaaaaataagatatcaactgccagcctggagaaggtgacagtccaagtgtgcaacagctgttctgaattgtcttccgctagccaagaacctatatggccttcttttggacaaaccttgaaaatgtttatttaaaaaaaaaaaagatgacaaagaaaaacagagagagagaatattggagatgtcctgaattttaatagggtacgcgccattagggctttttgcgctaaaggatgaacatgtactggtttatgtggacaagccattataccaccagactgcaatgccagtttcctctactgcaaacagtgttctgtgacaaaaaaaaaaaaaaaaaaaagaaaaaaaaagaaaaaacagaaatatatccagctaacaagaaaaaa

SEQ ID NO: 1319 - DNA, 2388 bp, Homo sapiens
gggagaagccgagggcagcttagccacggccggttcccgttccctccaggacgcgagggtcgccttgggtggggaaccgcgaccgggcgaggacctatcccggtgtggggcttcccgatttcgaaagaatctcgctgcacccccgcccagagttcagaccaagcgaaaagttatttgagaggcctcgggggcgcggggtgaggagtcgtggcggaggccttggtcggggcgccgtggatatccccgagtcaccgcgtccctctcctgcagctcccgcgtcgctgggaggagcgagggagcgagcgggaaggggtctagctggcctttgctcggccctccccagcgcccggctttgaacccgccctgcactgctgtctgggcgggtccggggactcagcactcgacccaaaggtgcaggcgcgcgagcacaacccatggctgcgctgggctgcgcgaggctgaggtgggcgctgcgaggggccggccgtggcctctgcccccacggggccagagccaaggccgcgatccctgccgccctcccctcggacaaggccaccggagctcccggagccgggcctggtgtccggcggcggcaacggagcttagaggagattccacgtctaggacagctgcgcttcttctttcagctgttcgttcaaggctatgccctgcaactgcaccagttacaggtgctttacaaggccaagtacggtccaatgtggatgtcctacttagggcctcagatgcacgtgaacctggccagtgccccgctcttggagcaagtgatgcggcaagagggcaagtacccagtacggaacgacatggagctatggaaggagcaccgggaccagcacgacctgacctatgggccgttcaccacggaaggacaccactggtaccagctgcgccaggctctgaaccagcggttgctgaagccagcggaagcagcgctctatacggatgctttcaatgaggtgattgatgactttatgactcgactggaccagctgcgggcagagagtgcttcggggaaccaggtgtcggacatggctcaactcttctactactttgccttggaagctatttgctacatcctgttcgagaaacgcattggctgcctgcagcgatccatccccgaggacaccgtgaccttcgtcagatccatcgggttaatgttccagaactcactctatgccaccttcctccccaagtggactcgccccgtgctgcctttctggaagcgatacctggatggttggaatgccatcttttcctttgggaagaagctgattgatgagaagctcgaagatatggaggcccaactgcaggcagcagggccagatggcatccaggtgtctggctacctgcacttcttactggccagtggacagctcagtcctcgggaggccatgggcagcctgcctgagctgctcatggctggagtggacacgacatccaacacgctgacatgggccctgtaccacctctcaaaggaccctgagatccaggaggccttgcacgaggaagtggtgggtgtggtgccagccgggcaagtgccccagcacaaggactttgcccacatgccgttgctcaaagctgtgcttaaggagactctgcgtctctaccctgtggtccccacaaactcccggatcatagaaaaggaaattgaagttgatggcttcctcttccccaagaacacccagtttgtgttctgccactatgtggtgtcccgggaccccactgccttctctgagcctgaaagcttccagccccaccgctggctgagaaacagccagcctgctacccccaggatccagcacccatttggctctgtgccctttggctatggggtccgggcctgcctgggccgcaggattgcagagctggagatgcagctactcctcgcaaggctgatccagaagtacaaggtggtcctggccccggagacgggggagttgaagagtgtggcccgcattgtcctggttcccaataagaaagtgggcctgcagttcctgcagagacagtgctgagctgagtctccgccttgctggggcttgtcctagaggctccagctctggcacagtggttcctggctgctgccatgtctcagatgaggagggagagaaggaggccgccagactcgagaggtgggaggaactccttgcacacaccctgagcttttgccacttctatcatttttgagcaactccctctcagctaaaaggccacccctttatcgcattgctgtccttgggtagaatataaaataaagggacttttatttcttattggaaaaaaaaaaaaaaaaaaaaaaaaaaaaaaaaaaaaaaaaaaaaaaaaaaaaaaaaaaaaaaaaaaaaaaaaaaaaaaaaaaaaaaaaaaaaaaaa

SEQ ID NO: 1320 - DNA, 2342 bp, Homo sapiens
gggcaatttccgttaggtgctgaaggctgtggcgcgcggctgtccccattcccacgtgaagcgctacgctagcatcgctcggctggcggctcccagctcgccgcggagcagtcccggcagcagcgggggaccggaagtggctcgcggaggctcagaagctagtcccggagcccggcgtgtggcgcctcggagcacggtgacggcgccatgtccctaatctgctccatctctaacgaagtgccggagcacccatgtgtatcccctgtctctaatcatgtttatgagcggcggctcatcgagaagtacattgcggagaatggtaccgaccccatcaacaaccagcctctctccgaggagcagctcatcgacatcaaagttgctcacccaatccggcccaagcctccctcagccaccagcatcccggccattctgaaagctttgcaggatgagtgggatgcagtcatgctgcacagcttcactctgcgccagcagctgcagacaacccgccaagagctgtcacacgctctgtaccagcacgatgccgcctgccgtgtcattgcccgtctcaccaaggaagtcactgctgcccgagaagctctggctaccctgaaaccacaggctggcctcattgtgccccaggctgtgccaagttcccaaccaagtgttgtgggtgcgggtgagccaatggatttgggtgagctggtgggaatgaccccagagattattcagaagcttcaagacaaagccactgtgctaaccacggagcgcaagaagagagggaagactgtgcctgaggagctggtgaagccagaagagctcagcaaataccggcaggtggcatcccacgtggggttgcacagtgccagcattcctgggatcctggccctggacctctgcccgtccgacaccaacaagatcctcactggtggggcggataaaaatgtcgttgtgtttgacaaaagttctgaacaaatcctggctaccctcaaaggccataccaagaaggtcaccagcgtggtgtttcacccttcccaggacctggtgttttctgcttcccccgatgccactatcaggatttggtcggtccccaatgcctcttgtgtacaggtggttcgggcccatgagagtgctgtgacaggcctcagccttcatgccactggcgactatctcctgagctcctccgatgatcagtactgggctttctctgacatccagacagggcgtgtgctcaccaaggtgacagatgagacctccggctgctctctcacctgtgcacagttccaccctgacggactcatctttggaacaggaaccatggactctcagatcaagatctgggacttgaaggaacgtactaatgtggccaacttccctggccactcgggccccatcactagcatcgccttctctgagaatggttactacctggctacagcggctgatgactcctctgtcaagctctgggatctgcgcaagcttaagaactttaagactttgcagctggataacaactttgaggtaaagtcactgatctttgaccagagtggtacctacctggctcttgggggcacggatgtccagatctacatctgcaaacaatggacggagattcttcactttacagagcatagcggcctgaccacaggggtggccttcgggcatcacgccaagttcatcgcttcaacaggcatggacagaagcctcaagttctacagcctgtaggccctggcccttctgatggaagctgggcctcatctcagtagaggggtagaattagggtttgggggggggggtggggggaatctatggggggagggggctctgtggggtgggacattcacatcatttcactctggtctgagtggtggcctgagaaccatggtggcatggaccaccctcatccatgcaactccaggccccatgggaacggatgtggaaggaagaactgtcaccctcttaaggcccagggtcggagcccagggcctctcccttcctgtcgttcaatggacgtggtggtggctgttccacacccattttgttgcagttcctgtgagacaggagaggctgagccaagggaactgtgaaggggatgggcaggagggcttgtgcagggttttgtaagcagtgatctagtttcattaaaaaaagaaaacaataaccataaccacctccccgtgtctgtctgcaccaggagcacctgggactgggaaggtcaaggggagggagcacacactgggacactggcttccgggaagcccatcttcctttcctttcacagctcttaccctttttttttttttttaattgcacagcagaaataaaaacaaatctgcagatgaaaa

SEQ ID NO: 1321 - DNA, 3366 bp, Homo sapiens
gcatgcgtaggcgcgcggccgcggcggcggctggggagggttcttccggaaggttcgggaggcttctggaaaaagcgccgcgcgctgggcgggcccgtcgctatataaggcaggcgcgggggtggcgcgtcagttgcttcagcgtcccggtgtggctgtgccgttggtcctgtgcggtcacttagccaagatgcctgaggaaacccagacccaagaccaaccgatggaggaggaggaggttgagacgttcgcctttcaggcagaaattgcccagttgatgtcattgatcatcaatactttctactcgaacaaagagatctttctgagagagctcatttcaaattcatcagatgcattggacaaaatccggtatgaaagcttgacagatcccagtaaattagactctgggaaagagctgcatattaaccttataccgaacaaacaagatcgaactctcactattgtggatactggaattggaatgaccaaggctgacttgatcaataaccttggtactatcgccaagtctgggaccaaagcgttcatggaagctttgcaggctggtgcagatatctctatgattggccagttcggtgttggtttttattctgcttatttggttgctgagaaagtaactgtgatcaccaaacataacgatgatgagcagtacgcttgggagtcctcagcagggggatcattcacagtgaggacagacacaggtgaacctatgggtcgtggaacaaaagttatcctacacctgaaagaagaccaaactgagtacttggaggaacgaagaataaaggagattgtgaagaaacattctcagtttattggatatcccattactctttttgtggagaaggaacgtgataaagaagtaagcgatgatgaggctgaagaaaaggaagacaaagaagaagaaaaagaaaaagaagagaaagagtcggaagacaaacctgaaattgaagatgttggttctgatgaggaagaagaaaagaaggatggtgacaagaagaagaagaagaagattaaggaaaagtacatcgatcaagaagagctcaacaaaacaaagcccatctggaccagaaatcccgacgatattactaatgaggagtacggagaattctataagagcttgaccaatgactgggaagatcacttggcagtgaagcatttttcagttgaaggacagttggaattcagagcccttctatttgtcccacgacgtgctccttttgatctgtttgaaaacagaaagaaaaagaacaacatcaaattgtatgtacgcagagttttcatcatggataactgtgaggagctaatccctgaatatctgaacttcattagaggggtggtagactcggaggatctccctctaaacatatcccgtgagatgttgcaacaaagcaaaattttgaaagttatcaggaagaatttggtcaaaaaatgcttagaactctttactgaactggcggaagataaagagaactacaagaaattctatgagcagttctctaaaaacataaagcttggaatacacgaagactctcaaaatcggaagaagctttcagagctgttaaggtactacacatctgcctctggtgatgagatggtttctctcaaggactactgcaccagaatgaaggagaaccagaaacatatctattatatcacaggtgagaccaaggaccaggtagctaactcagcctttgtggaacgtcttcggaaacatggcttagaagtgatctatatgattgagcccattgatgagtactgtgtccaacagctgaaggaatttgaggggaagactttagtgtcagtcaccaaagaaggcctggaacttccagaggatgaagaagagaaaaagaagcaggaagagaaaaaaacaaagtttgagaacctctgcaaaatcatgaaagacatattggagaaaaaagttgaaaaggtggttgtgtcaaaccgattggtgacatctccatgctgtattgtcacaagcacatatggctggacagcaaacatggagagaatcatgaaagctcaagccctaagagacaactcaacaatgggttacatggcagcaaagaaacacctggagataaaccctgaccattccattattgagaccttaaggcaaaaggcagaggctgataagaacgacaagtctgtgaaggatctggtcatcttgctttatgaaactgcgctcctgtcttctggcttcagtctggaagatccccagacacatgctaacaggatctacaggatgatcaaacttggtctgggtattgatgaagatgaccctactgctgatgataccagtgctgctgtaactgaagaaatgccaccccttgaaggagatgacgacacatcacgcatggaagaagtagactaatctctggctgagggatgacttacctgttcagtactctacaattcctctgataatatattttcaaggatgtttttctttatttttgttaatattaaaaagtctgtatggcatgacaactactttaaggggaagataagatttctgtctactaagtgatgctgtgataccttaggcactaaagcagagctagtaatgctttttgagtttcatgttggtttattttcacagattggggtaacgtgcactgtaagacgtatgtaacatgatgttaactttgtggtctaaagtgtttagctgtcaagccggatgcctaagtagaccaaatcttgttattgaagtgttctgagctgtatcttgatgtttagaaaagtattcgttacatcttgtaggatctactttttgaacttttcattccctgtagttgacaattctgcatgtactagtcctctagaaataggttaaactgaagcaacttgatggaaggatctctccacagggcttgttttccaaagaaaagtattgtttggaggagcaaagttaaaagcctacctaagcatatcgtaaagctgttcaaaaataactcagacccagtcttgtggatggaaatgtagtgctcgagtcacattctgcttaaagttgtaacaaatacagatgagttaaaagatattgtgtgacagtgtcttatttagggggaaaggggagtatctggatgacagttagtgccaaaatgtaaaacatgaggcgctagcaggagatggttaaacactagctgctccaagggttgacatggtcttcccagcatgtactcagcaggtgtggggtggagcacacgtaggcacagaaaacaggaatgcagacaacatgcatcccctgcgtccatgagttacatgtgttctcttagtgtccacgttgttttgatgttattcatggaataccttctgtgttaaatacagtcacttaattccttggccttaaaa

SEQ ID NO: 1322 - DNA, 1217 bp, Homo sapiens
agggggcggggaggggcgcagggctgcgcgctcgccggcgctctctttcggtttggtcggcggctggaggagagtggacccccccactttaaggctctgtcctcggcgcgttcccgccgccccccggtcccgacgcggggctcggggatgcccgccagcatgttcagcatcgacaacatcctagccgcccggccgcgctgcaaggactcggtgttgccggtggcgcacagcgcggcggctcccgtcgtcttcccggccctgcacggggactcgctctacggcgccagcggcggcgcctcctcggactatggcgccttctacccgcgccccgtggcccccggcggcgcgggcctcccggccgcggtcagcggctcccgcctcggctacaacaactacttctacgggcagctgcacgtgcaggcggcgcccgtgggcccggcctgctgcggggccgtgccgccgctgggcgcccagcagtgctcctgcgtcccgacgcccccaggctacgagggccccggttcggtgctggtgtccccggtaccgcaccagatgctgccctacatgaacgtgggcacgctgtcgcgcaccgagctgcagcttctcaaccagctgcactgtcggcggaagcggcggcaccgcaccatcttcactgacgagcagctcgaagctctcgagaacctcttccaggagaccaagtacccggacgtgggcacgcgcgagcagctggcccggaaagtgcacctccgcgaggagaaagtggaggtctggtttaagaaccgccgcgccaaatggaggcggcagaagcggtcctcatcagaggagtcggagaacgcggagaagtggaacaagacgtcgtcgtcgaaggcgtcaccggagaagagggaagaggaaggtaaaagcgatttggactcggacagctgacggccgcgggacacttgcccgtattacttacctaactcgaaggacttgcacagacagacgatgctactttcttgcacacgcgctgccttgcgggagggggtcgagaaagaggaacgaggagctgtaaatagtgtacagagccgggagggtcggcgtctggggtcagggcgcgcacagcccagcagcccgaggccgcccgcgactagcccccaccgtagtatttatagttaaattaagggtgacagtacaataaagtgatggcgatgtaaaaaaaaaaaaaaaaaaaaaaaaaaaaa

SEQ ID NO: 1323 - DNA, 1783 bp, Homo sapiens
atccagtacgtggcacacattgctcagaaaagccccttgtgcccgctttctgccatccgcgctgtctcgtgtctccctttttccattaaatgcctcttttcttgcgggtctcatctcgggaatagtgcactacggggacatacctatccccaactatcctaggcccgagaaccagcccttgccttcgcgtaacaggcggagactcgctgaggcgagttgcacttctaattgggcgtgaggtcttgtcaatccccaagttcttccaatcagaagtccggtccatccagccttccgctccccattggcctgtgtggaggaagaggggtgggtaagccgaagtcgctgcgctcagtgcgcaggcgcgaagaagctggcaggggcacgagccgggggcgggtttgaagacgcgtcgttgggttttggaggccgtgaaacagccgtttgagtttggctgcgggtggagaacgtttgtcaggggcccggccaagaaggaggcccgcctgttacgatggtgtccatgagtttcaagcggaaccgcagtgaccggttctacagcacccggtgctgcggctgttgccatgtccgcaccgggacgatcatcctggggacctggtacatggtagtaaacctattgatggcaattttgctgactgtggaagtgactcatccaaactccatgccagctgtcaacattcagtatgaagtcatcggtaattactattcgtctgagagaatggctgataatgcctgtgttctttttgccgtctctgttcttatgtttataatcagttcaatgctggtttatggagcaatttcttatcaagtgggttggctgattccattcttctgttaccgactttttgacttcgtcctcagttgcctggttgctattagttctctcacctatttgccaagaatcaaagaatatctggatcaactacctgattttccctacaaagatgacctcctggccttggactccagctgcctcctgttcattgttcttgtgttctttgccttattcatcatttttaaggcttatctaattaactgtgtttggaactgctataaatacatcaacaaccgaaacgtgccggagattgctgtgtaccctgcctttgaagcacctcctcagtacgttttgccaacctatgaaatggccgtgaaaatgcctgaaaaagaaccaccacctccttacttacctgcctgaagaaattctgcctttgacaataaatcctataccagctttttgtttgtttatgttacagaatgctgcaattcagggctcttcaaacttgtttgatataaaatatgttgtcttttgtttaagcatttattttcaaacactaaggagctttttgacatctgttaaacgtctttttgtttttttgttaagtcttttacattttaatagtttttgaagacaatctaggttaagcaagagcaaagtgccattgtttgcctttaattggggggtgggaagggaaagagggtacttgccacatagtttcctttttaactgcactttctttatataatcgtttgcattttgttacttgctaccctgagtactttcaggaagactgacttaaatattcggggtgagtaagtagttgggtataagatctgaacttttcatctgcagaggcaagaaaaatatttgacattgtgacttgactgtggaagatgatggttgcatgtttctagtttgtatatgtttccatctttgtgataagatgatttaataaatctctttaaatacttaaaaaaaaaaaaaaaaaaa

SEQ ID NO: 1324 - DNA, 2863 bp, Homo sapiens
gtcgtcgaccctgtggccccgcccatccttcgcctcctcagtcggccgctcaggctgcggctcctcccggggccggttcccgctgtctcagccgcggcgcagagggcacatcggcctgaccgactagccggctgccagtgccgggagccgccgcgtccatccccgcccgcctggccggggacccaggactgagtcgtccagctgcgcccctcgcccatagccccagcgggcgccgggcgggcgagcagctcttcggcccttcccggacagcgacgcagtcgcagcgcgcgccctaacacagatgtgggaagataaatgaaggggtctagatgtaaatgtcagtggaaaggagagctaccatcactaagggctgaaaacacagttaaatcactttcaaagttaaaagactattaagaacacaagatggggactcctgcttctggaaggaaaagaacacctgtgaaagaccgattttctgcagaagatgaagctttgagtaacattgccagagaggcagaggcaaggctggcagcaaaacgggctgcccgggcagaagcaagagatatacgcatgagagaactggaacgacaacaaaaagagttggatgaaaaatctgacaaacagtatgctgaaaattatacaagaccttcatctcgaaattctgcctcagcaacaacccctctaagtggaaactcatccagacgaggaagtggggacaccagcagcttaatagatccagacacttcattaagtgaattgcgggaatctttgtctgaagtggaagaaaaatacaagaaagccatggtttccaatgcacagttagacaatgagaagaacaatttgatctaccaagtagacacactcaaggatgttattgaagagcaggaggaacagatggcagaattttatagagaaaatgaagaaaaatcaaaggagttagaaaggcagaaacatatgtgtagtgtgctgcagcataagatggaagaacttaaagaaggcctgcggcaaagagatgagcttattgagaaacatggcttagttataatccccgatggcactcccaatggtgatgtcagtcatgaaccagtggctggagccatcactgttgtgtctcaggaagctgctcaggtcttggagtcagcaggagaagggccattagatgtaaggctacgaaaacttgctggagagaaggaagaactactgtcacagattagaaaactgaagcttcagttagaggaggaacgacagaaatgctccaggaatgatggcacagtgggtgacctggcaggactgcagaatggctcagacttgcagttcatcgaaatgcagagagatgccaatagacaaattagcgaatacaaatttaagctttcaaaagcagaacaggatataactaccttggagcaaagtattagccggcttgagggacaggttctgagatataaaactgctgctgagaatgctgagaaagttgaagatgaattgaaagcagaaaaacggaagctacaacgagagttacgaacagcactggacaagattgaggagatggagatgaccaacagccacctggccaagcggctggagaagatgaaggccaataggacagcacttctggcccagcagtaggaaaaccacccttcaacctgggtgatgctccttggggccctacctagagggactgacttttgtccattgacacaaaccccttttagtactgttttgagttttgtcattaaaacagccacctttgtattttataatttatgacagaatgaagtcattttgaatctacatgaatgaacactttggattttgttgtagtttgattctagggtagaaccagtccatgctgtttttattttttatctccgtaattgtagaatcatgtttactcaacgtttttccccagctgcctcagtaactgggcactcggaggccttggcacgggttctggaggacagacagcaattctatgagtgctcactgagatacttgctggagacctcagaaaacacaagtgccttctccacggtgcaattcagacttcagtgatctccagtggtcaaaagacatttacccttaatatcagacaacatttatattttagtgaagaaacaagttctcgggtggggaatctatgtttcactcagatttatatgtttggaggaaaaaagcctttttttgtaaaatatttaaatttatataagaaaatgttagaaaaaaatatggggagtgtatataaaacttgctttattgcatggggcaggggaagtccaggcctaatactcctaaagtaagagttgggtcctttttttcttcaatacaactgtgctgtaccttgtaaagtattttatctgctgcttatttgtggaatgaaacctcaaacaaacccaaagggggagggtagggcagggcaggcagattggaaatctgcctgcagattctattaaatacacccttttgccaaccacaattggctactgacatgttcattttgttataggagactttaaaacaaatcatggcaaccacatccctcttcttttgtctccttctcaaggaaaaacaatctggaatgtagaacttttaaagacttgagtttcacctttagaggtaccctgtccaagaggtttttttaaaatcatggagtgcaactactttgcagaatttatgattctcttttgctcttagtacccaggtggttttatagaaatgattattgtatctttaaagtgcttacacagaaaatatattgggggaaaatctagtgactaaaggcacataagataataaaactagactttaaaaaggtaactcaaaagtgaataaaatctctaatatttgttcctttaaaaaaaaaaaa

SEQ ID NO: 1325 - DNA, 3046 bp, Homo sapiens
agcatcctcctgggcgccgctttcgcgcggcggcggcggctgcggcggggtctttctttgcttaaatacctcgttggccagaagcgctggtaccgggggcgggttgggtcgggtcgggcagtgctgcacacctgggtttccttgcctagagctgtgtgttcggggtcctttggtccagtcggaggctgcggagcggcgggggttgcctgcgctgtccgcccgggcatcctcccggtgatggaagcagccgccgccgccgctgcggggtcgcgctgtgccccatccaccgctgccagagaggtgggaaaattcgccgcacggaggccgaaagcgagaggggctgcgccgctatgccgggagctgagtcccatataagccgcccccagccatcgcccccagccggcttcgttcccctgagcgagacaggaagctgcggtcccgagaaagcggaggagacgtcgctggagccgggaggcgccgggttcggcggagcgcggagcggggctctgggccgcgtgaaagtttttcttcccgagccgcagggcgcccgctgcccggaaactgcccagggataagtcggccgactccccagacccctcgaaggtgcggggacccccagcggaagcgagagggagcgaaatcgaggaacgagtgacagccggacagtccgccgggcggtgatccggggccgctcccgggcgcgccctcggctccaggtcctacccggagccgctgccatgggagagccagccttgggcgctggggaccagccgccgcgcccgcctcggagtcgcggcccgagtcccggcgccagcagccagcccgctgcgtccccttcccgggctgcagggctgcctccgccgcgccgccggcccggattgtgcctgtgatgagccgcagcccgcagcgagctctgcccccgggcgcgctccctcggctgctccaggctgcgcctgcagccgcgccgcgtgccctgctcccgcagtggccccggcgcccaggacgccgctggcccgcgtcccctctcggaatgaaggtgttccgtaggaaggcgctggtgttgtgcgcgggctatgcactgctgctggtgctcactatgctcaacctcctggactacaagtggcacaaggagccgctgcagcagtgcaaccccgatgggccgctgggtgccgcagcgggggcagccggaggcagctgggggcgcccagggccgcctccggccgggccgccccgtgctcatgcccgtttggacctccgcactccttaccgccctcccgctgccgccgtcggggcggctcctgcagccgcggcagggatggcgggggttgcggcccctccaggcaatggcactcggggcaccgggggcgtcggggacaagcggcagctggtgtacgtgttcaccacgtggcgctctggctcgtcgttcttcggcgagctattcaaccagaatcccgaggtgttctttctctacgagccagtgtggcatgtatggcaaaaactgtatccgggggacgccgtttccctgcagggggcagcgcgggacatgctgagcgctctttaccgctgcgacctctctgtcttccagttgtatagccccgcgggcagcggggggcgcaacctcaccacgctgggcatcttcggcgcagccaccaacaaggtggtgtgctcgtcaccactctgccccgcctaccgcaaggaggtcgtggggttggtggacgaccgcgtgtgcaagaagtgcccgccacagcgcctggcgcgtttcgaggaggagtgccgcaagtaccgcacactagtcataaagggtgtgcgcgtcttcgacgtggcggtcttggcgccactgctgcgagacccggccctggacctcaaggtcatccacttggtgcgtgatccccgcgcggtggcgagttcacggatccgctcgcgccacggcctcatccgtgagagcctacaggtggtgcgcagccgagacccgcgagctcaccgcatgcccttcttggaggccgcgggccacaagcttggcgccaagaaggagggcgtgggcggccccgcagactaccacgctctgggcgctatggaggtcatctgcaatagtatggctaagacgctgcagacagccctgcagccccctgactggctgcagggccactacctggtggtgcggtacgaggacctggtgggagaccccgtcaagacactacggagagtgtacgattttgtgggactgttggtgagccccgaaatggagcagtttgccctgaacatgaccagtggctcgggctcctcctccaagcctttcgtggtatctgcacgcaatgccacgcaggccgccaatgcctggcggaccgccctcaccttccagcagatcaaacaggtggaggagttttgctaccagcccatggccgtcctgggctatgagcgggtcaacagccctgaggaggtcaaagacctcagcaagaccctgcttcggaagccccgtctctaaaaggggttcccaggagacctgattccctgtggtgatacctataaagaggatcgtagtgtgtttaaataaacacagtccagactcaaacggaggaagcccacatattctattatagatatataaataatcacacacacacttgctgtcaatgttttgagtcagtgcatttcaaggaacagccacaaaatacacacccctaagaaaaggcaagacttgaacgttctgaccaggtgcccctcttcttctttgccttctcttgtcctctttctcctatttcttaccctgtcctccacctgccttccattttgaagtgggatgttaatgaaatcaagttccagtaacccaaatcttgtttacaaaatattcgtggtatctgtgaacatgttaagagtaatttggatgtgggggtgggggtggagaaaggggaagtggtccagaaacaaaaagccccattgggcatgataagccgaggaggcattcttctaaagcagacttttgtgtaaaaagcaaaggttacatgtgagtattaataaagaagataataaataatattctttttaaaaa

SEQ ID NO: 1326 - DNA, 4311 bp, Homo sapiens
gtgctcgggggttccctggccctttcggcaggggtaaaacaataagagggggcggtggcaaagggggcgggacgtccgtggtccttgtcgcacgtcgcagcgcctggcgcccgggaagaggtggttgtgaggcagacgaactcgcggctctccggcttccgaggcttccgagttgtcggaggaagggggcggcgagcaataagaacccgccgcacccggtcctcagcgactcttctgacctccgcgcgacgtacccgccgccgccgttggctggagcatttgacattgtgcagcaaagaaatggttatggagaagcccagtccgctgcttgtagggcgggagtttgtgaggcaatattatactttgctgaataaagctccggaatatttacacaggttttatggcaggaattcttcctatgttcatggtggagtagatgctagtggaaagccccaggaagctgtttatggccaaaatgatatacaccacaaagtattatctctgaacttcagtgaatgtcatactaaaattcgtcatgtggatgctcatgcaaccttgagtgatggagtagttgtccaggtcatgggtttgctgtctaacagtggacaaccagaaagaaagtttatgcaaacctttgttctggctcctgaaggatctgttccaaataaattttatgttcacaatgatatgtttcgttatgaagatgaagtgtttggtgattctgagcctgaacttgatgaagaatcagaagatgaagtagaagaggaacaagaagaaagacaaccatctcctgaacctgtgcaagaaaatgctaacagtggttactatgaagctcaccctgtgactaatggcatagaggagcctttggaagaatcctctcatgaacctgaacctgagccagaatctgaaacaaagactgaagagctgaaaccacaagtggaggagaagaacttagaagaactagaggagaaatctactactcctcctccggcagaacctgtttctctgccacaagaaccaccaaagccaagagtcgaagctaaaccagaagttcaatctcagccacctcgtgtgcgtgaacaacgacctagagaacgacctggttttcctcctagaggaccaagaccaggcagaggagatatggaacagaatgactctgacaaccgtagaataattcgctatccagatagtcatcaactttttgttggtaacttgccacatgatattgatgaaaatgagctaaaggaattcttcatgagttttggaaacgttgtggaacttcgcatcaataccaagggtgttgggggaaagcttccaaattttggttttgtggtttttgatgactctgaaccagttcagagaatcttaattgcaaaaccgattatgtttcgaggggaagtacgtttaaatgtggaagagaaaaaaacaagagctgcaagagagcgagaaaccagaggtggtggtgatgatcgcagggatattaggcgcaatgatcgaggtcccggtggtccacgtggaattgtgggtggtggaatgatgcgtgatcgtgatggaagaggacctcctccaaggggtggcatggcacagaaacttggctctggaagaggaaccgggcaaatggagggccgcttcacaggacagcgtcgctgaagctccactgttggcaaagtcttggcagtggtacattattcatcgtgtttgcattcttgttaattttttttttggctttggaatgtgacacagcctttttgatcatttctttgatgtgaaaagcatctttggttatcagttaaattgaggtggacattatttccccaatttcacaacaggattcacattgttaatttataaatctagacttggagaattaaggactgagaaatgaccatatcttaaactatctacgacaaagtgaacttaaaaggacatgcccactgaattcaggtcctttgagtaaaaaaaaaatcttctgctgcacattttgtttaagtgttactgtttctgcctgttaatgctgggaacacaaatagtgcaatttgtgcaattggagaatcttgccttttttcttggctccccccaaaaatacaaaccaacagaaacttgttatgcactcatcaaaatgtactaatgggtactctgaactcattaacattgacatctgcaacaggaggcaacagggaaaaaatctcatcttcttttccagtagaaaatagtttgtgaaatgatgagggcattttatctgcttgctgtgaccagcgtgtgtacacataaaccttaacaagactacaagtatattccagaaggaaatcattttagttatgaactaaataataaaaattagaacttcaaatgcgatggtcttgactattagaccagatttagtagctccatatctaagatttttctacctgcccctcttcagtacagggatggctggctgctcaacacactcctcctccccttttttcctttctttaagctgtgtacagtgaaaattgtctttactgtatttttgttctctggtaatgtaataagcatgatggtgccttctattaatacatcattccagtcttgctggtaattttgtacagtatagtgtatgaattgctgtgctgcaaagccaaacagctgcaaaatgttgaaaaatcatcgaaatgtataaaaattgcagtatctttaaaatcagtaaaatggactagcatattatttatcttgttcttcagttaacaactttgtgttctctgtgggagggagggagtcctgtgtgtttgtggggagagggaaggaggaagtcagttatttgagtaagcctctagttgacttttctcttagcctgaatgtggacgttgaaacatatcacttcagggcttggaaaagtcagtcaacttgacgtacatttttagtgacattttaaaagcagtcagattctataaatggcaagtaagcctgaagtgaggatactgcaattttcggagaaaagaacagcagctctttaagtgtttgcattttctatttggggggcagggaactgtcattcattttgcacaattcttgaactgatgtcagcacccgagtggctcctgaatttaagtctgggacgacatcttttatttttacatgaatctttaaacaattctgtgagcaaagtttgtagctgctggattattgtctgtctttatagcaagttccagtaaaccacaagtatggcaaagcttatccaattttatgcttggagcagtcagtacataccagtttctgatgtttcaggcaggagtggggtaaataagtgtgaccacttaaagctgctcgttagcatggaagacttctccattctatctttgtaaaacagacaagatatgcacttgacatagtagcaaattggttctgaattatgcaactgtttgctatttagtaaactagcaaatgatgcatgtattttgtttttcatgtactgggcaatatgagtaaaatctgtccctttttccccctttgaatgaggtcttccatgtttgagggaaagtcttgcactattgcatatattttggggacacagattttcatagtttccatttttggggggcttaaggattttttttttttctgtttgaaacagttttatactttctgatatagtacttgaaattcttaccagaaaattactttggagttttgaagcctttattaatactacttttaaagaagcagttgttttattgtcaatgttttttttcccccaagcatattttcttgtatttctgtttccatatatatatatatatatataatttccaattcaggatattgccctgccatccatgaaaactgttctggcaccaaaagtaatgacaaatgttaagtgtaataatagaaaagtagagcaaagagccattcagcttcagtctttacataccatgaataaaacattaaaacatcatatggagaagtttacatggtgattgttcacctgcagtactgtggagttttaacattttgtcctcttttcagtgaaacagagtaaaaatattcatctaccattactgttatttgctgattttgttttattttttgatggtaatattctatccttatgacactattgcaaccaaattggctttaccatcttggctttagtaggtatagaagacaatggattaccatctttattgctgtaatgtgttaagcattatatgctagtagaatctagtttaattgtttcaggtggaaagtattctttgagtttccatattgaatgtgtttggactaaacaaacaataaactactgatgtctgcagcatttatctatgtccctaa

SEQ ID NO: 1327 - DNA, 1042 bp, Homo sapiens
tccctcggtccccggggccggcggacccgcgggcaggcactgcccgggctggacgacgtctggccggctcccggcgaagggcagcggaggagcggcccagagcgcgcagctagggcactggcgaaaccccgggacagtccctctccgtgcgggggcggcgcagagcagtcccatccccggggtcccgggcgcggctgactgccggctggttccctgcgcgcagtagctccccgagccgggctgcaccggaggcggcgagatggtcgcgcgcgtcggcctcctgctgcgcgccctgcagctgctactgtggggccacctggacgcccagcccgcggagcgcggaggccaggagctgcgcaaggaggcggaggcattcctagagaagtacggatacctcaatgaacaggtccccaaagctcccacctccactcgattcagcgatgccatcagagcgtttcagtgggtgtcccagctacctgtcagcggcgtgttggaccgcgccaccctgcgccagatgactcgtccccgctgcggggttacagataccaacagttatgcggcctgggctgagaggatcagtgacttgtttgctagacaccggaccaaaatgaggcgtaagaaacgctttgcaaagcaaggtgagcactgttaaaatccggctaggccaagatttcccaatgtcttgaagccaatggctaggaaaacagctgagcctgggactggactttgtcagtaacctctcttccctagggcacgggaggagtgggtgaataggacctcttggcttgaggaccatgattgtgaatacagacatttaattcagaatgacacctacattgatgaattttcattgtacaagtgtttttccagatcaaacacaaaacccatgtaattccttgataaattttcaatgcagggcagataaactgttgctaacatttttcatttatatttactgaagttattttcatcagaattcattctttttcataagttattaaacaaatgtgtgatctattgaaaaaaaaaaaaaaaaaaaaaa

SEQ ID NO: 1328 - DNA, 1868 bp, Homo sapiens
ggaagcgagggtgcggcgcaatccggagaggacgccaggacgacgcccgagttccctttcaggctagaactcttcctttttctagcttggggtagaaggcggagccggagccccggaacccccgccctcggggtgcgaggcggcagcagggccgtcccctacatttgcatagcccctgggacgtggcgctgcacccaagcctcttctcagttggagggaactccaagtcccacagtgccacggggtggggtgcgtcactttcgctgcgttggaggctgaggagaattgagcctgggaggcgggtccggagagggctatggaaagccgccggcggggaatcccggccgtagagggacagtggataggtgcccgaggcctacagctggcctggggctcgtgtctgggcttcggacgttggggcccggtggcccaccctttccgtagttgtcccaaatggagctggaattggatgctggtgaccaagacctgctggccttcctgctagaggaaagtggagatttggggacggcacccgatgaggccgtgagggccccactggactgggcgctgccgctttctgaggtaccgagcgactgggaagtagatgatttgctgtgctccctgctgagtcccccagcgtcgttgaacattctcagctcctccaacccctgccttgtccaccatgaccacacctactccctcccacgggaaactgtctctatggatctagagagtgagagctgtagaaaagaggggacccagatgactccacagcatatggaggagctggcagagcaggagattgctaggctagtactgacagatgaggagaagagtctattggagaaggaggggcttattctgcctgagacacttcctctcactaagacagaggaacaaattctgaaacgtgtgcggaggaagattcgaaataaaagatctgctcaagagagccgcaggaaaaagaaggtgtatgttgggggtttagagagcagggtcttgaaatacacagcccagaatatggagcttcagaacaaagtacagcttctggaggaacagaatttgtcccttctagatcaactgaggaaactccaggccatggtgattgagatatcaaacaaaaccagcagcagcagcacctgcatcttggtcctactagtctccttctgcctcctccttgtacctgctatgtactcctctgacacaagggggagcctgccagctgagcatggagtgttgtcccgccagcttcgtgccctccccagtgaggacccttaccagctggagctgcctgccctgcagtcagaagtgccgaaagacagcacacaccagtggttggacggctcagactgtgtactccaggcccctggcaacacttcctgcctgctgcattacatgcctcaggctcccagtgcagagcctcccctggagtggccattccctgacctcttctcagagcctctctgccgaggtcccatcctccccctgcaggcaaatctcacaaggaagggaggatggcttcctactggtagcccctctgtcattttgcaggacagatactcaggctagatatgaggatatgtggggggtctcagcaggagcctggggggctccccatctgtgtccaaataaaaagcggtgggcaagggctggccgcagctcctgtgccctgtcaggacgactgagggctcaaacacaccacacttaatggctttctgggtcttttatttgtacccatgtgtctgtcacaccatgaatgtacctggggaaatcaactgacctccctgaacatttcacgcagtcagggaacaggtgaggaaagaaataaataagtgattctaatgctgcctaaaaaaaaaaaaaaaaaa

SEQ ID NO: 1329 - DNA, 3249 bp, Homo sapiens
caagcttagcctggccgggaaacgggaggcgtggaggccgggagcagcccccggggtcatcgccctgccaccgccgcccgattgctttagcttggaaattccggagctgaagcggccagcgagggaggatgaccctctcggcccgggcaccctgtcagtccggaaataactgcagcatttgttccggaggggaaggcgcgaggtttccgggaaagcagcaccgccccttggcccccaggtggctagcgctataaaggatcacgcgccccagtcgacgctgagctcctctgctactcagagttgcaacctcagcctcgctatggctcccagcagcccccggcccgcgctgcccgcactcctggtcctgctcggggctctgttcccaggacctggcaatgcccagacatctgtgtccccctcaaaagtcatcctgccccggggaggctccgtgctggtgacatgcagcacctcctgtgaccagcccaagttgttgggcatagagaccccgttgcctaaaaaggagttgctcctgcctgggaacaaccggaaggtgtatgaactgagcaatgtgcaagaagatagccaaccaatgtgctattcaaactgccctgatgggcagtcaacagctaaaaccttcctcaccgtgtactggactccagaacgggtggaactggcacccctcccctcttggcagccagtgggcaagaaccttaccctacgctgccaggtggagggtggggcaccccgggccaacctcaccgtggtgctgctccgtggggagaaggagctgaaacgggagccagctgtgggggagcccgctgaggtcacgaccacggtgctggtgaggagagatcaccatggagccaatttctcgtgccgcactgaactggacctgcggccccaagggctggagctgtttgagaacacctcggccccctaccagctccagacctttgtcctgccagcgactcccccacaacttgtcagcccccgggtcctagaggtggacacgcaggggaccgtggtctgttccctggacgggctgttcccagtctcggaggcccaggtccacctggcactgggggaccagaggttgaaccccacagtcacctatggcaacgactccttctcggccaaggcctcagtcagtgtgaccgcagaggacgagggcacccagcggctgacgtgtgcagtaatactggggaaccagagccaggagacactgcagacagtgaccatctacagctttccggcgcccaacgtgattctgacgaagccagaggtctcagaagggaccgaggtgacagtgaagtgtgaggcccaccctagagccaaggtgacgctgaatggggttccagcccagccactgggcccgagggcccagctcctgctgaaggccaccccagaggacaacgggcgcagcttctcctgctctgcaaccctggaggtggccggccagcttatacacaagaaccagacccgggagcttcgtgtcctgtatggcccccgactggacgagagggattgtccgggaaactggacgtggccagaaaattcccagcagactccaatgtgccaggcttgggggaacccattgcccgagctcaagtgtctaaaggatggcactttcccactgcccatcggggaatcagtgactgtcactcgagatcttgagggcacctacctctgtcgggccaggagcactcaaggggaggtcacccgcaaggtgaccgtgaatgtgctctccccccggtatgagattgtcatcatcactgtggtagcagccgcagtcataatgggcactgcaggcctcagcacgtacctctataaccgccagcggaagatcaagaaatacagactacaacaggcccaaaaagggacccccatgaaaccgaacacacaagccacgcctccctgaacctatcccgggacagggcctcttcctcggccttcccatattggtggcagtggtgccacactgaacagagtggaagacatatgccatgcagctacacctaccggccctgggacgccggaggacagggcattgtcctcagtcagatacaacagcatttggggccatggtacctgcacacctaaaacactaggccacgcatctgatctgtagtcacatgactaagccaagaggaaggagcaagactcaagacatgattgatggatgttaaagtctagcctgatgagaggggaagtggtgggggagacatagccccaccatgaggacatacaactgggaaatactgaaacttgctgcctattgggtatgctgaggccccacagacttacagaagaagtggccctccatagacatgtgtagcatcaaaacacaaaggcccacacttcctgacggatgccagcttgggcactgctgtctactgaccccaacccttgatgatatgtatttattcatttgttattttaccagctatttattgagtgtcttttatgtaggctaaatgaacataggtctctggcctcacggagctcccagtcctaatcacattcaaggtcaccaggtacagttgtacaggttgtacactgcaggagagtgcctggcaaaaagatcaaatggggctgggacttctcattggccaacctgcctttccccagaaggagtgatttttctatcggcacaaaagcactatatggactggtaatggttacaggttcagagattacccagtgaggccttattcctcccttccccccaaaactgacacctttgttagccacctccccacccacatacatttctgccagtgttcacaatgacactcagcggtcatgtctggacatgagtgcccagggaatatgcccaagctatgccttgtcctcttgtcctgtttgcatttcactgggagcttgcactatgcagctccagtttcctgcagtgatcagggtcctgcaagcagtggggaagggggccaaggtattggaggactccctcccagctttggaagcctcatccgcgtgtgtgtgtgtgtgtatgtgtagacaagctctcgctctgtcacccaggctggagtgcagtggtgcaatcatggttcactgcagtcttgaccttttgggctcaagtgatcctcccacctcagcctcctgagtagctgggaccataggctcacaacaccacacctggcaaatttgattttttttttttttccagagacggggtctcgcaacattgcccagacttcctttgtgttagttaataaagctttctcaactgccaaa

SEQ ID NO: 1330 - DNA, 11571 bp, Homo sapiens
gaaggatccgttttggcgggcggttggcgttgcgcagaaggcggcggcggtggtggcttgtggtgcggcctcaccatacaggaacagggcagacgttagcgtgagtgatcactctcaatcccggggacctggtggccttagtctttcaggtggaacggtgtgcgacatgggaaagaaaaccaagcggacagctgacagttcttcttcagaggatgaggaggagtatgttgtggagaaggtgctagacaggcgcgtggttaagggacaagtggaatatctactgaagtggaaaggcttttctgaggagcacaatacttgggaacctgagaaaaacttggattgccctgagctaatttctgaatttatgaaaaagtataagaagatgaaggagggtgaaaataataaacccagggagaagtcagaaagtaacaagaggaaatccaatttctcaaacagtgccgatgacatcaaatctaaaaaaaagagagagcagagcaatgatatcgctcggggctttgagagaggactggaaccagaaaagatcattggggcaacagattcctgtggtgatttaatgttcctaatgaaatggaaagacacagatgaagctgacctggttcttgcaaaagaagctaatgtgaaatgtccacaaattgtgatagcattttatgaagagagactgacatggcatgcatatcctgaggatgcggaaaacaaagagaaagaaacagcaaagagctaaaggaggggatggtctctgtcatttctctttgtacataatacattcacctccctgcctcctctcctttctacccacccctttctatcctaaacacatccataaaaaatgtgcttatcactgtgctccacaggagaaatgttggtattggttctcttgtaacataactgatggtctgattaatgataagtgtctctctgtgaagaccaggcatttacatactgagtgtaatacccacaatttttttttcctttgccctgatctcttccttctgcttccctgtgacctcaagatgagtttcaactttttaatcaccttagagtcttgatcttttcagggttggtcgctttttaggttgggggattttgttacaatgatgttgaattttggtttcttgctttggttcttagaacatgttgctgactagctggcctttgttctgacatgttgagatggaaaggatgttgcccatctgttaaaaagccaatagcaactgcctacctgttggggctttcccaaccttgttcagctctacccaggagaatacagggtttctggtgtggtcttctgggccaccctctgttgttcatcctcactcatcctcccagaattactccatcctttggaagatttgaaattttacactgaaatctgtcaagacactctttttagccccaggactttcggtattgcttttagcactccccacttctgcttctgtaaagtgatatcaatttgtgataaaatgacaagattattaactgtgcagatttgtagctatagtacatgaggatgatggggtagggtacaattgtctttattatcatatatggtatgtatgtatgatttctttccattcctcatatttagactgtatatttatgtaggtgtgagtgattgcctggtgcttgcttgtgccaaggtgctaggcaccctccaaccctgccaacttttgtggcctcccaaagcattcctgttaccaaagaggcttcaaacctgaccctcacttctcagtggacccgagtttcccttccatgccattattttcagtggggaagttttagaggtgagctgttggccacaatatcaattttaagtgttcatagcagttatgtctcctgcattcttggctcctggatttaccaccaagagtccccaaaatattaatgctcttccctttttctaccctcaaacttatagttgtatcttattttttaaaatgaattttcatggccaggcacagtggctaccgcctgtaatcccagcactttgggaggctgaggcaggagaattgcttgaagccagaagtttgagaccagcctgggcaatgtagtgagaccccctgtctctaaaaaatataaataaaaataaaggcatgttcctgaaagactgtcaccttggaaagtgacaggccctggcattagcatgttgacacacccttttcttcttactcagcaaaatacttcgttttggtttcttcttgtgttgctattgagaaatttgtctgatcatatccttctgcctttgtcccccaagaaatgccctactttatccttttctttttgtagttgaggagggctagagaatcacaattaaaagtaaggaaatagcagggttttgaggatccttgtcccagccccaaagctgaggaaataagaataaatgcttaatatagccttaattctagagcgcaccagccatgaggctgcttttcttgttgtttttgatttttaaaacatacagctgtctggccaggagcatctaccatttctagattattcagagtaatgaggggaatggatggattgctccagtccacagatgagccacataatatgcaaatcatatacccattcatagcatttgttaacattgcttccctgctcagctgctgattgaattctgtgtgcttatataaattatgtcaaaaattatactgcataattgaggtgacagctgttgctgcagtgacatgacagactggaacaatgaagcttttggtttaagtcagccaggaaaatccttctgaatggtaatgtgattgggcaagagctcataaaccatacctcaagtgggtgggagttttatctctatattccttctctctctgaaggaattaaaggcctagatcaagtgctggataattgacaattgcttgtacttaatctgatcggtatctaaaagaaggaaaggatggtcaggaaacatttatcataaatgtagccaaggatatcaattagggtagacaagaataggacaaaaataggccagagctcctgaggaggtgatatgggtctcttgatttgcagaaaatgacagcctatccaagtggcccagtgtatgcctcccagtagcagtgggcatgtaaactgcagcgaccttatttttaaaaccaaaaacctagtatgtggacaaagaacatgacaatatttggtactgagattggttctgagaaacctggggcatgtggctgctgtggttataggtaatatttaagacattcataaaaatctgatattcttttaccgaaataaccccagtatcatctactacttaccatctgttaatagactttactctgtcttttttgtcttcggtttattgtactgagtgccgccaaaacaacttttgttctcttcctgcctacctgcagctggttctataggaatgtagggagccagaggccagtattgatttcagcccttagcacaaaggaaatcagatgcctgcttccagcatttgttagtgttgagtagatgttcttgccctagaagaattacagcctcaaacagaaacctgtttcatggagctttctcccctcagaagagttaatagttaagagctaagcactcttaaacacctaagtctcaaatgctaaaaatttatttttcttgtgtttagtcctctttcaagacatctttctaagcctttcagtaatcaacattaaaagatctccctttcttcagagttatagcacagctttgcccagtagaggctaccaaggacagcttagcagccctttgattgctgggctgggcagatggccttcaagttaagatcaaatgccgggaaaatcagcctacatgggagcacccattttaaacctggagagaaccatgatgttttcttcttcaaataacaatctagttttttttcccccagtactaaaattgtattgtctttcagacaatataatttttatttaaaattggaacatactatcttcatgctttctaagctaaatcttcatttagatttcactcctcagtagatcccagagaagaagctatataggatccagattcaaatttaacagtgtcttctacttttttagttatgttttctatcaactcctgctgccttttcaaatacggatatttttcaggagactcttctacttgtccactgactgtattttttcctttttgatccgtagccctggttaaatggctgacatccttccgtggatgattcttggaggtagtctcagaattccaaagtgattgtctgtcttcttcttgtcttgatcctaatgcagacattcacctctattatttatttattttttttagacagagtctcgctctgtcaccaggctggagtgcagtggcacaatcttggcttactgtaccctccacctcctgggttcaagcgattctcctgcctcagcctctcgagtagctgggactacaggtgtgtgccaccatgcccagctaatttttgtatttttggtagagatggggttttaccatgtttgccaggatggtctcgatttcctgaccttgtgatctgcccaccttggcctcccaaagtgctggaattacaggcatgagccaccgtgcctggccacctctattaaatttttgtggacaaaaataaaattgtcattatttgtttgctctcatggagcactttcagtaatacaattttttttaaattccagttgccctctttgttgctctgtcctctgtaatacctgactttgctaaagacttgaggggtggtttcagaggagggtcaggtgatgggaaggcaggatgagaaaagccctggacttgcatgtttgagaaggcttccaaccacatcttcactcagactcttggaattcctgtccccaaaacaagcttctgttttttgctcacaatgctatatttctaaatttttcctgaattactgagaagcagtcattagctttgttaagtttggtttggggacattgttggtatcaaaaatcgaagtcttattcatttgatgtaggccatgaatcatcaataactggttgctggaaagcttgactaccatccactggggtgctattttgagaaggatttttgggtatctttatagtctgcaattagttgatgattgctttctagtttatcaactgcatttatatttgcttttctgttcatggaaaatcctttatttgctggggttttttgtttgtttgtttgtttttcccacttacagcaagtaaaagtggtctgaggttatccttgtttttcttcgcggtttgccatgtgtgaaagtagatttcctgctattgatatattctcattatagacagaatagtggagaacagtgttgccatggacaaaatccagttttggtccactctggggagcatttggacctgtggtgcttctaacaattaaaagtctagatggtccttgactgtcccccagccatactgcatactactttgtgcattctactttgtgtcattaatgaaagattggttctgtccctgtaacttaggcatttattattcttaactcttcattcctgttctgtagccacccagcagtccattttccctatgttcaggccaaaccacagggcattggggaaggtttttgggattttcttattgagattttgttgaatctgtagtttaccccagctttcctaaggtacagtgaggggttggagggatctgtgtttggcccggggagcaattgtctctaccttaaggttcagttttgagggcataaaatactactttgcaatgtcatgagaacaccgttagatctgaaatgtggaaatggtttctcacaatttaaaggaaaaacccactttgcacccatgatcccatcattttggttgagattttagaataaaaaatatagtgttgagatccgtacttttgtaatcagaccaccaagcatgcctgtggcaaggcagagaggaaaggtctggagccagtgtattgcagtttcatgctacctttacctgctaatcataaaaattatgttttcaaaagtagatgatactagccttacacccaaaaacatgttctgaattagatgccccctcacccaatttttattaagctttctaaattccagccacattgctgtacatcaacattggtttcattcaacagacatttttttggcctgaagatacaaggttcagaaagaggccatccctgccctcaaataactttcatactggtgtatgatgaactgaccattaatagtttaagtgcttacaagctatgtttctgttcaaaaaaaaaatagtttggtataataaatgctataaaccaatacacatttctgacttgggggcagagacagactggctgatgttgtatagtttgtagccctggagtaagaagttgacattaatttcggcctatatgtggaaaagacctataacattgggtgaactgagccagctggccatagaacacaagaacatattccaggaaataaatatagctggagggttggaaatgctgttattactgagagagaaaacaggtgagttgggattgagaactcctgattttcatccctggtttagattcttggccaaagtagtggtagagttaatctttgcttgtggaaagcattaactatgttgcagattcagttgtgttacattattgtgggttctataacaacatattcctcatggacactttaccagagttgctcacacctttttcaatttctcatcccttttggaggaatgaacatgagacttaactgcctttaagcctaaaacggacatgctttccaatgacaagagattttctaaagagaagtcttggagcacatctgttaatacctgagcatctactctgagcagtgcagttttattcaatactggagagagggtgatttctttttttttgagacggagtcttgctctgtctcccaggctggagtgcagtggcgcaatctcggctcactgcaagctccacctcccgggttcacgccattctcctgcctcagcctcccgaggagctgggactacaggcgccggccaccacgcccggctaattttttgtatttttagtagagacggggtttcaccttgttagccaggatggtctcaatctcctgacctcatgatccacccacctcggcctcccagagtgctgggattacaggcgtgagccaccgccgggccgagagggtgatttctaagcagagaattgtatcagttatgtggaaacctttgccagaaatacatataccttgtatattaaatctgagtctcagatttaatcatcgaagcgtagctgggttaagaaacagtctgatcgtaaggatgttgtcgattctgacccatggatgaccacaagaaaaagatatttatttctgcctggataattgagagttgactaactttggaagtcagaattcccaggaattagagtaactgctctggaaagttaaagtgtgaagttttttagatagtttcataaaaacaattctggtttctttttgcttgtgctgactttcttggattttaatctacctcatcttgtctttttagagttacttcaacttgtcactttaacattgtgcttgactttggttgttttctaagatggaatttttcctgttcattgacagcttgttctcttgccttttcattctgatcctcatttcatctaacatcatctcatattgctcctctgtcaagagaaatgttttaaaatagtttaaagtcttgttttatgggaagaaagtgatcctccaatgctatttgtttctgaggtcagtaagagaaggagttaaaacaaggcagtggggaagggaatgaatcctgcactggaggcaaaagctgacaaggaaagagccattaattaagacaatttcaaagtcaactgattgtgatcattaatgtcacaatagatcaaaacctaattatcacagcctaggtaagagccatcagtattaatcggaaaatctaataggaaactattatcaagaaattaggccaaattgaatgcagtgaactttttatcttggcattctctatttttttgtgatgtcccctggcattggcaggtgtgaccctaacagtcgattcaaggccaagtggtcagtttgtcagccttttttaagggatttctttttatttttaggaattccaaacagagttaacctaaactgtcattgccaaaagatcagtcttaaactttcttagcacctgtacctgtttaatgtgatcagctatcagtgaggaaaaaaaaaaaaatctatttaggtcttggaatggttcctgtacctagagtatccatattgaaccttttttttttttttttttttttttttttgagatggaaacttgctcttttgcccaggctggagtgcagtggcgtgatcttggctcactgcaacctccgcctcccgggttcaagcagttctctgcctcagcctcctgagcagctgggattataggcgcctgccaccatgcccggctaatttttgtatttttagtagagacagggttcaccatcttggccgtgctggtcttgaactcctgaccttgtgatccgcctgcctcggccactcaaagtgctgggattgcaggcgtgagccagcacccggccacagtatctttattacagctcactgcagcctcaatctcctgggctcaaatgatcctcctgcctcagcctcccaagcagctgggactacaggcgcacaccacggtgtctggctaattttattatttaaaaaatgttttgtagagacagtctccctgtgttgcccaggctggtctccaactcgtgagctcaagtgatccacgtgcctcagcctcccaaagtgctgggattacaagcataagccaccgcacccggcccctagtgaacattttactgtatgtgttgataaatcatcttttgagtttctgttgtatgtggggacttcctacactggctgctgtgaagaggtatggaagaaaggagaggctttctgcctagaaattctttgagaacacctgaaaagacagtttaatcatgtcacaacactcttaaggctcaagtcagtgttctggtttccggtagctttaggattggattctaaacgagggctggtggtgagtttggtgtttgtctcgtgtcaccctcacccctcacctcctcagtttaggataagagacataatgatttctaccagaatccaaagtaaatccaaagggggagaaaagacataactgttttttcttctaccttttttttgttaaagagttacatctctcacaggaggaaagaattcaagagtctatatgattagttacagagaatattttcatcccctctccctgaatagaaaagcaggggtcaccatttgtatccttacccttgaggtgtttttgaagatgctgtaactcttgaagttgagctgaggcagaaaggttggaaaaatgcagccctctgggtattgtggggagggatgtgatgtagtaagagggtgttttgtggtgctaggattcccacgccaccaacttgcagctttataagagcgctaccaagaaccaccactggggaaaaggttcttattcattgtttctgttggaatgtgatcttgctttctggattttaggaattcaggttactcagtataaaactctgagaaatcagtgtgacttagtccttcacctcctaagataaagtgaatatttctttacaaaataattcatgtccttaatgttaaagatgtaattttattttcaaaacatctataacatgactttcagaagcagttcatttttccaagattcctcacattatactagataaataataggccctcagttaatacccttcagttattgaattaatctagtttgtggaatgaggtgtatcctgccaacttccctctgctcccaagtacactctgagaggtaaaatgctctgggaaatggaacaagaatcgagtggatgctgactctgtgtgcccacctcctcaactgattgataatggttgaccttgggcaagtcacttctttcaatgcctcagttccccatctgtcaaatggggttaataatactgacctacctcacaggggtgttgttgtgaggcattgtaaatcaaagttaatagaatacttcagggtcctctgtggaggatgtcttgagccagagtttaagcctgacacacaggctttggtcctcactgagctgtctccaagactggaactacttagtgactcggcaaattttctgccccccacccctcatcaaagctgctagttcagatgttgacagtgttttcatgaatgttggaatcttactagtccagacttacttaggatgttgttggggaaggcacttgggattttctgtgtcttgcattcacagagggaggccatttcagattcaagagcattggattagggaatcgtgaggcagggatgctactgcgtatttctctctgcaggttggggattaaagttcctttccccatgggtttgaagcagactcagactgtctcaggatcaaagcaaccctcaatggttttgatttatgtcattgcttaccactccccaaccaatcccaggacagctgggtcactgtacccctttgtggtatctgtacctgggcctctccttcctcatagggaccagctgattgaataaatgtgaccaccttatttccaccccccacccccaaaagctacattggaattatttttcctagaaatgtgtataacactcagaattgggcattgatccttaaagcttcatcccattcaccgtattcaacatctgtcatctcttagtgtctgcagtctgaacctaaccttgaccttttttccctctggtttgagaaaactttggacactatttctacttggccaggtgtgggctcaagagccttactctttccatctcagtttaggggcgcagccagctcctcttcccaatagggctctttctgctttccctctccttggccctagatttgtaatccatgaaaaagcacaaggtcctggctccttgcggtcacattctggttctctgtgttttgtggactctgctctcactgttcacccagcactagcagtaccagatggttctgtggagtcctggggaatggagagagcacagtctgactccctgccaagtagccaggagttgacttgcccatggtccgctggctttcccaccacttcctacaggatgggatctaagagactcaagagctgggtttctttcagcactctgtactgtcccaaatagcaaacaaatcactttgtagccagatttctgaatggaaatgagaaattgaattctccatggacttttaggtttatgggggagttttagctgtgtttcttggttttatttcagccaaacatgtctgcttttgattttttttttaaagtataagtggtctatatatatgttcaccttttaaatgtaaatgtttaaaaagtaagcatttatgtgtttccataactgacatctgatgcagacctcattctctccccctcttctaccctcctcttttcccccttttcatactcttgtattggttctaataaatggttgcttttcaaaaaaaaaaaaaaaaaaaaaaa

SEQ ID NO: 1331 - DNA, 1028 bp, Homo sapiens
gagttaggtgacgctgcggggcgggcggacagactgcgggacggacggtggacgctgggacgcgtttgtagctccggccccgccgttccgacccccgccgccgtcgccgccatgacggggctagcactgctctactccggggtcttcgtggccttctgggcctgcgcgctggccgtgggagtctgctacaccatttttgatttgggcttccgctttgatgtggcatggttcctgacggagacttcgcccttcatgtggtccaacctgggcattggcctagctatctccctgtctgtggttggggcagcctggggcatctatattaccggctcctccatcattggtggaggagtgaaggcccccaggatcaagaccaagaacctggtcagcatcatcttctgtgaggctgtggccatctacggcatcatcatggcaattgtcattagcaacatggctgagcctttcagtgccacagaccccaaggccatcggccatcggaactaccatgcaggctactccatgtttggggctggcctcaccgtaggcctgtctaacctcttctgtggagtctgcgtgggcatcgtgggcagtggggctgccctggccgatgctcagaaccccagcctctttgtaaagattctcatcgtggagatctttggcagcgccattggcctctttggggtcatcgtcgcaattcttcagacctccagagtgaagatgggtgactagatgatatgtgtgggtggggccgtgcctcacttttatttattgctggttttcctgggacagctggagctgtgtcccttagcctttcagaggcttggtgttcagggccctccctgcactcccctcttgctgcgtgttgatttggaggcactgcagtccaggccgagtcctcagtgcggggagcaggctgctgctgctgactctgtgcagctgcgcacctgtgtcccccacctccaccctcaacccatcttcctagtgtttgtgaaataaacttggtatttgtctgggtcagtgcaaaaaaa

SEQ ID NO: 1332 - DNA, 1909 bp, Homo sapiens
agcggcgcggccgcggaacctgaggcggtctggggcggcggcgctccggctctgaagggctccagccaaacggagcccgcggccaaacggtgcctgcggtgcctgagctgagtgaggccgaggccgggaggccgtgcccggagtaaggcgaaagagaatgaaagacgtagataacctcaaaagtataaaagaagaatgggtttgtgaaacaggatctgataatcaacctcttggtaataatcaacaatcaaattgtgaatattttgttgatagcctttttgaggaagctcagaaggttagttccaaatgtgtgtctcccgctgaacagaagaaacaggtagatgtaaatataaaattatggaaaaacggattcaccgtcaacgacgatttcagaagttattccgatggtgccagtcagcagtttttgaactccatcaaaaagggggaattaccttcagaattacagggaatttttgataaagaagaggtggacgttaaagttgaagacaagaaaaatgaaatatgtttgtctacgaagcctgtgttccagcccttttcaggacagggtcacagactaggaagtgccacaccaaaaattgtttctaaagcaaagaatattgaagttgaaaataaaaataatttgtctgctgttccactgaacaacttggaacccattactaatatacagatctggttggccaatggaaaaaggattgtccagaaatttaacattactcatagagtaagccatatcaaagacttcattgaaaaataccaaggatctcaaagaagtcctccgttttccctggcaacagctcttcctgtcctcaggttgctagatgagacactcacactggaagaagcagatttacagaatgctgtcatcattcagagactccaaaaaactgcatcttttagagaactttcagagcactgatttttgatagactaagtggaaaatttgcagagaaatgatggttgtaagtggacatgcaaaccaaaattggggattggagaagtcagactcactagacttttggttcgagtactattgaactctctcctgatgagaagatgtttagataagtacaagttaagaaagtagcatatgactggaaactatattcagtgcactttctccaaaagactacccagaaaaatagacttattttcaaataccagttatcaagatatattaaatagctgtattgtttagaatcttaatatggtataaattagcatatgtattcacaatattcattcagacatcattcccagacagcagggatttatttaaatgttagctgtctgagtttttaaatagctaatacgaccgggtacagtggttcatgcctgtaatcccagaacttcgggaggccgagacaggcagatcacgaggtcaacagattgagaccatcctggcaaacatggtgaaaccccatctctagtaaaaatacaaaaattagctgggcgtggcggtgcgcaactgtagtcccagctactcgggaggctgaggcaggagaatctcttgaacctggcaagtgtaggttgcagtgagctgagattgagcaactgtactccagcttggcgacagagcaagaccccctctcaaaaataaataaaataaagtaaaataaatataaataattgtggccgggtgcaatggctcatgcctgtaatcccagcactttgggaggctgagatgggaggatcacttgaagccaggagtttaaaaccagaatgatcaacagagtgagacccctgtctatatatttttttaatttaaaaaataaaagaataaaattgtgtagctcagtatagtatcaagattaatctgcctactcacatttctacactttataaaaatgtaataaaagaaaattatctttctaaaaaaaaaaaaaaaaaa

SEQ ID NO: 1333 - DNA, 3725 bp, Homo sapiens; identical to SEQ ID NO: 1109

SEQ ID NO: 1334 - DNA, 2504 bp, Homo sapiens
ttattttgattcaccgcagagggcggtctacgagagcgcagagccccactcggccagcggggtctggcgggggacctgtcgcgctgaaagctccagggtagggccgacgcccatcaggctgggcatccgttcgggatgcgcaggttgcgatctgcaaccggcggcgccacgcccaggcgggcggagcgcggttcccggagtctcgcgcccgcggtcatgtgacacagcgaagatggcgtcgcccggctgcctgtggctcttggctgtggctctcctgccatggacctgcgcttctcgggcgctgcagcatctggacccgccggcgccgctgccgttggtgatctggcatgggatgggagacagctgttgcaatcccttaagcatgggtgctattaaaaaaatggtggagaagaaaatacctggaatttacgtcttatctttagagattgggaagaccctgatggaggacgtggagaacagcttcttcttgaatgtcaattcccaagtaacaacagtgtgtcaggcacttgctaaggatcctaaattgcagcaaggctacaatgctatgggattctcccagggaggccaatttctgagggcagtggctcagagatgcccttcacctcccatgatcaatctgatctcggttgggggacaacatcaaggtgtttttggactccctcgatgcccaggagagagctctcacatctgtgacttcatccgaaaaacactgaatgctggggcgtactccaaagttgttcaggaacgcctcgtgcaagccgaatactggcatgaccccataaaggaggatgtgtatcgcaaccacagcatcttcttggcagatataaatcaggagcggggtatcaatgagtcctacaagaaaaacctgatggccctgaagaagtttgtgatggtgaaattcctcaatgattccattgtggaccctgtagattcggagtggtttggattttacagaagtggccaagccaaggaaaccattcccttacaggagacctccctgtacacacaggaccgcctggggctaaaggaaatggacaatgcaggacagctagtgtttctggctacagaaggggaccatcttcagttgtctgaagaatggttttatgcccacatcataccattccttggatgaaacccgtatagttcacaatagagctcagggagcccctaactcttccaaaccacatgggagacagtttccttcatgcccaagcctgagctcagatccagcttgcaactaatccttctatcatctaacatgccctacttggaaagatctaagatctgaatcttatcctttgccatcttctgttaccatatggtgttgaatgcaagtttaattaccatggagattgttttacaaacttttgatgtggtcaagttcagttttagaaaagggagtctgttccagatcagtgccagaactgtgcccaggcccaaaggagacaactaactaaagtagtgagatagattctaagggcaaacatttttccaagtcttgccatatttcaagcaaagaggtgcccaggcctgaggtactcacataaatgctttgttttgctggtgatttaaccagtgcttggaaaaatcttgcttggctatttctgcatcatttcttaaggctgccttcctctctcagtacgttgccctctgtgctatcatcttatcatcaattattagacaaatcccactggcctacagtcttgcttctgcagcacccactttgtctcctcaggtagtgatgaattagttgctgtcacaaaaggagggaagtagcacccaaattaagttgcttaagagaggaaatgtacatcttgtataacttagggagcgaagaaaatgtaggcgcgaaagtgaaaagtgaggcagctagttcttcctattccattctcgaccaacctgccctttcttaatatgactagtggtcttgatgctagagtcaacttactctgttgctggctttagcagagaataggaggaaccatatgaaaaagatcaggctttctgacttccatccccaaaacacatttaccagcatactccaaactgtttctgatgtgttccatgagaaaaggattgtttgctcaaaaagcttggaaaatactacacactccctttctccttctggagatcaacccacattagagtgtctaaggactcctgagaattcctgttacagtaaacaaaactaacgtaatctaccatttcctacactatttgagcatggaaatcatagtccccactctgtgaaaacttaacgctttttggaagacatttctgtagcatgtcagtttggagaaatgatgagctacgccttgatgaaagaaccgtgttggtgctgctaagtttagccattatggtttttcctttctctctcttaagccttattcttcaactaaaagatgaggattaagagcaagaagttgggggggatgtgaaaataattttatgaggttgtctaaaataaagagtagtttcttatc

SEQ ID NO: 1335 - DNA, 1822 bp, Homo sapiens
ggcctcgctgactgacttccggtgttggcggtggcgccgcgcagtcaccgcggagcagacgcggaggctggtggcccctgggcgagatgccgtacgccaaccagcctaccgtgcggatcacggagctcactgacgagaatgtcaagttcatcatcgagaacaccgacctggcggtggccaattcgattcggagggtcttcatcgctgaggttcccataatagccattgactgggttcagattgatgccaattcctcagttcttcatgatgaattcattgctcacaggcttggattaattcccctcattagtgatgacattgtggacaagctgcagtactctcgggactgcacatgtgaggagttctgccccgagtgctcggtggagttcaccctcgatgtgcggtgcaatgaagaccagacgcgacatgtcacgtctcgagacctcatctccaacagcccccgggtcattccggtgacatcccggaaccgagataatgaccccaatgactacgtggagcaggatgacatcctcatcgtcaagttgagaaagggccaggagctgagacttcgagcctatgccaaaaagggctttggcaaggagcatgccaagtggaaccctactgcaggggtggcttttgaatacgatccagacaatgccctgaggcacacagtgtaccccaagcccgaggaatggccaaagagtgagtactcggagctggatgaggatgagtcgcaggctccctatgaccccaacggcaagccagaaaggttttactacaatgtggagtcctgtggctctctgcgtcctgaaaccattgtcctgtcagccctctcaggattgaagaagaaactgagtgatttacaaactcaattaagccacgagatccagagtgatgtgctaaccataaattaactgcagcttgcctgcttcagcaaaaacggagattcaggccagcagctggatatgggggtctctcttcagactcttctcgtttctgagaatctagtctactgttggttgagcttcttggcaggacatcagtaccaactagaagtgggtcatagatagattaccagggatgcagtggtgtttaggcaggataggtctttactggccctgactgctgttaataattggcagcagtgctccccagatcccagaaggtccctgctggagtgtttccagtgcacctgtagggaaccaactagacttctctcctggttagtccagctctttactctaaaccctttctgtccaaaatgagtcattttcagttgtaccttagatgtctggtgttgaggatcaagtgccatagcctttattcagggggcctataaacccttccagttcttgccccagggctggcctgctagcgcttcaaattcccaggtgtccctaatttgagaagtaaccttttggaatagcattagaccctggctgtcccctccccaccaaataaacatgatatttcattctctgtccagcagtcatgaaccccttcacctccaatgacctgatcatttagtttggtgggggtgggggtgggggtgggggtggaagcagccgcaggagcaagggcccctcccacatacacaggaggagtatttcatttctccttaatgaaggctctggccctaacccctcagcactgtctccagataggaacatgcacaaagcagttaattaggcagcctggagaaaaccagagatccagtacagaaaggaaaggatatttattgattaacagaagttgtctttttaaaagtgtttatttttggcaataaagagcacaacataatctcaaaaaaaaaaaaaaaaaa

SEQ ID NO: 1336 - DNA, 3909 bp, Homo sapiens
gagcgagagtgtgtcgagtgagtgtgcgtctgtgtgtcccggcgagggtgcgcgctcggcgccgggagcgcggccagccgagtccggaggcatcgggaggtcgagagccgccgggaccccagctctgcgttcactgccccgtccggagctggacttcggggccggggccggggccgtgcgccggggacaggcagggccgggtcgcgggccgcgcgtcccccaggccggagatctgcgagtgaagagggacgagggaaaagaaacaaagccacagacgcaacttgagactcccgcatcccaaaagaagcaccagatcagcaaaaaaagaagatgggccccccgagcctcgtgctgtgcttgctgtccgcaactgtgttctccctgctgggtggaagctcggccttcctgtcgcaccaccgcctgaaaggcaggtttcagagggaccgcaggaacatccgccccaacatcatcctggtgctgacggacgaccaggatgtggagctgggttccatgcaggtgatgaacaagacccggcgcatcatggagcagggcggggcgcacttcatcaacgccttcgtgaccacacccatgtgctgcccctcacgctcctccatcctcactggcaagtacgtccacaaccacaacacctacaccaacaatgagaactgctcctcgccctcctggcaggcacagcacgagagccgcacctttgccgtgtacctcaatagcactggctaccggacagctttcttcgggaagtatcttaatgaatacaacggctcctacgtgccacccggctggaaggagtgggtcggactccttaaaaactcccgcttttataactacacgctgtgtcggaacggggtgaaagagaagcacggctccgactactccaaggattacctcacagacctcatcaccaatgacagcgtgagcttcttccgcacgtccaagaagatgtacccgcacaggccagtcctcatggtcatcagccatgcagccccccacggccctgaggattcagccccacaatattcacgcctcttcccaaacgcatctcagcacatcacgccgagctacaactacgcgcccaacccggacaaacactggatcatgcgctacacggggcccatgaagcccatccacatggaattcaccaacatgctccagcggaagcgcttgcagaccctcatgtcggtggacgactccatggagacgatttacaacatgctggttgagacgggcgagctggacaacacgtacatcgtatacaccgccgaccacggttaccacatcggccagtttggcctggtgaaagggaaatccatgccatatgagtttgacatcagggtcccgttctacgtgaggggccccaacgtggaagccggctgtctgaatccccacatcgtcctcaacattgacctggcccccaccatcctggacattgcaggcctggacatacctgcggatatggacgggaaatccatcctcaagctgctggacacggagcggccggtgaatcggtttcacttgaaaaagaagatgagggtctggcgggactccttcttggtggagagaggcaagctgctacacaagagagacaatgacaaggtggacgcccaggaggagaactttctgcccaagtaccagcgtgtgaaggacctgtgtcagcgtgctgagtaccagacggcgtgtgagcagctgggacagaagtggcagtgtgtggaggacgccacggggaagctgaagctgcataagtgcaagggccccatgcggctgggcggcagcagagccctctccaacctcgtgcccaagtactacgggcagggcagcgaggcctgcacctgtgacagcggggactacaagctcagcctggccggacgccggaaaaaactcttcaagaagaagtacaaggccagctatgtccgcagtcgctccatccgctcagtggccatcgaggtggacggcagggtgtaccacgtaggcctgggtgatgccgcccagccccgaaacctcaccaagcggcactggccaggggcccctgaggaccaagatgacaaggatggtggggacttcagtggcactggaggccttcccgactactcagccgccaaccccattaaagtgacacatcggtgctacatcctagagaacgacacagtccagtgtgacctggacctgtacaagtccctgcaggcctggaaagaccacaagctgcacatcgaccacgagattgaaaccctgcagaacaaaattaagaacctgagggaagtccgaggtcacctgaagaaaaagcggccagaagaatgtgactgtcacaaaatcagctaccacacccagcacaaaggccgcctcaagcacagaggctccagtctgcatcctttcaggaagggcctgcaagagaaggacaaggtgtggctgttgcgggagcagaagcgcaagaagaaactccgcaagctgctcaagcgcctgcagaacaacgacacgtgcagcatgccaggcctcacgtgcttcacccacgacaaccagcactggcagacggcgcctttctggacactggggcctttctgtgcctgcaccagcgccaacaataacacgtactggtgcatgaggaccatcaatgagactcacaatttcctcttctgtgaatttgcaactggcttcctagagtactttgatctcaacacagacccctaccagctgatgaatgcagtgaacacactggacagggatgtcctcaaccagctacacgtacagctcatggagctgaggagctgcaagggttacaagcagtgtaacccccggactcgaaacatggacctgggacttaaagatggaggaagctatgagcaatacaggcagtttcagcgtcgaaagtggccagaaatgaagagaccttcttccaaatcactgggacaactgtgggaaggctgggaaggttaagaaacaacagaggtggacctccaaaaacatagaggcatcacctgactgcacaggcaatgaaaaaccatgtgggtgatttccagcagacctgtggtattggccaggaggcctgagaaagcaagcacgcactctcagtcaacatgacagattctggaggataaccagcaggagcagagataacttcaggaagtccatttttgcccctgcttttgctttggattatacctcaccagctgcacaaaatgcattttttcgtatcaaaaagtcaccactaaccctcccccagaagctcacaaaggaaaacggagagagcgagcgagagagatttccttggaaatttctcccaagggcgaaagtcattggaatttttaaatcataggggaaaagcagtcctgttctaaatcctcttattcttttggtttgtcacaaagaaggaactaagaagcaggacagaggcaacgtggagaggctgaaaacagtgcagagacgtttgacaatgagtcagtagcacaaaagagatgacatttacctagcactataaaccctggttgcctctgaagaaactgccttcattgtatatatgtgactatttacatgtaatcaacatgggaacttttaggggaacctaataagaaatcccaattttcaggagtggtggtgtcaataaacgctctgtggccagtgtaaaagaaaatccctcgcagttgtggacatttctgttcctgtccagataccatttctcctagtatttctttgttatgtcccagaactgatgttttttttttaaggtactgaaaagaaatgaagttgatgtatgtcccaagttttgatgaaactgtatttgtaaaaaaaattttgtagtttaagtattgtcatacagtgttcaaaaccccagccaatgaccagcagttggtatgaagaacctttgacattttgtaaaaggccatttcttgggaaaaaaaaaaa

SEQ ID NO: 1337 - DNA, 1163 bp, Homo sapiens
ccggcggcgcctcaggtcgcggggcgcctaggcctgggttgtcctttgcatctgcacgtgttcgcagtcgtttccgcgatgctgcctctgctgcgctgcgtgccccgtgtgctgggctcctccgtcgccggcctccgcgctgccgcgcccgcctcgcctttccggcagctcctgcagccggcaccccggctgtgcacccggcccttcgggctgctcagcgtgcgcgcaggttccgagcggcggccgggcctcctgcggcctcgcggaccctgcgcctgtggctgtggctgcggctcgctgcacaccgacggagacaaagcttttgttgatttcctgagtgatgaaattaaggaggaaagaaaaattcagaagcataaaaccctccctaagatgtctggaggttgggagctggaactgaatgggacagaagcgaaattagtgcggaaagttgccggggaaaaaatcacggtcactttcaacattaacaacagcatcccaccaacatttgatggtgaggaggaaccctcgcaagggcagaaggttgaagaacaggagcctgaactgacatcaactcccaatttcgtggttgaagttataaagaatgatgatggcaagaaggcccttgtgttggactgtcattatccagaggatgaggttggacaagaagacgaggctgagagtgacatcttctctatcagggaagttagctttcagtccactggcgagtctgaatggaaggatactaattatacactcaacacagattccttggactgggccttatatgaccacctaatggatttccttgccgaccgaggggtggacaacacttttgcagatgagctggtggagctcagcacagccctggagcaccaggagtacattacttttcttgaagacctcaagagttttgtcaagagccagtagagcagacagatgctgaaagccatagtttcatggcaggctttggccagtgaacaaatcctactctgaagctagacatgtgctttgaaatgattatcatcctaatatcatgggggaaaaaataccaaatttaaattatatgttttgtgttctcatttattatcatttttttctgtacaaatctattatttctagatttttgtataacatgatagacataaaattggtttatctcctcc

SEQ ID NO: 1338 - DNA, 1864 bp, Homo sapiens
ctggcggctcttgggactggcggggctgcgcgcggggttagggtgggggtacgggaaggctcaacccaggacctgcgtaccttgctttgggggcgcactaagcacctgccgggagcagggggcgcaccgggaactcgcagatttcgccagttgggcgcactggggatctgtggactgcgtccgggggatgggctagggggacatgcgcacgctttgggccttacagaatgtgatcgcgcgagggggagggcgaagcgtggcgggagggcgaggcgaaggaaggagggcgtgagaaaggcgacggcggcggcgcggaggagggttatctatacatttaaaaaccagccgcctgcgccgcgcctgcggagacctgggagagtccggccgcacgcgcgggacacgagcgtcccacgctccctggcgcgtacggcctgccaccactaggcctcctatccccgggctccagacgacctaggacgcgtgccctggggagttgcctggcggcgccgtgccagaagcccccttggggcgccacagttttccccgtcgcctccggttcctctgcctgcaccttcctgcggcgcgccgggacctggagcgggcgggtggatgcaggcgcgatggacggcggcacactgcccaggtccgcgccccctgcgccccccgtccctgtcggctgcgctgcccggcggagacccgcgtccccggaactgttgcgctgcagccggcggcggcgaccggccaccgcagagaccggaggcggcgcagcggccgtagcgcggcgcaatgagcgcgagcgcaaccgcgtgaagctggtgaacttgggcttccaggcgctgcggcagcacgtgccgcacggcggcgccagcaagaagctgagcaaggtggagacgctgcgctcagccgtggagtacatccgcgcgctgcagcgcctgctggccgagcacgacgccgtgcgcaacgcgctggcgggagggctgaggccgcaggccgtgcggccgtctgcgccccgcgggccgccagggaccaccccggtcgccgcctcgccctcccgcgcttcttcgtccccgggccgcgggggcagctcggagcccggctccccgcgttccgcctactcgtcggacgacagcggctgcgaaggcgcgctgagtcctgcggagcgcgagctactcgacttctccagctggttagggggctactgagcgccctcgacctatgagcctcagccccggaagccgagcgagcggccggcgcgctcatcgccggggagcccgccaggtggaccggcccgcgctccgcccccagcgagccggggacccacccaccaccccccgcaccgccgacgccgcctcgttcgtccggcccagcctgaccaatgccgcggtggaaacgggcttggagctggccccataagggctggcggcttcctccgacgccgcccctccccacagcttctcgactgcagtggggcggggggcaccaacacttggagatttttccggaggggagaggattttctaagggcacagagaatccattttctacacattaacttgagctgctggagggacactgctggcaaacggagacctatttttgtacaaagaacccttgacctggggcgtaataaagatgacctggacccctgcccccactatctggagttttccatgctggccaagatctggacacgagcagtccctgaggggcggggtccctggcgtgaggcccccgtgacagcccaccctggggtgggtttgtgggcactgctgctctgctagggagaagcctgtgtggggcacacctcttcaagggagcgtgaactttataaataaatcagttctgtttaaaaaaaaaaaaaaaa

SEQ ID NO: 1339 - DNA, 2975 bp, Homo sapiens
gagcaagatggctgactccaaagagggtgttttgccgctgacggctgcttccactgccccaatttcattcggcttcactcgcacgtccgcacggaggcggctggccgactcgggagacggcgcggggccatctccggaggagaaggatttcttgaaaaccgtggaagggagggagctgcagagtgtgaagccccaggaggcccccaaggaactcgtcatccctttgatccagaatggccatcgcaggcagccaccagcccggccccctgggccatccacagatactggggccttggcggatggggtggtgtcccaggctgtgaaggagctcattgcggaatccaagaagtctctggaagagagagagaatgcgggtgtcgaccccacgctcgctatccccatgatccagaaaggatgcacccccagcggggaaggggcagacagcgaaccccgggcagagacagtgccagaggaggctaattatgaggcggtccccgtggaggcctatgggctggccatgctgcggggcatgggctggaaacctggcgagggcatcggccgcaccttcaatcaagtagtgaagccccgtgtcaactcactgaggcccaaggggttagggctgggtgccaacctgaccgaggcccaggccttgacccccactggcccctcccgcatgccaagaccagatgaggagcaagagaaagataaggaagatcagcctcaagggctggtgcctggaggagctgtggtggttctttctggccctcaccgaggcctctatgggaaggtggaaggccttgatcctgacaatgttcgggccatggttcgtctggctgtggggagccgggtggtgactgttagtgagtactacctgcggcctgtctcccagcaggagtttgacaagaacaccttggatctcaggcaacagaacggaactgcctcatcacggaagaccctctggaatcaagaactctacatccagcaggacaactcagagaggaagcggaaacaccttccagaccgacaggatgggcctgcagccaagagtgagaaagcagcccccagaagtcagcactggttgcacagggacctgcgtgtgcggtttgtggacaacatgtacaaaggaggccaatattacaacaccaagatgataattgaagatgtcctaagcccagatacctgtgtatgtcggacagatgaaggccgagtcctggaaggcctgagggaagacatgctggagaccctggttcccaaggcagagggtgaccgtgtgatggtggtgctgggcccacagactggaagggtgggacatttgctgagccgggacagagcacggagccgggctttggtgcaactgccaagagaaaatcaggtggtggagcttcactacgatgccatctgccagtacatgggccctagtgacacagatgatgactgacccatgggactcctcccatcccccaggctggtaccagttctgtaccatatgagaaagttgccttcagaaggtgggaagatcattgttccatcctctacttctggtgcagtcctgggacaaggacaagggaaagggatgggtgaaccagtagggaagctagaaacaaacccaatatttaccaaaatttagggtataataaaaaccatttcaagtacttaatagaaagatgaaatcataagtggtatgatgagctgcgagttaaggtgggaactgagttgactgaggtgggaaccatttcacttttaagccttgcttttctgctcagggtacaggacaagttaaaggactcatttgattgtgagctcactcttggaatatagatactataagcttgggcacagtggtgcatgcctgtaatcctagcactttaggaggctgaggtggatggatcgcttgagcccaggagttcaagatcagcctggccaacaaggtgaaaccctgtctctactaaaagtataaaaatacaaaaaattaccgaggtatggtggtgcacgcctataatcctagctactcaggaggctgaggcaagagaatcgcttgaacccaggaggcagaggttgctgtgagcccagattgcgccactgcactccagcccaggggacagagttagactctgtctcaaaaaaaaaaaaaaaaatctttagatgctgtggaatctgaaatactgtatctctgaacaactttctgagcaagaactctagcaactagcagcagagtatgctttcactctcagtttagagcaggaccccagagaatatgctgagcctggggtcttcctctgttgcccagactggagtgcagtggtgcaatcatagctcacagcagcattgatctcctgggctcaagcgatcttcccgtctcagcctcccaaagtgctgggattataggcactggaatgagccaccgtgcctggtctctggcttgtattttgttaatcgtagggaggatgttcccaacttctcatgtccagtagtccatttcctatgctttatgcacttcactctgtcaaggaggcctcctcctttctccaatcataataaaccagccttggtagcacctttgagaagggctaaagctccccagggaatggcactggggctctgtctctgcctgtaacacaacataacctggccatttcagacaccctccatctcctccccgtgccacaatgctaaagcagatatctcatcagcttcagatttcctggaattcatctttctcctaagcctacgcttgaaaatggggcccaaagttcttgaatatggccctttgtccagaacacctagctccagccaaagcgcctggtctcccttgacaggccactgggactttttctgctttaccttgaaaggagccctgctgatccccattttgaggacagggctccttacattcagggaagtgtggacaatataaggaggccttcccaatatgccctttgttcactgtgcacaaacaaagccttgtatctgaagac

SEQ ID NO: 1340 - DNA, 1005 bp, Homo sapiens
acctctcaagcagccagcgcctgcctgaatctgttctgccccctccccacccatttcaccaccaccatgacaccgggcacccagtctcctttcttcctgctgctgctcctcacagtgcttacagttgttacgggttctggtcatgcaagctctaccccaggtggagaaaaggagacttcggctacccagagaagttcagtgcccagctctactgagaagaatgctatcccagcaccgactactaccaagagctgcagagagacatttctgaaatgtttttgcagatttataaacaagggggttttctgggcctctccaatattaagttcagtgagtgatgtgccatttcctttctctgcccagtctggggctggggtgccaggctggggcatcgcgctgctggtgctggtctgtgttctggttgcgctggccattgtctatctcattgccttggctgtctgtcagtgccgccgaaagaactacgggcagctggacatctttccagcccgggatacctaccatcctatgagcgagtaccccacctaccacacccatgggcgctatgtgccccctagcagtaccgatcgtagcccctatgagaaggtttctgcaggtaatggtggcagcagcctctcttacacaaacccagcagtggcagccacttctgccaacttgtaggggcacgtcgcccgctgagctgagtggccagccagtgccattccactccactcaggttcttcagggccagagcccctgcaccctgtttgggctggtgagctgggagttcaggtgggctgctcacagcctccttcagaggccccaccaatttctcggacacttctcagtgtgtggaagctcatgtgggcccctgagggctcatgcctgggaagtgttgtggtgggggctcccaggaggactggcccagagagccctgagatagcggggatcctgaactggactgaataaaacgtggtctcccactgcgccaaaaaaaaaaaaaaaaaa

SEQ ID NO: 1341 - DNA, 1686 bp, Homo sapiens
gcttaagttgacctctgggtccggaatcgcgggcaaagatggcggcggccaggtgttggaggcctttgctacgcggtccgaggctttcattgcacaccgcggctaatgccgccgccacggctacagaaacgacctgccaagacgtcgcggcgacccccgtcgcgcggtacccgccgattgtggcctccatgacagccgacagcaaagctgcacggctgcggcggatcgagcgctggcaggcgacggtgcacgctgcggagtcggtagacgagaagctgcgaatcctcaccaagatgcagtttatgaagtacatggtttacccgcagaccttcgcgctgaatgccgaccgctggtaccagtacttcaccaagaccgtgttcctgtcgggtctgccgccgcccccagcggagcccgagcccgagcccgaacccgaacctgaacctgcgctggacctcgcggcgctgcgtgcggtcgcctgcgactgcctgctgcaggagcacttctacctgcggcgcaggcggcgcgtgcaccgttacgaggagagcgaggtcatatctttgcccttcctggatcagctggtgtcaaccctcgtgggcctcctcagcccacacaacccggccctggccgctgccgccctcgattatagatgcccagttcatttttactgggtgcgtggtgaagaaattattcctcgtggtcatcgaagaggtcgaattgatgacttgcgataccagatagatgataaaccaaacaaccagattcgaatatccaagcaactcgcagagtttgtgccattggattattctgttcctatagaaatccccactataaaatgtaaaccagacaaacttccattattcaaacggcagtatgaaaaccacatatttgttggctcaaaaactgcagatccttgctgttacggtcacacccagtttcatctgttacctgacaaattaagaagggaaaggcttttgagacaaaactgtgctgatcagatagaagttgtttttagagctaatgctattgcaagcctttttgcttggactggagcacaagctatgtatcaaggattctggagtgaagcagatgttactcgaccttttgtctcccaggctgtgatcacagatggaaaatacttttcctttttctgctaccagctaaatactttggcactgactacacaagctgatcaaaataaccctcgtaaaaatatatgttggggtacacaaagtaagcctctttatgaaacaattgaggataatgatgtgaaaggttttaatgatgatgttctacttcagatagttcactttctactgaatagaccaaaagaagaaaaatcacagctgttggaaaactgaaaaagcatatttgattgagaactgtgggaatatttaaattttactgaaggaacaataatgatgagatttgtaactgtcaactattaaatacattgatttttgagacaaatatttcttatgtcaacctgttattagatctcttactctgctcaaattcatcactgaaagatttaattttagttaccttttgttgatttaaaaataattgcatttgtatattgctaactgataagacaaattgagttattgagctattaaatgcacattttaatataaatgcagaaatcccaaataaaatgctaacatactgaaaaaaaaaaaaaaaaaa

SEQ ID NO: 1342 - DNA, 1593 bp, Homo sapiens
tccggaacgccggggtgtggttccgggtcgtgtgcggctcggggtaatagggctgctgctcggccggccggcggcggcgagcagcaggggcatgagggctaacccgggaagcggcagctgagcgggccgggaggagcgccggtccccgtggatcccgagagtgcagagctcggggcaggggccgggaggcgtgggggagccgggccctcccctcaggaacgtgtcccggggccgacccggcccgtagtgtggaagcagcttcaggtaggtgagctcgtgaaacaatatgaagaggagaaaatagccttttaaggaaattggcccacagaaaggatggccttcttggacaatccaactatcattctagctcatattcgacagtcacatgtgaccagtgatgacacgggaatgtgtgagatggttctcattgatcatgatgttgacctagagaagattcatcctccttcaatgcctggagacagtgggtcagaaattcagggaagcaatggtgagactcagggctatgtatatgcccagtcagtcgatattacctcaagttgggactttggtattagaagacgctcaaacacagctcaaagattagaacgactccgaaaagagagacaaaaccagatcaaatgcaaaaatattcagtggaaagaaagaaattctaagcaatcagcccaggagttaaagtcactgtttgaaaaaaaatctctcaaagagaagcctccaatttctgggaagcagtcgatattatctgtacgcctagaacagtgccctctgcagctgaataacccttttaacgagtattccaaatttgatggcaagggtcatgtaggtacaacagcaaccaagaagatcgatgtctacctccctctgcactcgagccaggacagactgctgccaatgaccgtggtgacaatggccagcgccagggtgcaggacctgatcgggctcatctgctggcagtatacaagcgaaggacgggagccgaagctcaatgacaatgtcagtgcctactgcctgcatattgctgaggatgatggggaggtggacaccgatttccccccgctggattccaatgagcccattcataagtttggcttcagtactttggccctggttgaaaagtactcatctcctggtctgacatccaaagagtcactctttgttcgaataaatgctgctcatggattctcccttattcaggtggacaacacaaaggttaccatgaaggaaatcttactgaaggcagtgaagcgaagaaaaggatcccagaaagtttcaggtgcttgtgactaaattcactaatttcactggctgtcaaggctgtgttaaggaaaatgggtttgaactgctgtgggttttgagtactggactggatgtcagaaacctttgccatcacgggaaattctgtcactctggatttactgtctgttccccacagctaaattcctctgcagtgtgatttagcaccctggatccccatcaaccagttttggcatttatttgaatgcattaccccactggtttccataaactattttacaattgtttaaaataaatgactgtttatttccacaaaaaaaa

SEQ ID NO: 1343 - DNA, 2523 bp, Homo sapiens
agcactgcctggaagtgtggggtgagagctcctcctaggacacccctttccccttggggaaagaattgtgcccccaggcccttccccgcggaggtccctctcctccttccccctcatctccccttcctgggacagaaagtgcctccacctgcatccccaggggcccggcctccagggcccgctggccccacagcaggcaagctgagatgacggtcaagctggatttcgaggagtgtctcaaggactcaccccgtttccgagcctctattgagctggtggaagccgaagtgtcagaattggagacccgtctggaaaagctcctgaaactgggcactggtctcctggaaagtgggcgccattaccttgctgccagccgcgccttcgttgtcggcatttgtgacctggcccgcctgggtccaccagagcccatgatggcggagtgtctggaaaaattcaccgtgagcctgaaccacaagctggacagccatgcggagcttctagatgccacccaacacacactgcagcagcagatccagaccctggtcaaggaaggtctgcggggtttccgagaggctcgccgggatttctggcggggggctgagagcctggaggctgccctgacccacaacgcagaggttcccaggcgccgggcccaggaggcagaagaggcaggagctgctttgaggacggctcgagctgggtaccggggacgggcactggattatgccctgcagatcaacgtgattgaggacaagaggaagtttgacatcatggagtttgtgctgcgtttggtggaggcccaggctacccatttccagcagggccatgaggagctgagccggctgtcccagtatcgaaaggagctgggcgcccagttgcaccagctggtcttgaattcagcacgagagaagagggacatggagcagagacacgtgctgctgaaacagaaggagctgggtggggaggagccagaaccaagcttaagagaggggcctggtggcctggtgatggaaggacatctcttcaaacgggccagcaacgcatttaagacctggagcagacgctggttcaccattcagagcaaccaactggtttaccagaagaagtacaaggaccctgtgactgtggtggtggatgaccttcgtctctgcacagtgaaactctgccctgactcagaaaggcggttctgctttgaggtggtgtccaccagcaagtcctgcctcctccaggctgactcagagcgcctcctgcagctgtgggtcagtgctgtgcagagcagcattgcttctgccttcagtcaggctcgccttgatgacagcccccggggtccaggccagggctcaggacacctggccataggctctgctgccaccctgggctctggtggaatggccaggggaagggagcctgggggagtcgggcacgtggtggcccaggtccagagtgtggatggcaatgcccagtgctgcgactgccgggagccagccccggagtgggccagcatcaaccttggtgtcaccctctgcattcagtgttccggcatccacaggagccttggtgttcacttctccaaagtccggtctctgacccttgactcatgggagccagaactagtgaagctcatgtgtgagctgggaaatgtcatcatcaaccagatctatgaggcccgcgtggaggccatggcagtgaagaaaccagggcccagctgctcccggcaggagaaggaggcctggattcacgctaaatacgtggagaagaagttcctgaccaagctgcctgagattcgagggcgaagaggtggccgggggcgcccaagggggcagcctcctgtgcccccaaagccttccatcaggccccggccagggagcttgagatccaagccagagcccccctctgaggacctgggaagcctgcaccctggggccctactgtttcgagcgtctgggcatcctccatctcttcccaccatggctgatgcccttgcccatggagctgatgtcaactgggtcaatgggggccaagataatgccacaccgctgatccaggccacagctgctaattctcttctggcctgtgagtttctcctccagaacggggcgaacgtgaaccaagcggacagtgcgggccggggcccgctgcaccacgcaaccattcttggccacacggggctcgcctgcctgttcctgaaacggggagctgatctgggggctcgagactctgaaggcagggaccctctgaccatcgccatggaaacagccaacgctgacatcgtcaccctgctacgactggcaaagatgagggaggctgaagcggcccaggggcaggcaggagatgagacgtatcttgacatcttccgcgacttctccctcatggcgtcagacgacccggagaagctgagccgtcgcagtcatgacctccacacgctgtgacccgaggcccacggggcccgcgcctgcctcccttccccgccaccgggccctctgccattaaagcctccgtgcttcgctcaaaaaaaaaaaaaaa

SEQ ID NO: 1344 - DNA, 774 bp, Homo sapiens
cgcagcgcctgccagtgacgtcgtgggctgcagcgcagcagcacccaacgcagtgagtaccttgatctcctgcgtggcctcgtccctggtcttagttccaccgggcagcgggagtcaggaccgcctgtcctcagacccctccgcagcgactgtggcggccgcagtctagcaggaaaggagagggagctttccccgaagaccctcctggaccagccccaggctcctgtgctggttgcacgccagggcctgtactgaccacctccacgtgccactggggctgtaaggaggaatggcggccgtgggcagcctgcttggccggctgaggcagagcaccgtgaaggccaccggacctgcactccgccgcctgcacacatcctcctggcgagctgacagcagcagggcctcactcactcgtgtgcaccgccaggcttatgcacgactctaccccgtgctgctggtgaagcaggatggctccaccatccacatccgctacagggagccacggcgcatgctggcgatgcccatagatctggacaccctgtctcctgaggagcgccgggccaggctgcggaagcgtgaggctcagctccagtcgaggaaggagtacgagcaggagctcagtgatgacttgcatgtggagcgctaccgacagttctggaccaggaccaagaagtgaccgtggctccagccaccccgggacattgctaagatgggagggctgttcttaaatcactcgttcttgaagctgccacctggaaaaaaaaaaaaaaaaaa

SEQ ID NO: 1345 - DNA, 2866 bp, Homo sapiens
ctcatgaggagccactcagattcctgtcacttctcaaagcatctccgtcgtgaacatggccctgccaccattcttcggccagggtcgcccaggcccaccgcccccgcagccgccgcctcctgctcctttcggctgtccgccaccgccgctgccctccccggctttcccgccgcctctcccccagcggcccggcccttttccgggggcctccgcccccttccttcagcctccgctggctctgcagccccgagcctccgcggaggcctcccgcggcggaggcggcgctggcgccttctacccggtgccaccaccgccgctgcctcctccgccgccccagtgtcggcccttcccggggaccgacgccggcgagcggccgcggccaccgcctcccggcccggggccgccctggagcccgcggtggcctgaggcgccgccgccgccggccgacgtgctcggggatgcggccctccaacgcctgcgcgaccggcagtggctggaggcggtgttcgggaccccgcggcgggcaggctgtccggtgccccagcgcacgcatgccgggcccagccttggcgaagtgcgcgcgcgattgctccgggctctgcgcctggtgcggcggctgcgcggcctgagccaggccctgcgcgaggccgaagccgacggcgcggcctgggtcctgctgtactcccagaccgcgccgctgcgcgcggaactggccgagcggctacagccgttgacccaggctgcctatgtgggcgaggcgcggaggaggctggagagggtccggcgccgccggctgcggcttcgcgagagggcccgggaacgcgaggccgagcgggaggcagaggccgcgcgggcagtggaacgcgagcaggagattgaccgctggagggtgaagtgtgtgcaggaggtggaggagaagaagcgggagcaggaactcaaagcagccgctgatggcgtactatctgaagtgaggaaaaaacaagcagataccaaaagaatggtggacattctacgggctttggagaaattgaggaaactgaggaaagaggctgcagcgaggaaaggggtctgtcctccagcctcagcagatgagacttttacgcatcatcttcagcgactgagaaaactcattaaaaagcgctctgaactgtatgaagctgaagagagagccctcagagttatgctagaaggagaacaagaggaagagaggaaaagagaattagaaaagaaacaaagaaaagaaaaagagaaaattttacttcagaaacgtgaaattgagtccaagttgtttggggatccagatgagttcccacttgctcacctcttggagcctttccgacagtattatctccaagccgagcactccctgccagcgctcatccagatcaggcatgattgggatcagtacctggtgccatccgatcatcccaaaggcaacttcgttccccaaggatgggtccttcccccgctccccagcaacgacatctgggcaactgctgttaagctgcattagtaaagatgctccaggagtgtggtccagccagcgctctttccagctgtaaatattagcgatggtgccatcttttgctgtagactaaactgcaacttctaaattccatgtggcattcccctaccctgaagttatgctttccttctgtgctctgtgctggccagaggtgcctcttgaatcagattaatgtggtttttcaggaaaggacttaggtgaactgaggtttttaccacaggcagtgaatgaccttggttcaccaaatttgcctctgttttgaggggcttggtccagagtgacttgttaatttactctaacttccttgtgtgttgatgggtaagtacactcaaacactgaatacaggtgtgtgatgggtagatttcacagcccttctactaatagtgagtgtgaaggcaagcttgatgcaaaacctcctgacctttcctacctgaagagccctttgacttctaggaagaaaggtcaaaaatgttatcttcagttgtgttaatcccagttttagtgcagcttaggaggctgctagttaggaagatggcagtggctgtaggctgggttgccagaaaagatggtggcctagtcttattattcagatggagaacttagaaaacctgaagagtacccaaattggattgtattttaatggacaatggctgtattttttccatgttagaaggatcctaatgaaagcacctgttatttttaagtttctaagggtctagttgttcagaatccccaaggatatttccctaacctcactcagtcacattgtaggagccagtgtagctatggaattatcttaggaactcaagcttctaaaactatccatgtagtcaaatctaggggaaaaagcaaataaaaatagtaaaatttggccgggcacagtggctcacgcctgtaatcccaacactttgggaggccgaggcgggccgatcacgaggtcaggagatcaaggccatcctggctaacacggtgaaaccctgtctctactaaaaatacaaaaaaatattagctgggcgtaggtggtgcacacctgtagtcccagctactggggaggctgaggcaggagaatggtgtaaaacccaggaggcagagcttgcagtgagccgagatcgcgccacggcactccagcctgggagacagagcaagactccgtctcaaaaaaaaaaaaagtaaaatttattttttatattcattaataaatgctgttgtgcttggagatgatcactcatataacatgtcatttttttggttctgttttggtttggtttttgccaattattttgttatatttccaaaaaactaaataaaaatcatttttattttttaaaaaaaaaaaaaaaa

SEQ ID NO: 1346 - DNA, 1354 bp, Homo sapiens
tttctgcccgtggacaccgccgaagaagcatcgttaaagtctctcttcaccctgccgtcatgtctaagtcagagtctcctaaagagcccgaacagctgaggaagctcttcattggagggttgagctttgaaacaactgatgagagcctgaggagccattttgagcaatggggaacgctcacggactgtgtggtaatgagagatccaaacaccaagcgctccaggggctttgggtttgtcacgtatgccactgtggaggaggtggatgcagctatgaatgcaaggccacacaaggtggatggaagagttgtggaaccaaagagagctgtctccagagaagattctcaaagaccaggtgcccacttaactgtgaaaaagatatttgttggtggcattaaagaagacactgaagaacatcacctaagagattattttgaacagtatggaaaaattgaagtgattgaaatcatgactgaccgaggcagtggcaagaaaaggggctttgcctttgtaacctttgacgaccatgactccgtggataagactgtcattcagaaataccatactgtgaatggccacaactgtgaagttagaaaagccctgtcaaagcaagagatggctagtgcttcatccagccaaagaggtcgaagtggttctggaaactttggtggtggtcgtggaggtggtttcggtgggaatgacaacttcggtcgtggaggaaacttcagtggtcgtggtggctttggtggcagccatggtggtggtggatatggtggcagtggggatggctataatggatttggtaatgatggaagcaattttggaggtggtggaagctacaatgattttggcaattacaacaatcagtcttcaaattttggacccatgaagggaggaaattttggaggcagaagctctggcccctatggcggtggaggccaatactttgcaaaaccacgaaaccaagtggctatggcggttccagcagcagcagtagctatggcagtggcagaagattttaattaggaaacaaagcttagcaggagaggagagccagagaagtgacagggaagctacaggttacaatagatttgtgaactcagccaagcacagtggtggcagggcctagctgctacaaagaagacatgttttagacaaatactcatgtgtatgggcaaaaaactcgaggactgtatttgtgactaattgtataacaggttattttagtttctgttctgtggaaagtgtaaagcattccaacaaagggttttaacgtagatttctttttgcaccccatgctgttgattgctaaatgtaatagtctgatcgtgatgctgaataaatgtctttttttt

SEQ ID NO: 1347 - DNA, 2325 bp, Homo sapiens
cccgccccctctcttctccctccctcctccttccgtgtgtccctccccgcccggctggaggctgctccggaccgggacgcagagtctgcggacccggcgccgaggcggccacccgagacgcggcgcgcacgctccggcctgcgcagcccggcccggccatggcggccccccgcccgtctcccgcgatctccgtttcggtctcggctccggctttttacgccccgcagaagaagttcggccctgtggtggccccaaagcccaaagtgaatcccttccggcccggggacagcgagcctcccccggcacccggggcccagcgcgcacagatgggccgggtgggcgagattcccccgccgcccccggaagactttcccctgcctccacctccccttgctggggatggcgacgatgcagagggtgctctgggaggtgccttcccgccgccccctcccccgatcgaggaatcatttccccctgcgcctctggaggaggagatcttcccttccccgccgcctcctccggaggaggagggagggcctgaggcccccataccgcccccaccacagcccagggagaaggtgagcagtattgatttggagatcgactctctgtcctcactgctggatgacatgaccaagaatgatcctttcaaagcccgggtgtcatctggatatgtgcccccaccagtggccactccattcagttccaagtccagtaccaagcctgcagccgggggcacagcacccctgcctccttggaagtccccttccagctcccagcctctgccccaggttccggctccggctcagagccagacacagttccatgttcagccccagccccagcccaagcctcaggtccaactccatgtccagtcccagacccagcctgtgtctttggctaacacccagccccgagggcccccagcctcatctccggctccagcccctaagttttctccagtgactcctaagtttactcctgtggcttccaagttcagtcctggagccccaggtggatctgggtcacaaccaaatcaaaaattggggcaccccgaagctctttctgctggcacaggctcccctcaacctcccagcttcacctatgcccagcagagggagaagccccgagtgcaggagaagcagcaccccgtgcccccaccggctcagaaccaaaaccaggtgcgctcccctggggccccagggcccctgactctgaaggaggtggaggagctggagcagctgacccagcagctaatgcaggacatggagcatcctcagaggcagaatgtggctgtcaacgaactctgcggccgatgccatcaacccctggcccgggcgcagccagccgtccgcgctctagggcagctgttccacatcgcctgcttcacctgccaccagtgtgcgcagcagctccagggccagcagttctacagtctggagggggcgccgtactgcgagggctgttacactgacaccctggagaagtgtaacacctgcggggagcccatcactgaccgcatgctgagggccacgggcaaggcctatcacccgcactgcttcacctgtgtggtctgcgcccgccccctggagggcacctccttcatcgtggaccaggccaaccggccccactgtgtccccgactaccacaagcagtacgccccgaggtgctccgtctgctctgagcccatcatgcctgagcctggccgagatgagactgtgcgagtggtcgccctggacaagaacttccacatgaagtgttacaagtgtgaggactgcgggaagcccctgtcgattgaggcagatgacaatggctgcttccccctggacggtcacgtgctctgtcggaagtgccacactgctagagcccagacctgagtgaggacaggccctcttcagaccgcagtccatgccccattgtggaccacccacactgagaccacctgcccccacctcagttattgttttgatgtctagcccctcccatttccaacccctccctagcatcccaggtgccctgacccaggacccaacatggtctagggatgcaggatccccgccctggggtctggtcctcgcccatcctgcagggattgcccaccgtcttccagacaccccacctgaggggggcaccaggtttagtgctgctgctttcactgctgcacccgcgccctcggccggccccccgagcagcctttgtactctgcttgcggagggctgggagaccctccaggacattcccaccctcccccatgctgccaagttgtagctatagctacaaataaaaaaaaaccttgttttccagaaaaaaaaaaaaaaaaaaaaa

SEQ ID NO: 1348 - DNA, 2689 bp, Homo sapiens
cggaggagcagcgagtcaagatgagagttcagccgcggcggcagcagcagcagactggaaaagtaagaagagctttcctgcctttttaattaccaaactactctcagttttcaatgaatcagttcaaagaaagaatgcagtctttctatacctgactcaagaatgaacaatccgtcagaaaccagtaaaccatctatggagagtggagatggcaacacaggcacacaaaccaatggtctggactttcagaagcagcctgtgcctgtaggaggagcaatctcaacagcccaggcgcaggctttccttggacatctccatcaggtccaactcgctggaacaagtttacaggctgctgctcagtctttaaatgtacagtctaaatctaatgaagaatcgggggattcgcagcagccaagccagccttcccagcagccttcagtgcaggcagccattccccagacccagcttatgctagctggaggacagataactgggcttactttgacgcctgcccagcaacagttactactccagcaggcacaggcacaggcacagctgctggctgctgcagtgcagcagcactccgccagccagcagcacagtgctgctggagccaccatctccgcctctgctgccacgcccatgacgcagatccccctgtctcagcccatacagatcgcacaggatcttcaacaactgcaacagcttcaacagcagaatctcaacctgcaacagtttgtgttggtgcatccaaccaccaatttgcagccagcgcagtttatcatctcacagacgccccagggccagcagggtctcctgcaagcgcaaaatcttctaacgcaactacctcagcaaagccaagccaacctcctacagtcgcagccaagcatcaccctcacctcccagccagcaaccccaacacgcacaatagcagcaaccccaattcagacacttccacagagccagtcaacaccaaagcgaattgatactcccagcttggaggagcccagtgaccttgaggagcttgagcagtttgccaagaccttcaaacaaagacgaatcaaacttggattcactcagggtgatgttgggctcgctatggggaaactatatggaaatgacttcagccaaactaccatctctcgatttgaagccttgaacctcagctttaagaacatgtgcaagttgaagccacttttagagaagtggctaaatgatgcagagaacctctcatctgattcgtccctctccagcccaagtgccctgaattctccaggaattgagggcttgagccgtaggaggaagaaacgcaccagcatagagaccaacatccgtgtggccttagagaagagtttcttggagaatcaaaagcctacctcggaagagatcactatgattgctgatcagctcaatatggaaaaagaggtgattcgtgtttggttctgtaaccgccgccagaaagaaaaaagaatcaacccaccaagcagtggtgggaccagcagctcacctattaaagcaattttccccagcccaacttcactggtggcgaccacaccaagccttgtgactagcagtgcagcaactaccctcacagtcagccctgtcctccctctgaccagtgctgctgtgacgaatctttcagttacaggcacttcagacaccacctccaacaacacagcaaccgtgatttccacagcgcctccagcttcctcagcagtcacgtccccctctctgagtccctccccttctgcctcagcctccacctccgaggcatccagtgccagtgagaccagcacaacacagaccacctccactcctttgtcctcccctcttgggaccagccaggtgatggtgacagcatcaggtttgcaaacagcagcagctgctgcccttcaaggagctgcacagttgccagcaaatgccagtcttgctgccatggcagctgctgcaggactaaacccaagcctgatggcaccctcacagtttgcggctggaggtgccttactcagtctgaatccagggaccctgagcggtgctctcagcccagctctaatgagcaacagtacactggcaactattcaagctcttgcttctggtggctctcttccaataacatcacttgatgcaactgggaacctggtatttgccaatgcgggaggagcccccaacatcgtgactgcccctctgttcctgaaccctcagaacctctctctgctcaccagcaaccctgttagcttggtctctgccgccgcagcatctgcagggaactctgcacctgtagccagccttcacgccacctccacctctgctgagtccatccagaactctctcttcacagtggcctctgccagcggggctgcgtccaccaccaccaccgcctccaaggcacagtgagctgggcagagctgggctgccagaagcctttttcactctgcagtgtgattggactgccagccaggttaataaactgaaaaatgtgattggcttcctctcgccgtgttgtgagggcaaaggagagaagggagaaaaaaaaaaaaaaaccacacacacccatacacacataccagaaaaagaaagaaaggatggagacggaacatttgcctaattttgtaataaaacactgtcttttcaggattgcttcatggattggagaactttctaaccaaaaattaaaaaaaaaaaaaaaaaa

SEQ ID NO: 1349 - DNA, 786 bp, Homo sapiens
tcttctgcgacggcgcggacctggagcttccgcgcggtggcttcactctcctgtaaaacgctagagcggcgagttgttacctgcgtcctctgacctgagagcgaaggggaaagcggcgagatgactgaccgctacaccatccatagccagctggagcacctgcagtccaagtacatcggcacgggccacgccgacaccaccaagtgggagtggctggtgaaccaacaccgcgactcgtactgctcctacatgggccacttcgaccttctcaactacttcgccattgcggagaatgagagcaaagcgcgagtccgcttcaacttgatggaaaagatgcttcagccttgtggaccgccagccgacaagcccgaggagaactgagactctgccttaccaccgcagtgcggggcacctctcccagcgtttctccggtttgccaatcctcttaagtattcctgtctccaaaggaccggctctccatggctcctgcgcctcgtgctttccgcgtacagaagtgcttgcccggggagtcccgcctgacctgccttcatgtggacccttagaacagcactgggagaccagcaggactcctgagaactgtgctggtggagaggtcctagagccggcgagcgtttgagaagagggcatggcgctggagtgagatgggatttggcgtctcgtttttggctaattgattgtcattggctttttccataaagtttagaaatcgttcagtcaaaaaaaaaaaaaaaaaaaaaaaaaaaaaaaaaaaaaaaaaaaaaaaaa

SEQ ID NO: 1350 - skipped

SEQ ID NO: 1351 - DNA, 3976 bp, Homo sapiens
ttttttttttttttttgcttaaaaaaaagccatgacggctctcccacaattcatcttccctgcgccatctttgtattatttctaatttattttggatgtcaaaaggcactgatgaagatattttctctggagtctccttctttctaacccggctctcccgatgtgaaccgagccgtcgtccgcccgccgccgccgccgccgccgccgccgcccgccccgcagcccaccatgtctcgccgcaagcaaggcaaaccccagcacttaagcaaacgggaattctcgcccgagcctcttgaagccattcttacagatgatgaaccagaccacggcccgttgggagctccagaaggggatcatgacctcctcacctgtgggcagtgccagatgaacttcccattgggggacattcttatttttatcgagcacaaacggaaacaatgcaatggcagcctctgcttagaaaaagctgtggataagccaccttccccttcaccaatcgagatgaaaaaagcatccaatcccgtggaggttggcatccaggtcacgccagaggatgacgattgtttatcaacgtcatctagaggaatttgccccaaacaggaacacatagcagataaacttctgcactggaggggcctctcctcccctcgttctgcacatggagctctaatccccacgcctgggatgagtgcagaatatgccccgcagggtatttgtaaagatgagcccagcagctacacatgtacaacttgcaaacagccattcaccagtgcatggtttctcttgcaacacgcacagaacactcatggattaagaatctacttagaaagcgaacacggaagtcccctgaccccgcgggttggtatcccttcaggactaggtgcagaatgtccttcccagccacctctccatgggattcatattgcagacaataacccctttaacctgctaagaataccaggatcagtatcgagagaggcttccggcctggcagaagggcgctttccacccactccccccctgtttagtccaccaccgagacatcacttggacccccaccgcatagagcgcctgggggcggaagagatggccctggccacccatcacccgagtgcctttgacagggtgctgcggttgaatccaatggctatggagcctcccgccatggatttctctaggagacttagagagctggcagggaacacgtctagcccaccgctgtccccaggccggcccagccctatgcaaaggttactgcaaccattccagccaggtagcaagccgcccttcctggcgacgccccccctccctcctctgcaatccgcccctcctccctcccagcccccggtcaagtccaagtcatgcgagttctgcggcaagacgttcaaatttcagagcaacctggtggtgcaccggcgcagccacacgggcgagaagccctacaagtgcaacctgtgcgaccacgcgtgcacccaggccagcaagctgaagcgccacatgaagacgcacatgcacaaatcgtcccccatgacggtcaagtccgacgacggtctctccaccgccagctccccggaacccggcaccagcgacttggtgggcagcgccagcagcgcgctcaagtccgtggtggccaagttcaagagcgagaacgaccccaacctgatcccggagaacggggacgaggaggaagaggaggacgacgaggaagaggaagaagaggaggaagaggaggaggaggagctgacggagagcgagagggtggactacggcttcgggctgagcctggaggcggcgcgccaccacgagaacagctcgcggggcgcggtcgtgggcgtgggcgacgagagccgcgccctgcccgacgtcatgcagggcatggtgctcagctccatgcagcacttcagcgaggccttccaccaggtcctgggcgagaagcataagcgcggccacctggccgaggccgagggccacagggacacttgcgacgaagactcggtggccggcgagtcggaccgcatagacgatggcactgttaatggccgcggctgctccccgggcgagtcggcctcggggggcctgtccaaaaagctgctgctgggcagccccagctcgctgagccccttctctaagcgcatcaagctcgagaaggagttcgacctgcccccggccgcgatgcccaacacggagaacgtgtactcgcagtggctcgccggctacgcggcctccaggcagctcaaagatcccttccttagcttcggagactccagacaatcgccttttgcctcctcgtcggagcactcctcggagaacgggagcttgcgcttctccacaccgcccggggagctggacggagggatctcggggcgcagcggcacgggaagtggagggagcacgccccatattagtggtccgggcccgggcaggcccagctcaaaagagggcagacgcagcgacactttctccaacctctttctaggttcttcacacacccccattcggcgtagtacccagagagctcaagatgtgtggcagttttcggatggaagctcgagagcccttaagttctgagaaaatttgaagcccccaggggtggggtggacgcgtgccgcccagtcgacgtcagcgtggtctgtcatcctgctagtttgtgatgttttctgacagtagcctccaagaagccgttgtgcgaagacagagtcctgcagagtccttccagcctaggcctgcagcgccattttatttatattttttaataaaaagtaaaaacaaaaaaacagacccacattggaacagtgaatcagtcccatagagagggcccgtggaccatcgctgtcatgagtgatgccctggcccttctgaaaccagccaacctaattacctgtattgtggaaatgcgcatgagtccccaaccccttgtttctatacattctatgttgtcttttaaaaagtgtgcttaacattgacacaataaatgttggagctttaggtggtgtttgcttgttctttaatttttaatgcttataagacaatgaggctgcttatgattttgtacttctgtacctgtttcctacagacacccatcgggtgggtaggaggaacagatttgagaaatgggcaggagatgtaggaggggaactaggttaccgcttatcagatggcataaattttcaaggagaatcaaaatgcaaaacttgggaataaatcatagcaatatcataattaatgtagtagtaatattgctgtttattaatgctgaagtgtggttttcctaactgtctgacttataatttgcataccattaaataatgcataatatggcacgccgaatcctgtttttcaaatatatgcttttggtggctaccatgcaggatttgaatttgtcttttaatttagcttaggaaagaacatcactgggcgagcggtaaatcctaaagaaggtgataaatgtcagtagtttcttattaaatattctaattttaggttcccaaaccttcaggaaatatatcttaatgcagacaaacaaacataaaacttctttagtacttacatcaggaaatttggggcagattttagaggggggaaattataggaggaaagaagttcacatcagaacagacaatcacagcaatgctctattccttagaaattagtgccacaaataagttacatctacaaacaggtggtaaaaattctttctggcccagttaatttgcacagaacttttctcagtttggtattttttactgcttggagatccagaagagaattagaaacaacatagcaaattaaaataggtttgtcaataatagagctcagacacctgtgtgctgtagattcacatacaggccgtgaacctaagtggggaaaatcctacctatccaccttctggctagattacctagcttagtgaaaagatagccaaataattggcatgtgaattatttcctgcttattcataataaataatgactgtcta

SEQ ID NO: 1352 - DNA, 1665 bp, Homo sapiens
ccggaggagtcacgtagctctgcgacatccgcagcctcatttaccagagggagccagggctgcagcctcatctgtttgcggatcagaacccgagctgtgcttgtggctgcggctgctaactggctgcgcacagggagctgtcaccatgcctcactcgtacccagccctttctgctgagcagaagaaggagttgtctgacattgccctgcggattgtagccccgggcaaaggcattctggctgcggatgagtctgtaggcagcatggccaagcggctgagccaaattggggtggaaaacacagaggagaaccgccggctgtaccgccaggtcctgttcagtgctgatgaccgtgtgaaaaagtgcattggaggcgtcattttcttccatgagaccctctaccagaaagatgataatggtgttcccttcgtccgaaccatccaggataagggcatcgtcgtgggcatcaaggttgacaagggtgtggtgcctctagctgggactgatggagaaaccaccactcaagggctggatgggctctcagaacgctgtgcccaatacaagaaggatggtgctgactttgccaagtggcgctgtgtgctgaaaatcagtgagcgtacaccctctgcacttgccattctggagaacgccaacgtgctggcccgttatgccagtatctgccagcagaatggcattgtgcctattgtggaacctgaaatattgcctgatggagaccacgacctcaaacgttgtcagtatgttacagagaaggtcttggctgctgtgtacaaggccctgagtgaccatcatgtatacctggaggggaccctgctcaagcccaacatggtgaccccgggccatgcctgtcccatcaagtataccccagaggagattgccatggcaactgtcactgccctgcgtcgcactgtgcccccagctgtcccaggagtgaccttcctgtctgggggtcagagcgaagaagaggcatcattcaacctcaatgccatcaaccgctgcccccttccccgaccctgggcgcttaccttctcctatgggcgtgccctgcaagcctctgcactcaatgcctggcgagggcaacgggacaatgctggggctgccactgaggagttcatcaagcgggctgaggtgaatgggcttgcagcccagggcaagtatgaaggcagtggagaagatggtggagcagcagcacagtcactctacattgccaaccatgcctactgagtatccactccataccacagcccttggcccagccatctgcacccacttttgcttgtagtcatggccagggccaaatagctatgcagagcagagatgccttcacctggcaccaacttgtcttcctttctctcttcccttcccctctctcattgctgcacctgggaccataggatgggaggatagggagcccctcatgactgagggcagaagaaattgctagaagtcagaacaggatggctgggtctccccctacctcttccagctcccacaattttcccatgatgaggtagcttctccctgggctctccttcttgcctgccctgtctcctgggatcagagggtagtacagaagccctgactcatgccttgagtacataccatacagcaaataaatggtagcaaaacattctaaaaaaaaaaaaaaa

SEQ ID NO: 1353 - DNA, 1444 bp, Homo sapiens
ggagaaggggtggggcagggtatcgctgactcagcagcttccaggttgctctgatgatatattaaggctcctgaatcctaagagaatgttggtgaagatcttaacaccacgccttgagcaagtcgcaagagcgggaggacacagaccaggaaccgagaagggacaagcacatggaagccagcccagcatccgggcccagacacttgatggatccacacatattcacttccaactttaacaatggcattggaaggcataagacctacctgtgctacgaagtggagcgcctggacaatggcacctcggtcaagatggaccagcacaggggctttctacacaaccaggctaagaatcttctctgtggcttttacggccgccatgcggagctgcgcttcttggacctggttccttctttgcagttggacccggcccagatctacagggtcacttggttcatctcctggagcccctgcttctcctggggctgtgccggggaagtgcgtgcgttccttcaggagaacacacacgtgagactgcgtatcttcgctgcccgcatctatgattacgaccccctatataaggaggcactgcaaatgctgcgggatgctggggcccaagtctccatcatgacctacgatgaatttaagcactgctgggacacctttgtggaccaccagggatgtcccttccagccctgggatggactagatgagcacagccaagccctgagtgggaggctgcgggccattctccagaatcagggaaactgaaggatgggcctcagtctctaaggaaggcagagacctgggttgagcagcagaataaaagatcttcttccaagaaatgcaaacagaccgttcaccaccatctccagctgctcacagacgccagcaaagcagtatgctcccgatcaagtagatttttaaaaaatcagagtgggccgggcgcggtggctcacgcctgtaatcccagcactttggaggccaaggcgggtggatcacgaggtcaggagatcgagaccatcctggctaacacggtgaaaccctgtctctactaaaaatacaaaaaattagccaggcgtggtggcgggcgcctgtagtcccagctactctggaggctgaggcaggagagtagcgtgaacccgggaggcagagcttgcggtgagccgagattgcgctactgcactccagcctgggcgacagtaccagactccatctcaaaaaaaaaaaaaccagactgaattaattttaactgaaaatttctcttatgttccaagtacacaatagtaagattatgctcaatattctcagaataattttcaatgtattaatgaaatgaaatgataatttggcttcatatctagactaacacaaaattaagaatcttccataattgcttttgctcagtaactgtgtcatgaattgcaagagtttccacaaacact

SEQ ID NO: 1354 - DNA, 1567 bp, Homo sapiens
ggtgcgcggggaggtggagggcgaggggcggggctacctcaggtcccgcccgcggcaggcctgtgggctgcgaggaggagctttgcctagcttgcaggcagcgcagggcagacggcggcaggagaagcaagatgaatgcaggctcagatcctgtggtcatcgtctcggcggcgcggaccatcataggttccttcaatggtgccttagctgctgttcctgtccaggacctgggctccactgtcatcaaagaagtcttgaagagggccactgtggctccggaagatgtgtctgaggtcatctttggacatgtcttggcagcaggctgtgggcagaatcctgttagacaagccagtgtgggtgcaggaattccctactctgttccagcatggagctgccagatgatctgtgggtcaggcctaaaagctgtgtgccttgcagtccagtcaatagggataggagactccagcattgtggttgcaggaggcatggaaaatatgagcaaggctcctcacttggcttacttgagaacaggagtaaagataggtgagatgccactgactgacagtatactctgtgatggtcttacagatgcatttcacaactgtcatatgggtattacagctgaaaatgtagccaaaaaatggcaagtgagtagagaagatcaggacaaggttgcagttctgtcccagaacaggacagagaatgcacagaaagctggccattttgacaaagagattgtaccagttttggtgtcaactagaaaaggtcttattgaagttaaaacagatgagtttcctcgccatgggagcaacatagaagccatgtccaagctaaagccttactttcttactgatggaacgggaacagtcaccccagccaatgcttcaggaataaatgatggtgctgcagctgtcgttcttatgaagaagtcagaagctgataaacgtgggcttacacctttagcacggatagtttcctggtcccaagtgggtgtggagccttccattatgggaataggaccaattccagccataaagcaagctgttacaaaagcaggttggtcactggaagatgttgacatatttgaaatcaatgaagcctttgcagctgtctctgctgcaatagttaaagaacttggattaaacccagagaaggtcaatattgaaggaggggctatagccttgggccaccctcttggagcatctggctgtcgaattcttgtgaccctgttacacacactggagagaatgggcagaagtcgtggtgttgcagccctgtgcattgggggtgggatgggaatagcaatgtgtgttcagagagaatgaattgcttaaactttgaacaacctcaatttctttttaaactaataaagtactaggttgcaatatgtgaaatcagaggaccaaagtacagatggaaaccatttcctacatcacaaaaacccaagtttacagcttgtactttactttaatgtgtaatactcaactcaaggtacaagacaattgcatttaacattgttataaataaaaggaacatcagatcaatcattaaaaaaaaaaaaaaaaaa

SEQ ID NO: 1355 - DNA, 1403 bp, Homo sapiens
gggaagaaaagggaattccaacctgtggaaccttggggggtccccggggtcggcgccttcccattgactgtgggcggtgcaagggacggagcctctggcggctcgtgggggtgttggggtccgcagggggagggaggggagtgtcagagtgtgagcggggtacgggaattccaaatttgagggcctcccggctctggcgccggggagggagagctcaggccgccatgcgggacaggacccacgagctgagacagggggatgacagctcggacgaagaggacaaggagcgggtcgcgctggtggtgcacccgggcacggcacggctggggagcccggacgaggagttcttccacaaggtccggacaattcggcagactattgtcaaactggggaataaagtccaggagttggagaaacagcaggtcaccatcctggccacgccccttcccgaggagagcatgaagcaggagctgcagaacctgcgcgatgagatcaaacagctggggagggagatccgcctgcagctgaaggccatagagccccagaaggaggaagctgatgagaactataactccgtcaacacaagaatgagaaaaacccagcatggggtcctgtcccagcaattcgtggagctcatcaacaagtgcaattcaatgcagtccgaataccgggagaagaacgtggagcggattcggaggcagctgaagatcaccaatgctgggatggtgtctgatgaggagttggagcagatgctggacagtgggcaaagcgaggtgtttgtgtccaatatcctgaaggacacgcaggtgactcgacaggccttaaatgagatctcggcccggcacagtgagatccagcagcttgaacgcagtattcgtgagctgcacgacatattcacttttctggctaccgaagtggagatgcagggggagatgatcaatcggattgagaagaacatcctgagctcagcggactacgtggaacgtgggcaggagcacgtcaagacggccctggagaaccagaagaaggcgaggaagaagaaagtcttgattgccatctgtgtgtccatcaccgtcgtcctcctagcagtcatcattggcgtcacagtggttggataatgtcgcacattgttggcactaggagcaccaggaacccagggcctggccttctctcccagcagcctggggggcagggcagagcctccagtcggaccccttcctcacactggcccctatgcagaagggcagacagttcttctggggttggcagctgctcattcatgatggcctcctccttcaggcctcaatgcctgggggaggcctgcactgtcctgattggccgggacacacggttttgtaaaaaattaaaaaacaaaaaaagagcataaaaaaaaaaaaaaaaaa

SEQ ID NO: 1356 - DNA, 2500 bp, Homo sapiens
ctttgcagctgagactgggtggagggagaggcgcggagacactggggctctgacgagctggctgaggccctctcagtaggggggtcacgcctcctggaactcagggaccccaagtttctgtgcattcagggcggggctggccccatgccctgtgcataggggcctggctgcatcccagtcgatcagccagaggcagcagcagtggactcatcaattgtggaggaagccctggggaccctggggaccttgccgactctattcccagccagctcctaggacaagcctcagagccaacacccgctcgaccctctcccggcccctccccttctttgtcttttgcagatgatcgccgggtgtcgatccttttccctccagtcagggccaggcgtggacgccgccggaccgctgagactcggggcacggtgaagcactggccggggtctggctgggtctggcgctcgggagccagatggaggtggcgataggggccatgggagccggcgccaagtagccggtggacccccgcgctcgcacctctcccggcgcccgggcgctccccaaggctgccatggaggtgcctaacgtcaaggacttccagtggaagcgcctggcgccactgcccagccgccgggtctactgctccctgctggagaccgggggccaggtctatgccatcgggggatgtgacgacaacggcgtccccatggactgcttcgaggtctactccccggaggccgaccagtggaccgccttgccccggctgcccacagcccgggcgggggtggccgtcaccgccctggggaagcggatcatggtgattgggggcgtgggcaccaatcagctgcccctgaaggtcgtggagatgtacaacatcgatgagggcaagtggaagaagaggagcatgctgcgtgaggccgccatgggcatttctgtcacggccaaagattaccgagtatatgcggcaggcgggatgggcctggacctacgtccacacaaccacctccaacactatgacatgctgaaggacatgtgggtgtccctagcacccatgcccaccccgagatatgctgccacctccttcctccgaggctccaagatctacgtgctggggggacgacagtccaagtacgcggtcaacgccttcgaggtctttgacatcgagactcgctcctggaccaagtttcccaacattccctataagcgggccttctccagctttgtgaccctggacaaccacttgtacagcctaggaggcctgcggcaaggtcgcctctaccggcagcccaagttcctgcggacgatggacgtgttcgacatggaacaggggggatggctgaagatggaacgatcgttcttcctcaagaagcggcgggcagattttgtggctggctctctgagtggacgggtcatagtggctgggggacttgggaatcaacccactgtcctggagacggcggaagcattccacccagggaagaacaaatgggagatcctccctgccatgcccacaccccgctgtgcctgctccagcatagtcgtcaagaactgcctcctcgccgtgggaggtgtcaaccagggtctgagtgacgcagtggaggccctgtgtgtctctgactcctagctgtctctgggctcagtacctttgccctggaccatatcacttcactcttaacatgaggaatgatcttgtccaagcagtcggggctacttccaagaatgtcagctcctgttagcaaccagtggagtctggccttggggctctaagttgacctctctatagctccaaatcctaccaatctcagaaaactgtaagaggcacagatgactccaccagctgcagagctgactctgaagagagtcttcacttactgcacaggcaaagaaaggcacaggaatatttcctacctctccctcctgtgagtcccacctccccccacccccatctccaggaggcaggtagagcagttctgaccgagaggatagactgctgttgctgtctttccccagctctgaactagttttaaggtagcttaggatgaaaaatggagaatgattgggggttccaaaccactttcttctcccttggcttatatctcttcaccatttggtggtcaactgtgggcctaccctggacctcatctactcagcgagaattggacatgaagctagaggcagctgccttggaagggaagtcaggctcacttggacagcccaggccatggcaggaagaatcccttcctcttggggtccttgatgggcatgtgtgatggggaaggagcagtctcccagccctgggtctgctccccacatctctcctaattccacttcaccttttgccaccccctccccaccagaggcctagcccttttgtcaccgaaggcccccagagtgtttctgtgtgaaaccctctcatttacactgtggcatcaaaatccacaaaagatggattaattgcactctggttaatagcagcagcacaatgattaaaatctatattcct

SEQ ID NO: 1357 - DNA, 5355 bp, Homo sapiens
ggccggggctgtcgcgggttggggcggttgggctggcagctgaggctcgtggccatggagtggggttctgagtcggctgctgtgaggcggcaccgcgtcggagtagagcgtcgagagggagcggcggccgcgccaccgccggagagggaggcccgagcgcaggagcctctggtggatgggtgcagcggcggcgggaggacgcggaagaggagccccgggggtagcggcggcgcgagcaggggcgcggggaccgggctgtctgaggtgcgcgccgcgctggggctcgcgctctacctgatcgcgctgcggacgctggtgcagctctcgctgcagcagctcgtgctacgcggggccgctggacaccgcggggagttcgacgcgctccaagccagggattatcttgaacacataacctccattggccccaggactacaggaagtccagaaaatgaaattctgaccgtgcactaccttttggaacagattaaactgattgaagtgcaaagcaacagccttcataagatttcagtagatgtacaacggcccacaggctcttttagcattgatttcttgggaggttttacaagctattatgacaacatcaccaatgttgtggtaaagctggaacccagagatggagcccagcatgctgtcttggctaattgtcattttgactcagtagcaaactcaccaggtgccagtgatgatgcagttagctgctcagtgatgctggaagtccttcgcgtcttgtcaacatcttcagaagccttgcatcatgctgtcatatttctctttaatggtgctgaggaaaatgtcttgcaagccagtcatggtttcattactcagcacccctgggctagcttgattcgtgcattcattaacctagaggcagcaggtgtaggagggaaagaacttgtattccaaacaggtcctgaaaatccttggttggttcaagcttatgtttcagcagctaaacacccttttgcttctgtggtggctcaggaggtttttcagagtggaatcattccttcagatactgactttcgtatctacagggattttgggaacattccaggaatagacttagcttttattgagaatggatacatttatcacaccaagtatgacacagcggacagaattctaacagattccattcagagagcaggtgacaacattttagcagttcttaagcatctagctacatctgatatgctggctgctgcttctaagtatcgacatggaaacatggtcttctttgatgtgctgggcctgtttgtcattgcctacccctctcgtattggctcaatcataaactacatggtggtaatgggtgttgttttgtacctgggcaaaaaatttttgcagcccaaacataagactggtaactacaagaaggacttcttgtgtggacttggcatcactttgatcagctggttcactagccttgttaccgttctcattatagcagtgttcatctctcttattggacagtctctctcatggtataaccacttctatgtctccgtttgtctgtatggaactgcaactgtagccaaaataatacttatacatactcttgcgaaaagattttattacatgaatgccagtgcccagtatctgggagaagtattttttgacatttcgctgtttgtccattgctgttttcttgttaccctcacttaccaaggactttgctcggcgtttattagtgctgtctgggtagcattcccattgctcacaaagctctgtgtgcataaggacttcaagcagcatggtgcccaaggaaaatttattgctttttaccttttggggatgtttattccttatctttatgcattgtacctcatctgggcagtatttgagatgtttacccctatcctcgggagaagtggttctgaaatcccacctgatgttgtgctggcatccattttggctggctgtacaatgattctctcgtcctattttattaacttcatctaccttgccaagagcacaaaaaaaaccatgctaactttaactttggtatgtgcaattacattcctccttgtttgcagtggaacattttttccatatagctccaatcctgctaatccgaagccaaagagagtgtttcttcagcatatgactagaacattccatgacttggaaggaaatgcagttaaacgggactctggaatatggatcaatgggtttgattatactggaatttctcacataacccctcacattcctgagatcaatgatagtatccgagctcactgtgaggagaatgcacctctttgtggttttccttggtatcttccagtgcactttctgatcaggaaaaactggtatcttcctgccccagaagtttctccaagaaatcctcctcatttccgactcatatccaaagaacagacaccttgggattctataaaattgacttttgaagcaacaggaccaagccatatgtccttctatgttcgagcccacaaagggtcaacactttctcagtggtctcttggcaatggcaccccagtcacaagtaaaggaggagactactttgtcttttactcccatggactccaggcctctgcatggcagttctggatagaagtgcaggtttcagaagaacatcctgaaggaatggtcaccgtggccattgctgcccactatctgtctggggaagacaagagatcccctcaactggatgctctgaaggaaaagttcccagattggacatttccctctgcctgggtgtgcacctacgatctctttgtattttaatcttgtggatgagctctaagtacatgcccagtggatactccatgtgacatggtttctccctatgttacgtggatgtttgtaacgtaagtcaatgaattttaatgatcatatgttcaaagagctttctgggttaacgcttttcagggccaagcactataagggtttagctgtggcgcagtgatgcatggcctgttgacacttgaaaatgccagtcttttggcacttcagcacatgtgggtactgccactacacacacgtcattttatatgaccttaaggacaaagccaacaatccacttcaatagctgcccctttaggatcaagaaagatgtacactgtcagagcattgttaatgagacaaaagttgtttccaatttaagccccaaaaccatttgttgtattagtggatggtgggtaaaatatcattcactgaggtaatgattccccttgagaatataactctgtgtaggtcactggaaagtgattgccatagggctgggagagaagcattgcactcttgaggctgtagcctgtgtcaagctgtttcttcaggcagcctctcaaatgtgctttgtctctctgtgctgaggcctggaccctgtgctgagctggtgactcactgtcctgacaagtggacacacagatgcactgctgtgctgctttcctgaggtggttttctatgcctgttttcctctgaaacatgtctgttacccctctccatcttaccaagttgaaaaggggaatatttggccacatacccctctggttttcgtaggttcttttggttcagaatattgtttgtgccagtacatgaccttaacttccttcctcagagcactgagctgccatctgggctattctggggtagaaggaaggctgggagtggtgggaattttataaatatttattctcttttctttgtttcataggagtcttgtgttatacaaggttagtccttcatggtataatcttactgatgcactgggcctatctttttgttttccagccagttgaatagattagtttttctcagtaacttactatccagcagactggctttcctgagacttgaggttgtggcttatactggaatgagaccactgtacgtgtaggtggttcagatcctgcgtaatggcagcatgaggacttaaaaggtggttttcattttgaagatggctatgtagcttgtaaggtgtatcacagcagtacctctcatggctttttggttccagcagtgagggcattggtgagatcaatggtaaactgtgcaagctttctttttatcattaggaaatgtgaaacgttggacaaattttgagttttaacaaggacaaaaagttgaaagaaaaggcacagttaacaaaaaagggtggctagatttatcttgggtgatggaggaaatgagagaggaatgctcttgaaaggtggtctgtggatctgtctgaatagaaagagcacagtaagtatgcattgccggagaaaacgtccttgaagctgcttgtctcatgtgtatgatgtgctttttaaatcatgcccctcgttgcctgcctaatctgtgactccctaaaaactaactgggcccatgtagatggggctgcaaccagagctgaataacatgttaggctcacacatgcatcagcactgcacactggaatcattgctcttcctggactttgtagaaatcagtctcaagtgcttcaagagtctggctcctgctacttttatctgtcaggtagcacataaggtttgcagggtttatattttgtatagaatcacagttgtggagaaaaagtaataatttctcaatgaattttaaaaatgggcctattttctatccccgtggttcatctgatataattagtgttccctgtgaattccccccctctatgggaaggatgcctttactctttatcagtaataaattatgactgttttcatattgccttagggttatttccctgtgtaaaccattgtcttttgttttggttttctttagcattatgaagctttggtattgtacaaggtcagtagtaagatgctcactagtctcagggcttgtgtaatattctgggaggtcatttaaatgccagaaatggtcaagcaattatacacagtatttatgactctgttaagcataccgtttgtctgtcacattagtagattctgagattaaaaaaaatttttaaagagtgatcatttaaataatttctaaaagggtcttttcaagctctaacaaagtcactaacaaatgcattattttctacagaattagatgttagtagtacagtactgcatattcagggaaaaagtgtgaggaattgatttcaaaatagttcgttcttgtgtttgacctaagaatgattgtcgcatgaagtgtttgtttttacagtttagcatatataaacaaacatgataggattccttaagatgttaccacccagggggccacaagccagcctgctgtctcaggaagctgtagaaggagtgtttgtcaatttcttgtcactggtttgctgacttactgaggattaattgttgccttacaatgttactgaaataaactgtttaatataaaaaaaaaaaaaaa

SEQ ID NO: 1358 - DNA, 4504 bp, Homo sapiens
agtcagacccaggaggagtgaggtcaattgccctttagtcccaggactaaccggaagcttctgcaacaggaggacattgaaaataagatggaacccatccacataaggatttgcctcaaagggcactgcaaaaattgaacagaggaatcccaaggaagctgcctgaatttgcctgtatactctcgttctgcgacttataaaggaccagacaaatcaaattagtggttttggtttccgccagctgtggatgcctttgacattatgaccgcagaggattccaccgcagccatgagcagtgactcggccgccgggtcctccgccaaggtgcccgagggcgtggcgggcgcgcccaacgaggcagcactgctggcgctgatggagcgcacgggctacagcatggtgcaagagaacgggcagcgcaagtacggcggcccaccgcccggctgggagggcccgcacccgcagcgtggctgcgaggtcttcgtgggcaagatcccgcgcgacgtgtacgaggacgagctggtgcccgtgttcgaggccgtgggccgcatctacgagctgcgcctcatgatggactttgacggcaagaaccgcggctacgccttcgtcatgtactgccacaagcacgaggccaagcgcgcagtgcgtgagctcaacaactacgagatccgcccgggccgcctgctcggcgtgtgctgcagcgtggacaactgccgcctcttcatcggcgggatccccaagatgaagaagcgcgaggaaatcctggaggagattgccaaggtcaccgagggcgtgctggacgtgatcgtctacgccagcgcggccgacaagatgaagaaccgcggcttcgccttcgtggagtacgagagccaccgcgcggctgccatggctcgccgcaagctcatgcctggccgcatccagctgtggggccaccagatcgccgtggactgggccgaacctgagatcgacgtggacgaggacgtgatggagaccgtgaagatcctctacgtgcgcaacctcatgatcgagaccaccgaggacaccatcaagaagagcttcggccagttcaaccccggctgcgtggagcgcgtcaagaagatccgcgactacgccttcgtgcacttcaccagccgcgaggatgccgtgcatgccatgaacaacctcaacggcactgagctggagggctcgtgcctggaggtcacgctggccaagcccgtggacaaggagcagtactcgcgctaccagaaggcagccaggggcggcggcgcggctgaggcagcgcagcagcccagctacgtgtactcctgcgacccctacacactggcctactacggctacccctacaacgcgctcattgggcccaacagggactactttgtgaaagtagccatccctgccattggggctcagtattccatgtttccagcagctccagcccctaaaatgattgaagatggcaaaatccacacagtggagcacatgatcagccccattgctgtgcagccagacccagccagtgctgctgccgccgcagccgcggccgcagccgccgcagccgctgtcattcccactgtgtcgacgccaccacctttccagggccgcccaataactccagtatacacggtggctccaaacgttcagagaattcctactgccgggatctacggggccagttacgtgccatttgctgctccagctacagccacgatcgccacactacagaagaacgcggcagccgcggccgccatgtatggaggatacgcaggctacatacctcaggccttccctgctgctgccattcaggtccccatccccgacgtctaccagacatactgaggctggtgaccagcacgaagacagaccacacaaacaccactgaaggaacgcttgactatttatgaagaaggaacatgttggattcacacatgcaacctgaaagtgaagaatgttagcagatttatttctgaattattttatatacatgaagttttcactagttttttaagactattttcaacttagcatgcctacgttcatacatttccaaaagacttgcaatggttcgtgccttcattccatcttttaaaaatttgtatgctgtactacatttgtatagaggtttttgttgttgtttttttaaggatatattttcagtatgaaggttattttcttaacttctgcactccagagatttctattttgtagtaccttcaataatatatcaactatatattaaaaaagcacacttgaggagctagggaactattttgaaaaatatatacaatatttaaagatacaaacagtagtgcttaaaaatactacataaagcattattttaaaggttatactggaaagtgcaattttaaaatgagtaaaacctctgtatttctgctggcattaagggttgatggtgttaccatgtatcatcatggcggtactattttttaaaagaaattaaacactggatctctccttaagccaacattgaaaagacttgccgcacttctgagtccaaacactggaaagctctcctttgccaccgttagccggggctcattctccatgtgccttagccttaaacatgcccccactcccacatctctcaccctgtcccctcctccccagattcccaatcccaccgcaatgtttggcaagcctaggactgataagtagctctgatagaggagctggtggcttttatacttcttcctgggtttttgttggggtttgttgtttcgttgttttttgtttttttttttgtttggttggggaagtattgtcttctacgtgtgctattttcagtagcagagtaagcacaaggttttaatcgagttgcataagacacctttgcatagctatttaattgcccaatgtaaaactttaatgccatttctaatgcttttattcatttttgaagtatgagtttgtagggacaaagaatgtatgttatcgtagacaagacccccagagactcttttcagcagaaagttatgcttctagttgccttaccatgtttcttgcaaaactgtccatggtcctcaagggtgttggaaacattatgtttattaaatgggcctctcttcctttgctgtgcacttgatgggtgaactggattggggtgtgcacatccaggaggaggaggagagacctgtagaagtttaaagatagtttgtaaatatcttctaatgcttgtttttagtccttttatgttggagaagttcatggtatgtagtttaatgcaaaatgaaaccattttatttcaatgttattaaaaaggtttgttttattaggaagttaatgtattgttgcagtgttttgtgcctgtttaaaggcttttgtttagcagagtgaatgtaaaatacagtaaaatgttaagattgtcatctactttttaaaaaaaaatatcaacttggaattgttttttaaaggctcaatcaaggaagtgaggtgtgcaataaggtagcaagtaaaacgcagttgcgtttttatgtcatgttagagatccatacaattttccactcacgggatttttgttgatggctgaattcttgtggattcataagaggatcatgcccttagcaagtacttttgttttgttttaaattaagagattcccaaatgcctttttccccctcatcttgaaatgagatgagtttttatgtgtaagcaatatttatttaactattctataaaattattgagtgcctactgaggcctttaagcaccgctaacattcctttccatcattcttttaaatgacataaaataattgtgcaatgttcctgatgatgtaccccacaagctgcattcaaactcaaatctgtgggaatgagtgactcgacaaaatgtaattcggatcagatcctcatcccctgactgtgtgaaaaaagtactctccttctagtgaaggattgtcacagagtttcactggatgaaactatgacccagtattcttactgtattttacatatgcctgtaaattatttgcaaaaaagaagaagaagaggaagaaagaaaagaaagaaaagaaagaaagaaagaaagaaagaaagaaagaaagaaagaaagaaagaaagaaagaaagaaaaagaaagaaagaataaaaaaaaatgataacatggcaaccaccaaactcccttaaaaacaaacattggtgacatggccaattaagtatcagtgagcctcctatctgggacttatctgttcctattgtttcaaaaccatttcatgtacactactgaggtaagtttataacttgaaatgtgaactttttttttttttagtgttaagaacaaactatataaatgtaaaaaaaaagttttagagttctgttttcaaacattgctagtggtttagttaactttagctgctttatatttgaaaagcttttatttagatcttgctccatttacagtacattcttaggatgtatgtagtaaataaagctttctttaaagcaatcgcaagaccttattttaaattgtgaaaaaaaaaaaaaaaaaaa

SEQ ID NO: 1359 - DNA, 2198 bp, Homo sapiens
ggcggggcgatctggagtaggaggtgtgaccggagggcgaaattggggcttcctctgctctggtgacccagaaccgtcaactgaaatgaccctgtctgtgtagtactccggcaggatgggcctcggagcgtaaaggcggcaaaaacaaaaatattaaaaaaaaggagagagggacaaaaaaaagaaaacccgaaagtttcagctgcattgctgcggaacgttttttagccagaaggcgaaagaagaaatcggaagtgacgtcgcggccaaaacaagcccgggcttggaggcctgtactgaagctggcctcagatgggaaggcccgactcgctgtctgctgtcgtcggtggtcgcgagaccttgcactctcaccgggtcggcctccagcccctgtgcccgggatccgctcgccgcggatgagcgagagtttcttcctgggacttttcgggcacagctggccggtggcgacagaacggactttctttcctgcaagagtctcccctccagcgggagacagcgggctcctgtctcgggacgctgggacacctgtcgcctatttttaaatatccagattccaagaacacactggatactgctcttacaaaaccaagaggaaatcatgaagaaatgttttagttattgaaactacagttgaaatcatggatacatcaacaaatctggatattggagcccagcttatcgtggaagagtgtcccagcacttatagcctaactggcatgccagacattaaaatagaacatccactggacccaaattcagaagaagggtcagctcagggtgttgccatgggaatgaaattcatattgcctaaccgatttgatatgaatgtgtgttctcgatttgtgaagtccttaaatgaagaagatagtaaaaatattcaagatcaggttaactctgacctggaggtggcatctgtcctatttaaagctgaatgcaatatccatacatctccttctccgggaattcaagtaaggcatgtctacaccccctctacaacaaagcatttctcacccataaaacagtcaaccactttaaccaacaaacacagaggaaatgaggtctctaccacacctctgttagcaaattctttgtctgttcaccagttggctgctcagggagagatgctctatctggctactcgtatcgaacaagaaaatgttatcaatcacacggatgaagaaggatttactcctctgatgtgggctgcagcacacgggcaaatagctgtggtagagttcctacttcagaatggtgctgatccccaacttttaggaaaaggtcgagaaagtgcactgtcgttggcctgtagtaaaggctacacagatattgtcaaaatgctgcttgattgtggagttgatgtaaatgaatatgattggaatggaggaacacctctgctttatgctgtacatggaaatcatgtgaaatgtgtaaagatgctcttagaaagtggggctgatccaacaattgaaactgactctggatataattctatggatctagctgtagccctaggctatagaagtgttcaacaggttattgagtcacatttgttgaagctgcttcaaaatatcaaggagtagacacagtcatcagaaaatgtctgcccttttgtttacttcttggtccttataaatgatagttttgtttacttataaatttttacctcagttgcaatatttactggtttttagtaggttttaataaatatttctctgagtaattcactggtttataataaatgtaatactctttttataactatgttttactgtatatttaaaattataaattaatgttttcgtggcatgtaaatttttatggtacagatagttatcatcagtctttgtatcaagtgctgtaatttgacattttcagaaattattctaccctagtcatcttcactcgtgtattaagtcattcactttatatagggtttgctataaatccctagaaaaaaattgttcttattgttgaataaaaaagtgcacagtgtgattgtttacaaaatgatattataaataaataaaatacttcttctgtcagtttgcatactacttttttaagtatataagattattaaagatttctttcagatttttaatttcacccttctgtcctgccgtaacacttcattagatcaaacaatatatgtaattaaaataaactgaatctaagtc

SEQ ID NO: 1360 - DNA, 3266 bp, Homo sapiens
ggcttccggttccgccacggcccagaggctgtgttgaggctaatggcggtgcccacggaactggatggagggagtgttaaggagaccgcagcggaagaggaatcgcgagttctggcacctggcgccgccccgttcggaaattttcctcattattctcgcttccaccctccggagcaacggctccgcctcctgcccccggagctgcttcgacagctctttcctgagagtcccgagaacgggccgattctggggctcgacgtggggtgtaactccggggatctgagtgtggctctatacaaacacttcctctccctacctgacggggaaacctgctcagatgcctcaagagaattccgtctcctctgctgcgacatagatccagtcctggtgaagcgagccgaaaaagaatgtccttttcctgatgccttgacttttatcaccctggacttcatgaatcaaaggacccggaaggttctcttgagctctttcttaagccaatttggacgttcagtttttgacattggcttctgcatgtcaataaccatgtggattcatctgaatcatggagaccatggcctatgggagttcctggcccatctttcctccctctgccactacctccttgtggagccccaaccctggaagtgttaccgggcagctgcaaggcgtctccgaaagctgggactccatgattttgaccacttccactcccttgccatccgaggtgacatgcccaatcagattgtgcagatcttgacccaggatcatggcatggaattaatatgttgctttggcaacaccagttgggacagaagccttctgctcttcagggcaaaacaaaccatagagactcatccaatccctgaatcactgatagaaaaagggaaagaaaagaacagattaagtttccagaagcagtgagatgggagggcaagaagaccaagaaagatattgaaagggttttatattgagaattatgttcattctccttaattccttaacaatcaggcagccgcaaaacctggcaggagcttttggtaaaatgtccaaggcacataattgaaagaatcagtatctgttccccattgtttggaacaaatcttgaggagaatgaatctgtggagtgatgagctaggatatctggattgagatggcctaggaaaagtggtcctggttatgggttatggagagggctgcttttggggattatttataaagatcagactaggctagtcttaaaatatgtcagttcctgggctctctgaatcctacctggtttcttcaggcttctggacttgctaggcctgcctttgggcaaaaccttagtaattcaggtctggaatggggcttaggaatctattttctgtttttttgtttgtttgtttttgcattcttctattgtaatatatacataaaatttaccattttaaccgtttttaagtacagtttttcagaacgtggaaatcccatcaaaaattggattaaaaaattaaaagataaattgataatttttttaaaagtatacaattttgtgatattaagtacatttcacaatgaggcatctatttttaacagctcccccagatgattctgaggcaagcagaggtagaccatactttgagtgcttacggttccattcagtccttctctatgtatttttcctggggtgagttcttccctatggttttaacaactacctacatgcggccgggcgcggtggctcacgcctgtaatcgcagcactttgggaggccgaggcgggtggatcacgaggtcaggagatcgagaccatcccggctaaaacggtgaaaccccgtctctactaaaaatacaaaaaattagccgggcgtagtggcgggcgcctgtagtcccagctacttgggaggctgaggcaggagaatggcgtgaacccgggaggcggagcttgcagtgagccgagatcccgccactgcactccagcctgggcgacagagcgagactccgtctcaaaaaaaaaaaaaaaaaaaacaaaaaaaaaaacaactacctacatgcttatggtccccaaatatattggtagcccgacatccacagttccagactagcatttttcctgttttgtcattatatcccttagttcttaggtacatcagaatcaacagatctcaaaagcaagctcactaccctcattcaaaacctagtcctatctcatttgatagtaatcattgcttatgctagaaacctcagttgattttctcacttacactcccccacattgaaatgctctcaaagtccagcagcaaattctatcaattacatgtaagtttcattccatacatgtgtccggtgcctggtgggaggttcctatattaaagtcatctaccttccatccattgtctgccttacagccacagtttactcatctgtacaacgaaataacaccactttccttttcctatgcccaaatgagctaaggatgtgaaggtattttgcagaatatagagtgataaagaaaaataaggtgctattacactgtgtgagcatgccgcagaccacaactgcacttgttagactggaggcttatgagaaaaacatctcaccttgtagaaaacatgcatcttactatctctgataacttgtttttcaggatgatgaagtaataaggagtccagcttcagtgctacagagcattttaaaggaagcagtgttgggagggagggatatggaactaatggaaatgaggctagtttatgatggtctcagttatcacagtagatacagagctgagtttacccacaagatcttaatttaggaacactttgaaaccctgtaaccctgctgggtgctctctcctctcactccaccaaggcagcgcacagaaacatacatggggctgtggtaggatgaataatggtcccccaagatgtccacctcctttagcaaaaggggctttgcaaatgagattgaggatcttcagatagggagattaatctggatgatcagaatataccctaagtgcaatcatcagtgttcttataatagggaggcagagggagagctgaccacagtaggagatgtaatgacaaaagcaagaggttggagtgatatgaagaagggctgcaagtcaaggaatgcaggtggcttctagaagttagaaaaagcaagaaaatgtattctcccctgaagcctccagaaggaacagccctgccaacaccttgatttcagatttaatctccagagctgtaagagaataaatcagtattttaaaccaaaaaaaaaaaaaaaaaa

SEQ ID NO: 1361 - DNA, 4550 bp, Homo sapiens
acaacagtgagctcagagacttgagggaggcgctgcgactgacaagcggctctgcccgggaccttctcgctttcatctagcgctgcactcaatggaggggcgggcaccgcagtgcttaatgctgtcttaactagtgtaggaaaacggctcaacccaccgctgccgaaatgaagtataagaatcttatggcaagggccttatatgacaatgtcccagagtgtgccgaggaactggcctttcgcaagggagacatcctgaccgtcatagagcagaacacagggggactggaaggatggtggctgtgctcattacacggtcggcaaggcattgtcccaggcaaccgggtgaagcttctgattggtcccatgcaggagactgcctccagtcacgagcagcctgcctctggactgatgcagcagacctttggccaacagaagctctatcaagtgccaaacccacaggctgctccccgagacaccatctaccaagtgccaccttcctaccaaaatcagggaatttaccaagtccccactggccacggcacccaagaacaagaggtatatcaggtgccaccatcagtgcagagaagcattgggggaaccagtgggccccacgtgggtaaaaaggtgataacccccgtgaggacaggccatggctacgtatacgagtacccatccagataccaaaaggacgtctatgatatccctccttctcataccactcaaggggtatacgacatccctccctcatcagcaaaaggccctgtgttttcagttccagtgggagagataaaacctcaaggggtgtatgacatcccgcctacaaaaggggtatatgccattccgccctctgcttgccgggatgaagcagggcttagggaaaaagactatgacttcccccctcccatgagacaagctggaaggccggacctcagaccggagggggtttatgacattcctccaacctgcaccaagccagcagggaaggaccttcatgtaaaatacaactgtgacattccaggagctgcagaaccggtggctcgaaggcaccagagcctgtccccgaatcacccacccccgcaactcggacagtcagtgggctctcagaacgacgcatatgatgtcccccgaggcgttcagtttcttgagccaccagcagaaaccagtgagaaagcaaacccccaggaaagggatggtgtttatgatgtccctctgcataacccgccagatgctaaaggctctcgggacttggtggatgggatcaaccgattgtctttctccagtacaggcagcacccggagtaacatgtccacgtcttccacctcctccaaggagtcctcactgtcagcctccccagctcaggacaaaaggctcttcctggatccagacacagctattgagagacttcagcggctccagcaggcccttgagatgggtgtctccagcctaatggcactggtcactaccgactggcggtgttacggatatatggaaagacacatcaatgaaatacgcacagcagtggacaaggtggagctgttcctgaaggagtacctccactttgtcaagggagctgttgcaaatgctgcctgcctcccggaactcatcctccacaacaagatgaagcgggagctgcaacgagttgaagactcccaccagatcctgagtcaaaccagccatgacttaaatgagtgcagctggtccctgaatatcttggccatcaacaagccccagaacaagtgtgacgatctggaccggtttgtgatggtggcaaagacggtgcccgatgacgccaagcagctcaccacaaccatcaacaccaacgcagaggccctcttcagacccggccctggcagcttgcatctgaagaatgggccggagagcatcatgaactcaacggagtacccacacggtggctcccagggacagctgctgcatcctggtgaccacaaggcccaggcccacaacaaggcactgcccccaggcctgagcaaggagcaggcccctgactgtagcagcagtgatggttctgagaggagctggatggatgactacgattacgtccacctacagggtaaggaggagtttgagaggcaacagaaagagctattggaaaaagagaatatcatgaaacagaacaagatgcagctggaacatcatcagctgagccagttccagctgttggaacaagagattacaaagcccgtggagaatgacatctcgaagtggaagccctctcagagcctacccaccacaaacagtggcgtgagtgctcaggatcggcagttgctgtgcttctactatgaccaatgtgagacccatttcatttcccttctcaacgccattgacgcactcttcagttgtgtcagctcagcccagcccccgcgaatcttcgtggcacacagcaagtttgtcatcctcagtgcacacaaactggtgttcattggagacacgctgacacggcaggtgactgcccaggacattcgcaacaaagtcatgaactccagcaaccagctctgcgagcagctcaagaccatagtcatggcaaccaagatggccgccctccattaccccagcaccacggccctgcaggaaatggtgcaccaagtgacagacctttctagaaatgcccagctgttcaagcgctctttgctggagatggcaacgttctgagaagaaaaaaaagaggaaggggactgcgttaacggttactaaggaaaactggaaatactgtctggtttttgtaaatgttatctatttttgtagatattttatataaaaatgaaatattttaacattttatgggtcagtcaactttcagaaattcagggagctggagagggaaatctttttttttccccctgagtggttcttatgtatacatagaagtatctgagacataaactgtacagaaaacttgtccacgtgcttttgtatgcccatgtattcatgtttgtttgtagatgtttgtctgatgcatttcattaaaaaaaaaaccatgaattacgaagcaccttagtaagcaccttctaatgctgcattttttttgttgttgttaaaaacataccagctggttataatattgttctccacgtccttgtgatgattctgagcctggcactcccaaatctgggaagcatagtttatttgcaagtgttcaccttccaaatcatgaggcatagcatgacttattcttgtttggaaaactcttttcaaaactgaccatcttaaacacatgatggccaagtgcccaaaagccctcttgcggagcaaatttcagaatatatatgtggatccaagctctgatagttcaggtgctggagggaagagagacctgtgtgtttagaggccaggaccacagttaggattgggttgtttcaatactgagagacagctacaataaaaggagagcaattgcctccctggggctgttcaatcttctgcatttgtgagtggttcagtcatgaggttttccaaaagatgtttttagagttgtaaaaaccatatttgcagcaaagatttacaaaggcgtatcagactatgattgttcaccaaaataggggaatggtttgatccgccagttgcaagtagaggcctttctgactcttaatattcactttggtgctactacccccattacctgagggaaactggccaggtccttgatcatggaactatagagctaccaggacatatcctgctctctaagggaatttattgctatcttgcaccttctttaaaactcacatatgcagacctgacactcaagagtggctagctacacagagtccatctaatttttgcaacttcctgtggccagtgtgtataaccccttccactatctcacagatagtcacagcgtccattccatagtctgtctcctcacatctgttagtattgacacagcacagacaccacaagccatcaggttcttcatggggcaggtgaaatacttctaccccatgggtaaatgtattcacatattaccaagagaagaagcacattatctatgatcttttggcccagttcttatttagcatttttattccagcctacttggaaacatgtttttatttgcaatatatgcctgactgaattaagcttgcttgttttaaacaaccaaatcattggaacagaaaaggatttaaaaaacaagaatgcatgatctcagagtgattaaaaaaaaatcagtggaaataaatgatcatagaaggtgcttttcaaaacaactgctattataattctcaaagtcctactctgccaaaagaagattaaaagtcatacattacattacaaggaaatgttcatgtgggaagagggttgctgaaaatcaacaacgcttgaagttaaaaagtgtgtctttgtagatttcattgtataatgtgtatttcttaggagatggctgacttgattgatctacgctaagtggagacatttcacatttttaaaaccaaatgttcaatctgtattactctttgccgtcttgtatgtagaggctatttttaaatcattaaatttttagatctctgttttcataaaaaaaaaaaaaaa

SEQ ID NO: 1362 - DNA, 3164 bp, Homo sapiens
atgccggtcttagcccctctgtagggaaagagggtccgccatgttccccggcggcgccgccgcttggctctggtagccgccgcccccgcccccaaccccgcccggcccagagcctagccgagccccgggcccagcatggccgccccggagccggcccgggctgcaccgcccccacccccgcccccgccgccccctcccggggctgaccgcgtcgtcaaagctgtccctttccccccaacacatcgcttgacatctgaagaagtatttgatttggatgggatacccagggttgatgttctgaagaaccacttggtgaaagaaggtcgagtagatgaagaaattgcgcttagaattatcaatgagggtgctgccatccttcggagagagaaaaccatgatagaagtagaagctccaatcacagtgtgtggtgacatccatggccaattttttgatctgatgaaactttttgaagtaggaggatcacctgctaatacacgatacctttttcttggcgattatgtggacagaggttattttagtatagagtgtgtcttatatttatgggttctgaagattctatacccaagcacattatttcttctgagaggcaaccatgaatgcagacaccttactgaatattttacctttaagcaggaatgtaaaattaagtattcggaaagagtctatgaagcttgtatggaagcttttgatagtttgcctcttgctgcacttttaaaccaacagtttctttgtgttcatggtggactttcaccagaaatacacacactggatgatattaggagattagatagattcaaagagccacctgcatttggaccaatgtgtgacttgttatggtccgatccttctgaagattttggaaatgaaaaatcacaggaacattttagtcacaatacagttcgaggatgttcttatttttataactatccagcagtgtgtgaatttttgcaaaacaataatttgttatcgattattagagctcatgaagctcaagatgcaggctatagaatgtacagaaaaagtcaaactacagggttcccttcattaataacaattttttcggcacctaattacttagatgtctacaataataaagctgctgtattaaagtatgaaaataatgtgatgaatattcgacagtttaactgttctccacatccttactggttgcctaattttatggatgtcttcacgtggtctttaccgtttgttggagaaaaagtgacagaaatgttggtaaatgttctgagtatttgctctgatgatgaactaatgactgaaggtgaagaccagtttgatggttcagctgcagcccggaaagaaatcataagaaacaaaattcgagcaattggcaagatggcaagagtcttctctgttctcagggaggagagtgaaagtgtgctgacactcaagggcctgactcccacagggatgttgcctagtggagtgttagctggaggacggcagaccctgcaaagtgccacagttgaggctattgaggctgaaaaagcaatacgaggattctctccaccacatagaatctgcagttttgaagaggcaaagggtttggataggatcaatgagagaatgccacctcggaaagatgctgtacagcaagatggtttcaattctctgaacaccgcacatgccactgagaaccacgggacgggcaaccatactgcccagtgacccactacttcccagggactctcacatctcgggccccaaatggacagatcacccgaggagctggaggggtcggccaagctgactgtaaatttcacagtctctctgaagaaaccattgtgcttctgagaccctagcccccttcctggatggaggcttgagggccctgggacatgtgctatctgataagattgggtcatcgctgccaaggtggagagcagtgagcaaggggcttggggcaatttccagtggagggcatccacacctccattttatgcttgtggttcacacatttaagtttacaaatcagatttcttttccccttcagtagaattagattttgtttttcaatcatgatttcaaatgcaatcctaagagctaatgtggacttttctttttccatgaaatgtctttaaaggatgaattagcatggtcttaaaatacatttctgaggttactagctgtattttgaattgtgagcaaaatgccgagaaacccagttggcatttatacaaaatgttgacctcaggtctatagttcttaaatgtggctaattctgtaacatagtcttggtattttttaattatgaatgcatatcctatttccaggcaggctctcttacttgaacacaaatccaaaaactaatttagagtcttttttgcccagatcttttaagacttacaccccagagatttaagaagaaaacctctaaatttcaaaattatgaagaattacagaattactcatttaaggtactttaaaagaagtttgtacattgtcaaagtaaattttaattcaaatcatgtctgtaaaacttgacgtattttgtgtatgcatgttttcattttgcaaatatttaatatatagacctatgatgtacaggtacgacatgtataggttacctagatgttatgagaaattttagtttattgtgagtactcaagttgcttagagagccaccagggtgatttgctgctggctttctatcatttttatgttttaatgcaaaggaaattttaaaatgttctggaagtgtttttgattaagcaatgcagcctagaagcaatggttctgttcaatcattcagatgttagtggaagcataaaagtcaagactgcatgttgaaacctttcttttgatagttactgaactgcttggttaaactaaatggaaccatgtgctaatttttcacaattattgacctgtattgattgccactgtagtttggtatttccctttactttggtggcctgcttccctcatgccctggaatacaactcagagctccaggcagcggaaccatctattgttttgtttgccagaaagtgcaccctgtatggtctcctgtctaagttggaaatattatgcatgtgcaggactattcgagtattttataaacagtagcacacaataaattccatgcatgggccgctgctcctaaaaaaaaaaaaaaaaaa

SEQ ID NO: 1363 - DNA, 770 bp, Homo sapiens
cgagagccgggtgcacgcgccggggaggtagccaacagccgttgggacgcgacgctggttcccaggggagagccagccgctgccgcggcactggttcagacggccaggccctagggacccaccatggatcctgaacacgccaaacctgagtcatccgaggcaccttcagggaacttgaaacaaccggagactgccgcagccctgagtcttatcttaggagcattagcttgtttcatcatcacccaagccaatgagtcatttataacaatcacaagtctggaaatctgcattgtcgttttttttattctaatatatgtgctaacccttcaccacttgctgacctatttacattggcccttacttgatcttaccaacagtatcattacagctgtgttcctttcagtagttgccatcttggccatgcaagaaaagaaaagaaggcatttactctatgtcggggggcggtaatcgtgtgttgcatcgatgcgtttgtggtcaccacgaagatgaggaccaacttgaaaagattcctgggagtcgaagttgaaaggaagctttcccccgccaaggacgcctaccccgaaaccggccccgacgccccgcagaggcccgcctgaagccagcccggcgccctagcagatgcacgtgtctgtcgaatcgctgcctccgagcccacccccgagctcgcatgctgtcacccattccagcctaaatgtgaccataaaattagggctgctgcttttatcgagaaaaaaaaaaaaaaaaaaaaa

SEQ ID NO: 1364 - DNA, 1592 bp, Homo sapiens
ggattttgcttccgggtcgtaggcgctagctctgggcgcagaggtttctgggagccaagagtggtaatggcgtctgtatgatcttcggagcctgctgcatcggacctcggccagtcataaaagatgacaacagcagccaggccaacctttgaacctgccagaggtggaaggggaaaaggagaaggtgatttgagccaactttcaaagcagtattcaagcagagacctaccctctcatacaaagataaaatacagacagactactcaggatgcccctgaagaggttcgtaaccgtgacttcaggagagagttggaagaaagagagagagctgctgcaagagagaaaaatagggatcgtccaacccgagaacatacaacctcctcttcagtgtcaaaaaagccacggttagaccagattcctgccgccaaccttgatgcagatgaccctctaacagatgaggaagatgaagattttgaagaagaaagtgatgatgatgatactgcagctcttcttgcagaactggaaaaaattaaaaaagaaagagctgaagagcaggccaggaaggaacaagaacaaaaagctgaagaagagaggattcgtatggaaaacattctgagcggaaaccctctccttaatctcactggcccatcccagcctcaggccaacttcaaagttaaaagaaggtgggatgatgacgttgtcttcaagaactgtgcaaaaggtgtagatgaccagaagaaagacaaaagatttgtaaatgacacactgcgatctgaatttcacaaaaagttcatggagaaatatattaaatagtacagttttatgtgcttaattaaagactgtaaaacgtaaaggatcattctgactttttttatgagttttttttttcttttcccctgtctaaattgtgtgtgggcttccccagttttaaactcctatctttttctttagtgataccttacttgataatggacttgggaataggtttaacccagtttgcattctccaaatgtttccagtgatatgttttcctgggaaaagcaaatctgcctgtaataaatatttttaatctaaataaccaaatctgggtgcccaactttttgttggaatttatgctgctagtaatacattccataatatcttttgaaaagaaaaattaccattgtgtattgtgcttgtgcattaacttgtccttttccccctgtttctctcacatttaagatgagttaattcatattttctctgcattttttaaaagagtgtaatggaagatgagagggattctattttggaccacatgttggtgtggaggagtgtcattgacagtaagcaccccaggcgtgtgtctgggagagcattgggtatcgctcacttctgcaggtacttgtttttttttctcatggccgaagaggagagctctgtaagcattcttttaaagtatacggtactcacttgtgttctggatactcaactgccatgtttcctttgaaagagattgaatatgcacctgacatgcatttagtgcaaagcctgagaaagcttcaaacaatatataaaataaaacctttggaaataaaaaaaaaaaaaaaaaa

SEQ ID NO: 1365 - DNA, 1802 bp, Homo sapiens
agccttcaagtcggcccaaacacggtttctgcctcaaggattatttatataaccattgcttattggctgctggcaaacactcgctcttctcgttggctgaaactgtcgggagaagttctgcgaaggctgctccttgcggcgttgggactgagggtcacaggcacctgtatttccgtttccggttcgcctccggagccatggcggcggcactgaagtgtctactgacattaggaagatggtgccccggccttggagtggctccccaggcccgggcgctcgccgccttagtacccggagtgacccaggtagataacaagtccggtttcctgcagaagaggcctcatcgccagcaccctggcatcctaaagctgccgcacgtgcggctgccacaggcactggctaacggtgcccagttattgctacttgggagcgctgggcccactatggagaatcaggtgcaaacactgaccagttatctctggagcagacatttgcctgtagagccagaggagttgcaaagacgggctaggcatcttgagaaaaaattcctggaaaacccagacttatctcagacagaggagaaacttcgtggagcagtgctacacgcactacgtaaaactacctaccattggcaagaactgagctacactgagggactgagcctggtgtatatggcagcaagactggatggtggctttgcagcagtctccagagcattccatgagatccgggctcgaaatccagcatttcagccacaaactttgatggactttggctcaggtactggttctgtcacctgggctgctcacagtatttggggccagagcctacgtgaatatatgtgtgtggacagatcagctgccatgttggttttggcagaaaaactactgaaaggtggttcagaatctggggagccttatattccaggtgtctttttcagacagtttctacctgtatcacccaaggtgcagtttgatgtagtagtgtcagctttttccttaagtgaactgcccagcaaggctgaccgcactgaggtagttcaaaccttatggcgtaagacaggtcatttcctggtactggtggagaatggaacaaaagctgggcacagccttctcatggatgccagggatctggtccttaagggaaaagagaagtcacctttggaccctcgacctggttttgtctttgccccgtgtccccatgaactcccttgtccccagttgaccaacctggcctgtagcttctcacaggcgtaccatcccatccccttcagctggaacaagaaaccaaaggaagaaaagttctctatggtgatccttgctcgggggtctccagaggaggctcatcgctggccccgtatcactcagcctgtccttaaacggcctcgccatgtgcattgtcacttgtgctgtccagatgggcacatgcagcatgctgtgctcacagcccgccggcacggcaggtatggggggtgtgaccaaaatcagtgggatgtggcaggaagctgcagcccacgccagcatctgtttccacagggatttgtatcgttgtgcccgtgtcagctcctggggagatcttttacctgtgcttactccgtctgcgtttcctccatctacggctcaggatccctctgagagttgatgaggatgtgtaacaagtattttcttctatcgtgcctgccagggctgaagctgcctggtatccaggaggggaatgctggtatccccatatgtctgtgtttgtttgagatttttaataataaataataaatttttgaagaatggaaaaaaaaaaaaaaaaaa

SEQ ID NO: 1366 - DNA, 4653 bp, Homo sapiens
gtaccgggccgtggagcggcggctcctgtacccccggcgcggacctaaaggggctcgggccgctcgggccgggaatggcggcggcggccgagcccggggcccgcgcctggctgggcggcggctccccgcgccccggcagcccggcctgcagccccgtgctgggctcaggaggccgcgcgcgcccggggccggggccggggccgggacccgagcgggcgggcgtcagagccccgggccccgctgccgcgccgggacacagcttccggaaggtgacgctcaccaagcccaccttctgccacctctgctccgacttcatctgggggctggccggcttcctgtgcgacgtctgcaatttcatgtctcatgagaagtgcctgaagcacgtgaggatcccgtgcacgagtgtggcacccagcctggtccgggttcctgtagcccactgcttcggcccccgggggctccacaagcgcaagttctgtgctgtctgccgcaaggtcctggaggcaccggcgctccactgcgaagtgtgtgagctgcacctccacccagactgtgtgcccttcgcctgcagtgactgccgccagtgccaccaggatgggcaccaggatcacgacacccatcaccaccactggcgggaggggaacctgccctcgggagcgcgctgcgaggtctgcaggaagacgtgcggctcctctgacgtgctggccggcgtgcgctgcgagtggtgcggggtccaggcgcactccctctgctccgcggcgctggctcccgagtgtggcttcgggcgtctgcgctccctggtcctgcctcccgcgtgcgtgcgccttctgcccggcggcttcagcaagacgcagagcttccgcatcgtggaggccgcggagccgggcgaggggggcgacggcgccgacgggagcgctgccgtgggtccaggcagagagacacaggcaactccggagtccgggaagcaaacgctgaagatctttgatggcgacgacgcggtgagaagaagccagttccgcctcgtcacggtgtcccgcctggccggtgccgaggaggtgctggaggccgcactgcgggcccaccacatccccgaggaccctggccacctggagctgtgccggctgcccccttcctctcaggcctgtgacgcctgggctgggggcaaggctgggagtgctgtgatctcggaggagggcagaagccccgggtccggcgaggccacgccagaggcctgggtcatccgggctctgccgcgggcccaggaggtcctgaagatctaccctggctggctcaaggtgggcgtggcctacgtgtccgtgcgagtgaccccgaagagcacggcccgctctgtggtgctggaggtcctgccgctgctcggccgccaggccgagagtcccgagagcttccagctggtggaggtggcgatgggctgcaggcacgtccagcggacgatgctgatggacgaacagcccctgctggaccggctacaggacatccggcagatgtctgtgcggcaggtgagccagacgcggttctacgtggcagagagcagggatgtagccccgcacgtctccctgtttgttggcggcctgcctcccggcctgtctcccgaggagtacagcagcctgctgcatgaggccggggctaccaaagccaccgtggtgtccgtgagtcacatctactcctcccaaggcgcggtagtgttggacgttgcctgctttgcggaggccgagcggctgtacatgctgctgaaggacatggctgtgcggggccggctgctcactgccctggtgctccccgacctgctgcacgcgaagctgcccccagacagctgtcccctccttgtgttcgtgaaccccaagagtggaggcctcaagggccgagacctgctctgcagcttccggaagctactgaaccctcatcaggtcttcgacctgaccaacggaggtcctcttcccgggctccacctgttctcccaggtgccctgcttccgggtgctggtgtgtggtggcgatggcactgtgggctgggtgcttggcgccctggaggagacacggtaccgactggcctgcccggagccttctgtggccatcctgcccctgggcacagggaatgaccttggtcgagtcctccgctggggggcgggctacagcggcgaggacccgttctccgtactgctgtctgtggacgaggccgacgccgtgctcatggaccgctggaccatcctgctggatgcccacgaggctggcagtgcagagaacgacacggcagacgcagagccccccaagatcgtgcagatgagtaactactgtggcattggcatcgacgcggagctgagcctggacttccaccaggcacgggaagaggagcctggcaagttcacaagcaggctgcacaacaagggtgtgtacgtgcgggtggggctgcagaagatcagtcactctcggagcctgcacaagcagatccggctgcaggtggagcggcaggaggtggagctgcccagtattgaaggcctcatcttcatcaacatccccagctggggctcgggggccgacctgtggggctccgacagcgacaccaggtttgagaagccacgcatggacgacgggctgctggaggttgtgggcgtgacgggcgtcgtgcacatgggccaggtccagggtgggctgcgctccggaatccggattgcccagggttcctacttccgagtcacgctcctcaaggccaccccggtgcaggtggacggggagccctgggtccaggccccggggcacatgatcatctcagctgctggccctaaggtgcacatgctgaggaaggccaagcagaagccgaggagggccgggaccaccagggatgcccgggcggatgctgcgcctgcccctgagagcgatcctaggtaggggtggctggggcagcccaagggctcgagccatctctgctcccgccagccttgttttcaggtggtctggaggcagctccacgtccacacagtggccggccctgtggtcggacctggctacagccctgaccacagcatcttcccagtgacggagcgggacccgccctcatcccattggtgacacatgttggtgtcacagccctcatcccactggagactggtgtgcgggtggcagtgttaccccgtgtcccgggtgggcgcagggctctggatggtgagccctctgccctgtgggggcctggtcctctcctcaggggtgggcacccatccctctacccactgagccccttgagctggacagtgctggatgcaggccgtccaggtgggtctgatctcactttgtgcccctcgggccgtccccctggccagtccttcagagcagcaggctccctggtgtgtccctgccccagcagacacaggctgccagtccctccagcctcacctccccgccctgggcagcaggtgtgggcagcgtgtgaggctgccgggtggtggtgactggtgacttccttgtgttcagggaagggagaaggtgccttcccttgttttctggccttgttatatacagatggcagcttggatctcaggtacagctccaggggcaggcagtgcccagctggacctggtggccctttcctagtgcctctgcttggggaggagaacctctgtccacgtggaggctaggaggtctcaggtgctgccctggcagcaccagagtgtgggccgggcccgagtgtctgcccctcggccctcagggtggggcacttagcacccagaagggaccaaaagcagggcatggcggtgcagaggagtttgggaggtgtaaacagcccatgcacgtggaggaggagctggctttcagccccagaccccacgctagcactttccacgctgcttgcccgctgttgatgtgcagttcccagtgcctgtgtgagccgacatctgctcagtcctatccctcgtcagcgtgtggagacccagctcctgcagccctcctgctcccacgcccccagacagcttggtggagggtcctgcatctgggccaggctggggtgcacccagccaaagacaaagctgcctccacgtgcccaaggattcagatggtgcactggccccgggaggagtctgaccaaaaatggagcccgctctgtggggaagccccgactcccccacgagaaacggtcccacggtgcggatctcccccttcccttgtggggcacagctggcctgggcctccaatcctgcggagctttcctgggtgtggctttgacctcagaagtggctctggtttggcctcaggagtgtggcctggcccagcctgctgcagcctcctggggggcccttgatgccactaatcccccgaccccccgcatctgccaaactgcacagacacacgcattgtaaggccgcttgtggcctccagcgtgcactcttgtttacgtcattgtcatcttcaagaccagtcctttgtgattagttttgcttcgcgagccctggtgtggactgtggtctgtatgaatcgtgtgtaactgtggtgaggggcttgtcctgtatgtgagtctgtacccaggtggggtctgtgccctgcacaccgggcccctctgtatttatcgctgcctgaatgcaacagtaatttatatccaggacaaatacagtctgggcgtcactatcctaaaaaaaaaaaaaaaaaa

SEQ ID NO: 1367 - DNA, 1005 bp, Homo sapiens
ctccggggacgcctgcgccctgcctgtgagcgtgtggcgcccgctttccctgagccggcggggcagagcgcagggagctggaggtcggcgcttcctctcgtgcttggtccactgacgcgcggccccgccgcgaggagcatcagatccatgctgctgctgactcggagccccacagcttggcacaggctctctcagctcaagcctcgggtcctccctgggaccctgggaggccaggccctgcatctgaggtcctggcttttgtcaaggcagggccctgcagagacaggtgggcagggccagccccagggccctgggcttcgaacccggctgctgatcacaggcctgttcggggctggactcggtggggcctggctggccctgagggctgagaaggagaggctgcagcagcaaaagcgaacagaagccctgcgccaggcagctgtgggccagggcgacttccacctgctggatcacagaggccgggctcgctgcaaggctgacttccggggccagtgggtgctgatgtactttggcttcactcactgccctgacatctgcccagacgagctggagaagctggtgcaggtggtgcggcagctggaagcagagcctggtttgcctccagtgcagcctgtcttcatcactgtggaccccgagcgggacgacgttgaagccatggcccgctacgtccaggacttccacccaagactgttgggtctgaccggctccaccaaacaggttgcccaggctagtcacagttaccgcgtgtactacaatgcaggccccaaggatgaggaccaggactacatcgtggaccactccattgccatctacctgctcaaccctgacggcctcttcacggattactacggccggagcagatcggctgagcagatctcagacagtgtgcggcggcacatggcggctttccgcagtgtcctgtcttgagccactgcagtctgggccccatcattaaacgggctgcgtttaaaaaaaaaaaaaaaa

SEQ ID NO: 1368 - DNA, 2483 bp, Homo sapiens
tcgtcggagcgcggctcagcggcgcggcggagactcggcacggcggcggccaggcgcaggcgggcgggcggagcagcggacggcgccgaggccgccccacgcgccgggctcgcggcggcgcagcgcgccggagtggtcggggcccgcggccgctcgcgcctctcgatgggcagctcgcacttgctcaacaagggcctgccgcttgtaagactttgaccccgacgcaggcttcagtgattgccgcggatcagaagcctgagcactttggctcgagacaattaaggacgtgggatgaggctccgagacaggacgcggttctgcctggggatcctgaagataaaaagctttgaaaagtcgaattcatggtcgtggaagctgagcccatattaagagatgtcaggcgtccgacctccgatcatgaacgggcccctgcacccgcggcccctggtggcattgctggatggccgggactgcacagtggagatgcccatcctgaaggacgtggccactgtggccttctgcgacgcgcagtccacgcaggagatccatgagaaggtcctgaacgaggctgtgggggccctgatgtaccacaccatcactctcaccagggaggacctggagaagttcaaagccctccgcatcatcgtccggattggcagtggttttgacaacatcgacatcaagtcggccggggatttaggcattgccgtctgcaacgtgcccgcggcgtctgtggaggagacggccgactcgacgctgtgccacatcctgaacctgtaccggcgggccacctggctgcaccaggcgctgcgggagggcacacgagtccagagcgtcgagcagatccgcgaggtggcgtccggcgctgccaggatccgcggggagaccttgggcatcatcggacttggtcgcgtggggcaggcagtggcgctgcgggccaaggccttcggcttcaacgtgctcttctacgacccttacttgtcggatggcgtggagcgggcgctggggctgcagcgtgtcagcaccctgcaggacctgctcttccacagcgactgcgtgaccctgcactgcggcctcaacgagcacaaccaccacctcatcaacgacttcaccgtcaagcagatgagacaaggggccttcctggtgaacacagcccggggtggcctggtggatgagaaggcgctggcccaggccctgaaggagggccggatccgcggcgcggccctggatgtgcacgagtcggaacccttcagctttagccagggccctctgaaggatgcacccaacctcatctgcaccccccatgctgcatggtacagcgagcaggcatccatcgagatgcgagaggaggcggcacgggagatccgcagagccatcacaggccggatcccagacagcctgaagaactgtgtcaacaaggaccatctgacagccgccacccactgggccagcatggaccccgccgtcgtgcaccctgagctcaatggggctgcctataggtaccctccgggcgtggtgggcgtggcccccactggcatcccagctgctgtggaaggtatcgtccccagcgccatgtccctgtcccacggcctgccccctgtggcccacccgccccacgccccttctcctggccaaaccgtcaagcccgaggcggatagagaccacgccagtgaccagttgtagcccgggaggagctctccagcctcggcgcctgggcagagggcccggaaaccctcggaccagagtgtgtggaggaggcatctgtgtggtggccctggcactgcagagactggtccgggctgtcaggaggcgggagggggcagcgctgggcctcgtgtcgcttgtcgtcgtccgtcctgtgggcgctctgccctgtgtccttcgcgttcctcgttaagcagaagaagtcagtagttattctcccatgaacgttcttgtctgtgtacagtttttagaacattacaaaggatctgtttgcttagctgtcaacaaaaagaaaacctgaaggagcatttggaagtcaatttgaggtttttttttttgttttttttttttttgtatgttggaacgtgccccagaatgaggcagttggcaaacttctcaggacaatgaatccttcccgtttttctttttatgccacacagtgcattgttttttctacctgcttgtcttatttttagaataatttagaaaaacaaaacaaaggctgtttttcctaattttggcatgaacccccccttgttccaaatgaagacggcatcacgaagcagctccaaaaggaaaagcttgggcggtgcccagcgtgcccgctgcccatcgacgtctgtcctggggacgtggagggtggcagcgtccccgcctgcaccagtgccgtcctgctgatgtggtaggctagcaatattttggttaaaatcatgtttgtgactgtaaccatttgtatgaattattttaaagaaataaaaatcctggaaagagccagcgtg

SEQ ID NO: 1369 - DNA, 10491 bp, Homo sapiens
aacttgggcagaggtcaggggtcacgcgaggtcagtccgtcgggagggctagggagatggtcacgaaacctgaagtcaagagttaaggcttgttggcttctggtgtgattcccttcagtacggcggcaccgtggaagtgcagactttcacagggggtgtggtctcagctcacacaggtgctccagaggctggtggacctgagcggaggctgggacgccctggtgggccccgggccctggaaggcgggtcccggtggccggtggcccagaatgaggccagctcccagcatgccctgcagccggacgccagcccctcggccagcagtactggtgataacaacccagtcattcttcaggcatccaagggggagcctgggagtgggaccatgcagagcagcccctcccctgctcaccctcagctcccagtcctacagacacagatggtgtcggacggcatgacaggcagcaatcctgtgtcccctgcctcatccagttccccagcctctagtggggcaggcggcatctccccgcagcacatagctcaagattcctcactggatggacctccaggccccccagatggtgccacagtgcccctggaggggttcagcttatcccaggctgctgacctggctaacaagggcccgaagtgggagaagagccatgccgaaattgcagaacaggccaagcatgaggccgagatcgagactcggattgctgagctgcggaaggagggtttctggtcactgaagaggctgcctaaggtgccagagccccctcgccccaaaggtcactgggactatttgtgcgaagagatgcagtggctctctgctgactttgctcaggagcgccgttggaaacggggtgtggcccggaaggtggtgcgcatggtgatccggcaccacgaggagcagcggcagaaagaggaacgggcccggagggaggagcaggccaagctgcgtcgaattgcttccaccatggccaaggatgtcaggcagttctggagcaatgtggagaaggtggtgcaattcaagcaacagtcccggcttgaggaaaagcgcaaaaaagccctggacctgcatttggacttcattgtggggcaaactgaaaagtactcggaccttctgtctcagagcctcaaccagccattaacctccagcaaagcaggctcttccccttgcctcggctcttcctcagctgcctccagtcctccaccccctgcttctcgcctggatgatgaagatggggactttcaaccccaagaggatgaggaagaggatgatgaggaaacgattgaagttgaagaacaacaggaaggcaatgatgcagaggcccagaggcgtgagattgagctgcttcgccgtgagggagaattgccactggaagagctgctccgttcccttccccctcagctgttggaagggccttccagcccctctcaaaccccctcatctcatgatagtgacacccgagatgggcctgaagaaggtgctgaagaagagccccctcaggtgttggagataaagcccccaccctctgctgtcacacagcgcaacaaacagccttggcatccagatgaagatgatgaagagtttactgccaacgaagaggaagcggaggatgaagaggatactatagcagctgaggaacagttggaaggggaggtggatcatgccatggagctgagcgagttggctcgagaaggtgagctttccatggaggagctattgcagcagtatgcaggagcctatgccccaggctctgggagcagtgaagatgaggatgaagatgaggttgatgctaatagctctgactgtgaaccagaggggcccgtggaagcggaagagcctcctcaggaggatagtagcagtcagtcagactctgtggaggaccggagtgaggatgaggaagatgaacattcagaggaggaagaaacaagtggaagttcagcatcagaggaatctgagtctgaagagtctgaggatgcccaatcacagagccaagcagatgaagaggaggaagatgatgattttggggtggagtacttgcttgccagggatgaagagcagagtgaggcagatgcaggcagtgggcctcctactccagggcccactactctaggtccaaagaaagaaattactgacattgctgcagcagctgaaagtctccagcccaagggttacacgctggccacgacccaggtaaagacgcccattcccctgcttctgcggggccagctccgggagtaccagcacattgggctagactggctggttaccatgtatgagaagaagcttaatggcattcttgctgatgagatggggcttgggaagaccatccagaccatctctctgcttgcccacttggcttgtgagaaaggtaactggggtccccatttaatcattgttcccaccagcgtgatgttgaactgggagatggagttgaaacgttggtgccccagctttaaaatcctcacttactatggagcccagaaagagaggaagctcaagcggcagggctggaccaagcccaatgcctttcatgtgtgtatcacatcttacaagctggtgctgcaggaccaccaggccttccgtcgcaagaactggcgctatctcattctggatgaggcgcagaacatcaagaacttcaagtcacagcgctggcagtcactcctcaacttcaacagccagagacgcctgctcctgacaggaactcccttgcagaacagcctcatggagctgtggtccttgatgcactttttgatgccccatgtcttccagtctcatcgcgagttcaaggagtggttctctaatcccctaactggcatgattgagggcagccaagagtataatgaaggtctagtcaaacgcctccacaaggttttgaggccttttttactgcgccgagttaaggtggatgttgagaagcagatgcccaaaaagtacgagcatgttatccgctgcaggctctccaagcgtcaacgctgtctctatgatgacttcatggcacagaccacaactaaggagacactagccacaggccatttcatgagcgtcatcaacattttgatgcagctgagaaaagtttgcaatcatccaaatctgttcgaccctcgaccggttacctcccctttcatcaccccaggcatctgcttcagcaccgcctctctggtgctaagggccacggatgtccatcccctccagcggatagacatgggtcgatttgaccttattggcctggaaggtcgtgtctctcgatatgaggcagacacatttctgccccggcaccgcctctctcgccgggtactgttagaagtggctactgctcctgaccccccaccccggcccaagccagtcaagatgaaggtcaacaggatgctgcagccagtacctaagcaagaaggccggacagtggtggtggtgaacaacccacgggcgcccctgggccctgtcccagttcgacctcctccaggtcctgagctctcagcccagcccacccctggcccagtcccccaagtgctgccagcatcactgatggtttcagcctcacctgccgggcccccgcttattcctgcatctcggcctcctggccctgtcctcttgcctccactgcagcccaacagtggttctctcccccaggtgttgccatcccccctgggggtcctgagtgggacctcacggcctcccacgccaaccttgtccctaaagccaacaccacctgccccagttcgcctgagcccagccccacctccaggctcctctagcctgttgaagcccctgacagtgccaccaggctacaccttccctcctgctgctgccaccaccacttctaccaccacggcaactgctaccaccacagcagtgccagctccgactcctgcaccacagcgcctcattctatctcccgatatgcaggctcgcctgccctcaggcgaagtggtcagcatcgggcagttagcctcactggcacaacgtccagtggctaatgcagggggaagcaaacctctcaccttccaaatccagggcaacaagctgactttgactggtgcccaggtgcgccagcttgctgtggggcagccccgcccgctgcaaaggaatgtggtgcacctcgtgtcagcaggggggcagcaccatctcatcagccagcctgcccatgtggccctcatccaggccgtggccccgacccctggccctacccctgtctctgtgctgccttcttcgacccccagcaccacccctgcccctactggcctcagccttccgcttgctgctaaccaggtgccaccaaccatggtgaataatacaggcgtggtgaagattgtagtgagacaagcccctcgggatggactgactcctgttcctccattggccccagcaccccggcctccgagctctgggcttccagctgtgttgaatccacgccccacgttaacccctggccggctacccacacctactctgggtactgctcgagcccccatgcccacacccactctggtgaggcctcttctcaagctggtccacagtccttcacctgaagtcagtgcttcagcccccggagctgcccccttgaccatctcttctcctctccacgtgccatcctcactccctgggccagcctcttctccaatgccaattcccaactcctctccccttgctagtcctgtgtcctctacagtctcagttccattgtcatcttcactccccatctctgtccccaccacacttcctgccccagcctcggctccactcaccatccccatctcagcccccttgactgtttctgcttcgggcccagctctgttgaccagtgtgactccaccattggcacctgttgtcccagcggctcctggacctccctccttggcaccatctggtgcttccccgtcagcatcagccttgactctaggtttggccacagctccatccctgtcttcatctcagacacctggtcaccctctgttgttggctcccacctcttcacatgttccagggttgaactcaaccgtggccccagcatgctcacctgtcctggtgccagcttcggctctggccagtccttttccgtcagcaccaaatccagctccagctcaggcttcccttctggctccagcatcttctgcatctcaggctctagccacccctctggctcctatggcggctccacagacagcaattctggctccttctccagctcctcctctggctcctcttccggtcctggcaccatcgccaggtgctgctcctgtcctggcttcatcacagactccggttccagttatggctccatcgtctactccaggaacctctttagcctcagcttcaccggtaccagctccaacccctgtgttggctccatcatcaactcaaactatgctaccagccccggttccgtcacctctcccgagcccggcttctacgcagacactggccctagccccagctttagcacccactcttggaggctcatctccatctcagacactctctttgggaacggggaacccccagggaccctttccaactcagacattgtcattaactccagcatcatccctggtaccaactccagcccagacactgtctttggcaccaggaccaccactgggtccaactcagacgctgtctctggctccagcaccccctctggctccagcttctccagtgggcccagccccagctcacacgctgactttggctccagcatcgtcatctgcttcactcctggccccagcttcagtgcagacactgaccttgagccctgccccagttcctaccctgggcccggccgcagctcagaccttggcgctggccccagcctccacacagtccccagcttcccaggcatcttcccttgtggtttcggcatctggtgccgctcccttgcctgtcaccatggtatcccggctgcctgtttccaaggatgagcctgacacactgacattgcgctctggtccccccagccctccctccactgctacctcgtttggtggcccccggcctcgacgccagccccccccaccacctcgttcccctttttatctggactccctggaggaaaagcggaagcggcagcggtctgaacgcctggaacggattttccaacttagtgaggctcatggggccctggcacctgtgtatgggactgaagtcctggatttctgtaccctgccccaacctgttgccagccccatcggccctcgttctcctggccccagccaccccaccttttggacttataccgaggctgcccaccgggctgtactgtttccccagcagcgactagaccagctgtcagaaatcattgagaggttcatctttgtcatgcctcctgtggaggcacctcccccttccctgcatgcctgccacccacctccttggctggccccacgtcaggcagccttccaggagcaattggcctctgagctctggccccgggctcgtcctttgcaccgtattgtgtgtaacatgcgcacccagttccctgacttaagactcatccagtatgattgcggaaagttgcagacgttggcagtgctgttgcggcagctcaaggcagagggccaccgagtgctcatcttcacccagatgacccgaatgctggatgtattggagcagtttctcacctaccatggccatctctacctgcgcctggatggatctactagagttgaacagagacaggccttgatggaacggttcaatgcagacaaacgcatattctgcttcatcctttcaactcggagtgggggtgtgggcgtgaacctgacaggagcagacactgttgttttttatgacagcgactggaatcccaccatggatgctcaggcccaggaccgctgtcaccgaattggccagacccgggatgtccacatatataggcttatcagtgaacggacagtggaggagaacatcctaaaaaaggcaaatcagaagagaatgttgggggacatggccattgagggaggcaacttcaccacagcctatttcaaacagcagaccatccgagagctgtttgatatgcccctggaggaaccttctagctcatccgtgccctctgcccctgaagaggaggaagagactgtggccagcaagcagactcatattctggagcaggcattgtgtcgggcagaagatgaagaggatatccgtgcagccacccaggccaaggctgaacaggtggctgagcttgcagaatttaatgagaacgatgggtttcctgctggtgagggagaggaagctggccggcctggggctgaggatgaggagatgtcccgggctgagcaggaaattgctgccctcgtagaacagctgacccccattgagcgctatgccatgaaattcctggaggcctcactggaggaggtgagccgagaggagctcaaacaggcagaagagcaagtggaagctgcccgcaaagacctggaccaagccaaggaggaggtgttccgcctaccccaagaggaggaggaggggccgggggctggggatgagagttcctgtgggactggtggaggcacccaccggcgcagtaaaaaggccaaagcccctgagaggccggggactcgtgtcagtgagcgtcttcgtggagcccgggctgagactcaaggggcaaaccacactcctgtcatatccgcccatcaaactcgcagcaccaccacaccaccccgctgcagtcctgccagggagcgagttcccaggccagcacctaggcctcgacccactccagcttcagctccggctgcaattcctgcccttgttcctgtcccagtttctgccccagtacccatttcagccccaaatccaataaccattctccctgtccatatcttgccttctcctccccctccttcacagattcctccttgttcttctcctgcctgcacccctcctcctgcctgtacccctccaccagctcatacaccgcctccagcccaaacctgtcttgtaactccttcctctcctctcttgcttggtccaccttctgtgcccatctctgcctcagtcactaatctccccttgggcttgaggcctgaggcagagctgtgtgcccaggcattggcatctccagagtccctggagctggcttctgtggccagttcagaaacctcctcactttctcttgtgccccctaaagatctgttgccagttgctgtggagatcctgcctgtgtcagagaagaacctttctctcaccccttctgcacccagcctgaccttggaggctggcagcatccccaatggtcaagagcaggaggcaccagattctgctgaggggaccacccttacagtgctgcctgaaggtgaggagttgcccctgtgtgtgagtgagagcaatggcctggagctcccaccctcagcagcatctgatgagccacttcaggagccactggaggctgacaggacctcggaagagctgacagaggccaagaccccaacctccagcccagagaagccacaggaactcgttacagctgaggttgcagctccatccacctcatcttcagccacttcctcgcctgagggtccttcacctgcccgacctcctcggcgtcgcaccagtgctgatgtggaaattaggggtcaagggactggtcggccaggacaaccaccaggccccaaagtgcttcgaaagctgccaggacggctggtaactgtggtagaggaaaaggaactggtgcggcggcggcggcagcagcggggagctgccagcaccctagtgcctggggtctctgagactagtgccagcccgggaagcccgtctgtccgcagcatgtcagggccagaatcctcccctcccattggtgggccctgtgaagctgctccttcatcctcactgcccactccaccccagcagcccttcattgctcgccgtcacattgagctgggggtgactggtggtggcagccccgagaatggagacggagcactgctcgccatcaccccacctgctgtgaaacgtcggagggggaggccccccaagaagaacaggtctccagcagatgctgggagaggtgtggatgaggcaccctcatccaccttgaagggaaaaaccaatggggctgacccagtccctgggcctgagaccctaattgttgcagatcctgtcctggaaccacagcttattcctgggccccagcctcttggaccccagccagttcacagacccaatcccctcctgtcacctgtggagaaaagaaggcgaggacgaccccctaaagcacgagatttgcccatccctgggaccatttcctctgcaggggatggcaactccgaaagtcggacacagccacccccacacccatcacccctaaccccactcccaccactgctagtttgtcccactgctactgttgccaacactgtcaccactgtcaccatttcaacgtccccacccaaacggaagaggggccgacctcccaagaatcctccatcacctcggcccagccagctccccgtcttggaccgtgacagcacttctgttctcgagagctgtggattggggaggcgacggcaaccccagggccaaggggagagtgagggtagttcctctgatgaggatggaagccgccccctcacccgcctggcccgccttcggcttgaagcagaaggaatgcgaggacggaagagtggagggtccatggtggtggctgtaattcaggatgacctggacttagcagatagcgggccaggcgggttggaattgacaccacctgtggtctcactaaccccaaaactgcgctcgacccggctgcgtccagggtctctagtccccccactagagactgagaagttgcctcgcaaacgagcaggggccccagttggtgggagtcctgggctggcaaagcggggccgcctacagcccccaagtcccctggggcctgagggttcagtagaggagtctgaggctgaagcctcaggtgaggaggaggaaggggatgggaccccacgccgacgtcctggcccccgccggcttgttgggaccaccaaccaaggggaccagcgcatcctgcgcagcagcgcccctccctccctggctggccctgctgttagtcacagaggccgcaaggccaagacgtgagtgggctgcccctccacctaggctttccaccgtggccactccctccatgaccaggcctgactctgttaaccactacttgaagtcttgagggggaaagcctccagggagacataggggccttctcccttcttcccaccaaagtagggggtaggcaactggttgtcatggaaatggggatcatcacagtccccttccccttcaccccacgtggctgggcagtgttaagggtggcaagatagtctctgtccccacccccttgtacttgattccccagctgtctttcacacagccccccacccttaggggaagggggaggggcttctctacaatgaggtttttttcttttttttttttttttaagaagaaaaaataataaacttagtttctgtatgagcaaaaaaaaaaaaaaaaaa

SEQ ID NO: 1370 - DNA, 2781 bp, Homo sapiens
gattggctgggacggctgtgggtggggagaagccgggaggactgggtgcgcctgcagggatcggaagccggttggggtgtgagaggttttctcgctctagggagattcttcaagcaatcactatgtcaacagacacaggtgtttcccttccttcatatgaggaagatcagggatcaaaactcattcgaaaagctaaagaggcaccattcgtacccgttggaatagcgggttttgcagcaattgttgcatatggattatataaactgaagagcaggggaaatactaaaatgtccattcatctgatccacatgcgtgtggcagcccaaggctttgttgtaggagcaatgactgttggtatgggctattccatgtatcgggaattctgggcaaaacctaagccttagaagaagagatgctgtcttggtcttgttggaggagcttgctttagttagatgtcttattattaaagttacctattattgttggaaataaactaatttgtatgggtttagatggtaacatggcattttgaatattggcttcctttcttgcaggcttgatttgcttggtgaccgaattactagtgactagtttactaactaggtcattcaaggaagtcaagttaacttaaacatgtcacctaaatgcacttgatggtgttgaaatgtccaccttcttaaatttttaagatgaacttagttctaaagaagataacaggccaatcctgaaggtactccctgtttgctgcagaatgtcagatattttggatgttgcataagagtcctatttgccccagttaattcaacttttgtctgcctgttttgtggactggctggctctgttagaactctgtccaaaaagtgcatggaatataacttgtaaagcttcccacaattgacaatatatatgcatgtgtttaaaccaaatccagaaagcttaaacaatagagctgcataatagtatttattaaagaatcacaactgtaaacatgagaataatttaaggattctagtttagttttttgtaattgcaaattatatttttgctgctgatatattagaataatttttaaatgtcatcttgaaatagaaatatgtattttaagcactcacgcaaaggtaaatgaacacgttttaaatgtgtgtgttgctaattttttccataagaattgtaaacattgaactgaacaaattacctataatggatttggttaatgacttatgagcaagctggtttggccagacagtatacccaaacttttatataatatacagaaggctatcacacttgtgaaattctcttgtctaatctgaatttgcattccatggtgttaacatggtatatgtattgttattaaagtaagtgacccatgtcaaatgtcttttatttatttcatgaggaaaagctttctgtagaggaacaaatttgagaacaagtttcaggaaattgtcttttttgttgttgttctctaatcatgttctcctttctgtttcaacgattttaaaaatattttactttatggtatgttttattttttttccttttgtgggtaatttttgttctattgattatccatataaattttttttttttttttttgagacggagttattctctgtcatcttggctggcgtgcagtggcacgatcttggctcactgcaacttccatcccccaggttcaagtgattctcttgcctcagcctcctgagtagctgtgattacaggcatgcaccaacatgcctggctaatttttgtatatttagtagagacgaggtttcaccatgttggccaggctgatcttgaattcctgacctcaggttatccacctgcctcggcctcccaaagtgctaggattacaggcgtgagccaccacgcccagctgattatccatataattataacactcttctatttattttcagtcaccaataattccttttgagcaatatttaagcctagcatatttcttccttccctcctcctctactaaccagttctggtcgatatattattggattttactcttatactgtttgtttgtttgtttgtttgtttattttgagacagagtcttgctctgttgctgaggctggagtacagtggtgtgatctgagctcacggcaccctccacctcctagcttcgtgcgattctgatgcttcaaccttccgagtagctgggattacaggcatgcgccaccatgtcgggctaatttttgtgtttttagtaaaggcgaggtttcaccatgttggatgatcttgaactcctggcttcaagagatctatctgcctcagcctcccaaagtgctgggattacaagcataatccaccacacctgacctacttttgtatgttaaatgtgattatacttctctttgacttgtcagcttagctttagctgatacactctggtgcccaactattattgtatcagtgaacttccactttcttttccttttctctcaatttttgttgtatcattcctaccttgtgaggacatataatatttacattctgttgtcatcctcacatttcttagttccacagtttaaatgtatttgaaactcaaaacattcccattaatctcttggtcagctgaaattaatgatttaatagtttccttaaaaaagactcatggaacaatttccctaaatttttgccatgtcaaatatgtttatctgtagcctttacacagtaaaaacaatttggctagataatacaattctcagttcatatttttctttggaatattaaagtattgctatagagaaaaaaaaaaaaaaaa

SEQ ID NO: 1371 - DNA, 3049 bp, Homo sapiens
gatctggtccgcaaagtcctggcatcctacttggagacagccgaggaggcggtgaccctgggcgggagcctggatgaaaactgtcaggaggtgctgaaatttgccacccgggagaatggcttcctgctgcagtacctggtggctatccccatggagaaaggccttgactcccaaggctgcttctgcgcaggctgctcccggcagatcggcttctcctttgtacgacccaagctctgtgccttctctggcctctattactgtgacatctgccaccaagacgatgcctcagtgattccggccaggatcatccacaactgggacctcaccaagcgcccgatctgcaggcaggccctgaagtttctgacacagatccgggcccagcccctcatcaacctgcagatggtgaacgcgtctctgtacgagcatgtggagcggatgcacctcattgggaggagacgggagcagctgaagctcctgggggattacctgggcctgtgccggagtggcgccctgaaggagctcagcaagaggctcaaccacaggaattatctcttggaatctccgcataggttcagtgttgctgacctccaacagatcgcagacggggtgtatgaaggattcctcaaggccctgattgaatttgcctcccagcatgtctaccactgcgacctgtgcacccagcgcggcttcatctgccagatctgccagcaccacgacatcatcttcccctttgagtttgacaccacagtcaggtgtgccgagtgcaagaccgtcttccaccagagctgccaggctgtggtgaagaagggctgcccccgctgtgcccgccggcgcaagtaccaggaacagaacattttcgcctgatgcccatctgctgaccccgctctgaaagccgggggtgagtgtggctcagccatcccggctgggtttgccatcagcccaggatactcaccgtgtcacagctgtgtccccttgtcaggaagaccctcagatgtggccagagcaccggcctcccagagaaagcccaggaagtccccgtggtgtcccctggccctccccccacccctctgctgcaggaggcgtggccaccaccagatgctccctgtctggggcaggcagggccgtttactcaccaggccctggctcaccagcgtcccggcgcctccgttagggctgcccaaacactgtggaaaggggacttggggagcattttcaattccacattcctgattaaaaggtctagttttttaaggtgggtttttcccattcatatttcaacagaaagtatttttttattcttgaccctacgtgagtcacccatgaaatccagacattctcacccccagcggatgcacaggagccactcaggcctggcttagaggtagcgggtggctggtgggcaggccactgctgggacagggtctatgggcccacccagtgcctttccttggccctcactgccagtgccaaaccgcccctcagcagggcagggccagtcctggcgaccccggttcctctgtgtcctctttactccccaccccagtgcgtctcgcctgctgagcccaccgctttctcagcgtcagagcccctagctcttctctagcctggggccttggccccattaggagaaggagaaatgactggaaaccagcactgtcagcactttgagccctcctcggtttatggagggtcgccgtcttgcccacccccgatccccgtgcgctcctcacccctctacagacaggggcgctgctgcagatgctccaggcccaccttggtgggtgcccggggtcacactctctgcctgactgacccctgccagggcacagataggcaggaccccagagagggcaggcagccacgccctgcactgtggagaagtgacctggtcctaagctgtgcagggcgtgcgggggaactgccctgtggatgcagccaccacctcacaaagccatgaattcccaaagcatcactgaacttgcccagccgggacactggagactgaagaagttccccggagcaggactgcctttgaaggggccttggggctggggtgggagtctggaattgttttcaaagtgatggtcagaccctccaggcttcggggaaatgtgggtttgctggtctctctgtcgccttcccccacctctcctggacctagcaggccctcagtcctagctgtcttacctgcgctcagcttggagtcaggcctcaggtggagagccgcatgtcactgtcagagatgagcccacccccacccttccctgggggcgattagctgctgagtcacccacccagccttggagctggatgcctgtgcagcagaacagaggcaacggtggcaggcaggtggaggctgcgcacagcttctcccggtcatggcacacacctgtgcccagacgccaatgcctcctaagccaggagctgggttatgcaccgccatggcccacattaacgctccaccacaagcccagcctagtcagagccctcattgccccatccctgagtgggcaggagcctggcctggggagggcttgggcctgtgaggattctccccgaaggtgccctcggaggcagcaggtttgaggccctggggggcccgttccccagaagctgccagtgctttcagatgcattgactcttcccgcctcccctccctcagaaaggtagtgcccacactatttttaaaatgttattttatgcaatacactgttcctagtgagcagggctctggccctgaggagtctttgcaatgtattgaaggaattgctgccgtgtgagttttgaatgattttgcagtaaagacctgatctttctcatcactggtctggcttctgaattctaacactgccacggccaggggggagaccaccagccatctgttaccatctgtcagggtcccctaccctcatgttagtccctggcacgggggaaggcttgggaggtccgtggcaaacacttgtaggcagagggcttgcatgccaggagtgggcagggagaagagagtaagaaaaccaccttgccaagcccagcagtcaggctcttcctg

SEQ ID NO: 1372 - DNA, 1763 bp, Homo sapiens
tttgacgcctcaatggcacagccaagtgcgcgggaagtgggctgcaaacgccggagagttttgtccggagcgcagagacgcgctgtaaccgagcaaccagcggggcccgcccccggcctgctacggcgctcccagcctgccccgcgccgctcggcgccggaagtgagtgagcatttccggcagccatccccgcggtgctgacatcccggttgttcttctgtgccgggggtcttcctgctgtcatgaaggacgtaccgggcttcctacagcagagccagaactccgggcccgggcagcccgctgtgtggcaccgtctggaggagctctacacgaagaactttatgaaaactttatcagtgaatttgaacacaggtaaaagcctctcatccgtttttcactttgaaaatgagtgcattgatgctcggcggtgctcaaaggctggtggcttttatttcagggtgaaccctttgtccctcgtggaaatcattcttcatgtagttagacagatgactgatcctaatgtggctcttacttttctggaaaagactcgtgagaaggtgaaaagtagtgatgaggcagtgatcctgtgtaaaacagcaattggagctctaaaattaaacatcggggacctacaggttacaaaggaaacaattgaagatgttgaagaaatgctcaacaaccttcctggtgtgacatcggttcacagtcgtttctatgatctctccagtaaatactatcaaacaatcggaaaccacgcgtcctactacaaagatgctctgcggtttttgggctgtgttgacatcaaggatctaccagtgtctgagcagcaggagagagccttcacgctggggctagcaggacttctcggcgagggagtttttaactttggagaactcctcatgcaccctgtgctggagtccctgaggaatactgaccggcagtggctgattgacaccctctatgccttcaacagtggcaacgtagagcggttccagactctgaagactgcctggggccagcagcctgatttagcagctaatgaagcccagcttctgaggaaaattcagttgttgtgcctcatggagatgactttcacacgacctgccaatcacagacaactcacttttgaagaaattgccaaaagtgctaaaatcacagtgaatgaggtggagcttctggtgatgaaggccctttcggtggggctggtgaaaggcagtatagacgaggtggacaaacgagtccacatgacctgggtgcagccccgagtgttggatttgcaacagatcaagggaatgaaggaccgcctggagttctggtgcacggatgtgaagagcatggagatgctggtggagcaccaggcccatgacatcctcacctagggccccctggttccccgtcgtgtctcctttgactcacctgagagaggcgtttgcagccaatgaagctggctgctcagacggtcgacattgaatttgggtgggggttgggatcctgtctgaagtacagactgttcttgctctaaaaacaggactgtccctgatgggagccaggccacagggaggaggcttctttgtgggtctctcctgcagagggtgggggtctcagggtcttaggtgatacgggagagaaagaacgtgccaggcaggaggccccctgaagtctgtgtactccgaggtggatctccatccccatccacctgtacggacatcttttccgttgcggtttgagaatgttcctataataaacccctctgctttgttctt

SEQ ID NO: 1373 - DNA, 1939 bp, Homo sapiens
cgcctttatctgcatccgggtccgtgggattcgcgctccactggtcagctggggtcgctctcgggtggttgggtgttgcttgttcccgctgttccagcgtcgaagaaccattgggtctgccggtttgaacttgttctggaagctgtgcgtcaccgtaatgaggcttgtaattcttgataactatgacttggctagtgaatgggcagccaaatacatctgtaatcgcatcattcagttcaaacctggacaggacagatattttacactgggtttaccaacagggagtacacctttaggatgctataaaaaactaatagaatatcataagaatggacacctttcttttaaatatgtgaagacctttaatatggatgaatatgtaggacttccaagaaatcatcctgaaagctaccattcttatatgtggaataatttttttaagcatatcgatatagatcctaataatgcacatatccttgacgggaatgctgcagatttacaagcagaatgtgatgcttttgaaaacaaaataaaagaagctggaggaatagatctttttgttggaggaattggtccagatggtcatatcgctttcaatgagcctggatccagtttagtgtcaaggacaagattaaagactctagcaatggataccatcttggcaaatgccaaatattttgatggagatttatcaaaagtgccaactatggctctaactgttggtgtggggacagtgatggatgctagagaagtaatgatccttataacaggggcacacaaggcatttgccctgtacaaagcaatagaagaaggagtcaatcacatgtggactgtttccgctttccagcagcatccccggactatttttgtatgcgatgaagatgctactttagaattaagagttaaaactgtgaaatactttaaaggtctaatgcatgtgcacaataaacttgtggatccactattcagtatgaaagatggaaactgaaggagactggagcaaaattcagcttgaatgaacagagcactttttactaagtagtagatgaattttcagctatgcaatatgacaaaacatggggaattttgaagattgtcattttttcattcgagtctctatgttaaacattccatattttgaatatttatatcttgtacttgggtttaagagaagtagctggctctcaagattgactggctatttattataaagtactgaagtcacatagccacctataaaacagcatagaaatgtctgcctgtttaaaaagtcattttaaaggtagagtgtccacatcaggcaccatttgtgatatgactccagtggcatatatttcattttttaatgacaagacactccaaacctttcagataacaaactatcattgcagaccttcacttttggaatgcaatctttatattttctgtgcatcacacacatgcttttctgcacgtggttgccttagtcatcttcctacagcaccatctagacatcaaaaattgtgctatatatcattggtaaaggaaatttgaagagatgacagtgcctaaaagtacagtttacatccttttggaaagtatgtgtaagtgcatgttttttgtgcaccttcttctatagcacttttttacaaatatcttatttttatttaacgacttgggttcatgtccctaatataagtatcttgacaattatgagctttatacctagcaagccacttcaggaaattcttttggagaatattttctgattattgttaaacttaatatacaattagctttattccttataaaatgtctaaaagaataatacgaagtatatataaaaggaattactgtaaactacattgccatagcaatttacataaaagtatattgttttctatctttaactcaaataaagcgtgtaataaataagttaaaaaaaaaaaaaaaaaaaaaa

SEQ ID NO: 1374 - DNA, 818 bp, Homo sapiens
aacctccgtcccgcagtccaattagcagccgcgacccggcgcccgcccacgccgcgtcacgagtcagccaaagatggctgcgcccaggtaatttgagcaaaggccacagtgaactccggcgtggctgaggaaggaggaggcacccacaggctgctgggaggagagcataaggctcaaaatggaaaatcataaatccaataataaggaaaacataacaattgttgatatatccagaaaaattaaccagcttccagaagcagaaaggaatctacttgaaaatggatcggtttatgttggattaaatgctgctctttgtggcctcatagcaaacagtctttttcgacgcatcttgaatgtgacaaaggctcgcatagctgctggcttaccaatggcagggataccttttcttacaacagacttaacttacagatgttttgtaagttttcctttgaatacaggtgatttggattgtgaaacctgtaccataacacggagtggactgactggtcttgttattggtggtctataccctgttttcttggctatacctgtaaatggtggtctagcagccaggtatcaatcagctctgttaccacacaaagggaacatcttaagttactggattagaacttctaagcctgtctttagaaagatgttatttcctattttgctccagactatgttttcagcataccttgggtctgaacaatataaactacttataaaggcccttcagttatctgaacctggcaaagaaattcactgattttaaacaaatatgtaaacaaaaataaaatggtaaaaacagtttatgtcta

SEQ ID NO: 1375 - DNA, 2044 bp, Homo sapiens
ctggacgagtccgagcgcgtcacctcctcacgctgcggctgtcgcccgtgtcccgccggcccgttccgtgtcgccccgcagtgctgcggccgccgcggcaccatggctgtgtttgtcgtgctcctggcgttggtggcgggtgttttggggaacgagtttagtatattaaaatcaccagggtctgttgttttccgaaatggaaattggcctataccaggagagcggatcccagacgtggctgcattgtccatgggcttctctgtgaaagaagacctttcttggccaggactcgcagtgggtaacctgtttcatcgtcctcgggctaccgtcatggtgatggtgaagggagtgaacaaactggctctacccccaggcagtgtcatttcgtaccctttggagaatgcagttccttttagtcttgacagtgttgcaaattccattcactccttattttctgaggaaactcctgttgttttgcagttggctcccagtgaggaaagagtgtatatggtagggaaggcaaactcagtgtttgaagacctttcagtcaccttgcgccagctccgtaatcgcctgtttcaagaaaactctgttctcagttcactccccctcaattctctgagtaggaacaatgaagttgacctgctctttctttctgaactgcaagtgctacatgatatttcaagcttgctgtctcgtcataagcatctagccaaggatcattctcctgatttatattcactggagctggcaggtttggatgaaattgggaagcgttatggggaagactctgaacaattcagagatgcttctaagatccttgttgacgctctgcaaaagtttgcagatgacatgtacagtctttatggtgggaatgcagtggtagagttagtcactgtcaagtcatttgacacctccctcattaggaagacaaggactatccttgaggcaaaacaagcgaagaacccagcaagtccctataaccttgcatataagtataattttgaatattccgtggttttcaacatggtactttggataatgatcgccttggccttggctgtgattatcacctcttacaatatttggaacatggatcctggatatgatagcatcatttataggatgacaaaccagaagattcgaatggattgaatgttacctgtgccagaattagaaaagggggttggaaattggctgttttgttaaaatatatcttttagtgtgctttaaagtagatagtatactttacatttataaaaaaaaatcaaattttgttctttattttgtgtgtgcctgtgatgtttttctagagtgaattatagtattgacgtgaatcccactgtggtatagattccataatatgcttgaatattatgatatagccatttaataacattgatttcattctgtttaatgaatttggaaatatgcactgaaagaaatgtaaaacatttagaatagctcgtgttatggaaaaaagtgcactgaatttattagacaaacttacgaatgcttaacttctttacacagcataggtgaaaatcatatttgggctattgtatactatgaacaatttgtaaatgtcttaatttgatgtaaataactctgaaacaagagaaaaggtttttaacttagagtagccctaaaatatggatgtgcttatataatcgcttagttttggaactgtatctgagtaacagaggacagctgttttttaaccctcttctgcaagtttgttgacctacatgggctaatatggatactaaaaatactacattgatctaagaagaaactagccttgtggagtatatagatgcttttcattatacacacaaaaatccctgagggacattttgaggcatgaatataaaacatttttatttcagtaacttttccccctgtgtaagttactatggtttgtggtacaacttcattctatagaatattaagtggaagtgggtgaattctactttttatgttggagtggaccaatgtctatcaagagtgacaaataaagttaatgatgattccaaaaaaaaaa

SEQ ID NO: 1376 - DNA, 2141 bp, Homo sapiens
gcgccttagccagagggcgggcctgcgccaccctcggaaagcgtcacttccacttccggccggcgctctggctctgtacctggacagggctgcggtaggccagcggtgggctggcggttgcgctcctcagatcggcggcctttcgggcggtggcttgcgtttgagcctcagaaagcgaggagcggcctccacggaagccaagctggccgaggttgcagtccatgagctgggaaaggaggcagtgctcttgggagaaacagcagaggcctcaagtttcgggctgaagccaacagagtcccaaccagtgggcgtatcccaagatgaagaattttggaatacatacgagggtctgcaagaacagctcagcaggaatactcataaagagactgagcctgtgtatgagagggctgtgcctactcaacagattctagcttttcctgagcaaacaaacaccaaagactggacagtgacacctgagcacgtcttgcctgagtcccagagcttgttgacatttgaagaagtggccatgtatttttcccaggaagaatgggagttattggatcccactcagaaggccctctacaatgatgtaatgcaggaaaactatgagactgtcatctctctagcattgtttgtgctccccaaacctaaagtgatctcctgtctagagcaaggggaagagccatgggttcaagtatccccggagtttaaggatagtgccggaaaatctcctacagggttaaagctcaaaaacgacactgaaaatcatcagcctgtgtctctttctgacttagaaatacaagcatcagcaggcgtcatatcaaaaaaggccaaagtaaaagttccccagaaaacagcaggcaaagaaaatcattttgatatgcacagagtgggaaaatggcaccaagattttccagtgaagaaaagaaagaaactttcaacctggaaacaagagctgctcaaacttatggatcgtcacaagaaagattgtgcaagagagaagccttttaaatgtcaggaatgtgggaaaaccttcagagttagctctgaccttattaagcaccaaagaattcacactgaagagaaaccctataaatgtcaacagtgtgataagaggtttagatggagttcagatcttaataagcacttaacaacacaccaaggaataaaaccatataaatgttcatggtgtgggaaaagcttcagtcaaaatacaaatttacatacacaccaaagaactcatacaggagaaaagcccttcacatgtcatgaatgtggaaaaaaattcagtcagaactcccaccttattaaacaccggagaacccacacaggtgagcagccatatacttgtagcatatgcaggagaaacttcagcaggcggtcaagccttcttagacaccagaaactccacctgtgaagagaagcttgtccagtgtcctcattctgaagacattcaccaaatggagcttggcactaaaatttatgtaaaagaaaaatcacaaaccttgaaaaattttacatcagaaaatgggataaacatacatttcacagaaaataatcaagacttgctctgcagccactcagtagtcttctgtggtcacagaagtaaacattgttggctttgtattgatctctccagtcatttttgaacacatccaatagaaacattggcagcatggtcttccaaaacaaaaagcagtaacatgcatgtttaattgcataccattctcttcacagtagcaggcttaccaatttccatagtctcatgaggccgaaatgaattacaatgtaaagtgttccaggaaccaaattggattttctttcttttgtcattggacacggtttgcaaagttggacatcacttgagttccttcttaaacttttcggcaacttctcttggatcctgttatcacagttttttactgtgatgaaatcttgttaaccaccactagggaatctccagatgaactattaatgcactgtcttatgcctctcattggtgatgtttggaaaatagaagacatctctaatggaatcatgggggaaacgggttggaatttgtagccatggaatatatattagatgtaaagaattttctgcaataaaagaaactagacttgttaaaaaaaaaaaaaaaaaaa

SEQ ID NO: 1377 - DNA, 3010 bp, Homo sapiens
cgggaggaggcgcgggcgcgccgggagggaccggcggcggcatgggccgggggccctgggatgcgggcccgtctcgccgcctgctgccgctgttgctgctgctcggcctggcccgcggcgccgcgggagcgccgggccccgacggtttagacgtctgtgccacttgccatgaacatgccacatgccagcaaagagaagggaagaagatctgtatttgcaactatggatttgtagggaacgggaggactcagtgtgttgataaaaatgagtgccagtttggagccactcttgtctgtgggaaccacacatcttgccacaacacccccgggggcttctattgcatttgcctggaaggatatcgagccacaaacaacaacaagacattcattcccaacgatggcaccttttgtacagacatagatgagtgtgaagtttctggcctgtgcaggcatggagggcgatgcgtgaacactcatgggagctttgaatgctactgtatggatggatacttgccaaggaatggacctgaacctttccacccgaccaccgatgccacatcatgcacagaaatagactgtggtacccctcctgaggttccagatggctatatcataggaaattatacgtctagtctgggcagccaggttcgttatgcttgcagagaaggattcttcagtgttccagaagatacagtttcaagctgcacaggcctgggcacatgggagtccccaaaattacattgccaagagatcaactgtggcaaccctccagaaatgcggcacgccatcttggtaggaaatcacagctccaggctgggcggtgtggctcgctatgtctgtcaagagggctttgagagccctggaggaaagatcacttctgtttgcacagagaaaggcacctggagagaaagtactttaacatgcacagaaattctgacaaagattaatgatgtatcactgtttaatgatacctgtgtgagatggcaaataaactcaagaagaataaaccccaagatctcatatgtgatatccataaaaggacaacggttggaccctatggaatcagttcgtgaggagacagtcaacttgaccacagacagcaggaccccagaagtgtgcctagccctgtacccaggcaccaactacaccgtgaacatctccacagcacctcccaggcgctcgatgccagccgtcatcggtttccagacagctgaagttgatctcttagaagatgatggaagtttcaatatttcaatatttaatgaaacttgtttgaaattgaacaggcgttctaggaaagttggatcagaacacatgtaccaatttaccgttctgggtcagaggtggtatctggctaacttttctcatgcaacatcgtttaacttcacaacgagggaacaagtgcctgtagtgtgtttggatctgtaccctacgactgattatacggtgaatgtgaccctgctgagatctcctaagcggcactcagtgcaaataacaatagcaactcccccagcagtaaaacagaccatcagtaacatttcaggatttaatgaaacctgcttgagatggagaagcatcaagacagctgatatggaggagatgtatttattccacatttggggccagagatggtatcagaaggaatttgcccaggaaatgacctttaatatcagtagcagcagccgagatcccgaggtgtgcttggacctacgtccgggtaccaactacaatgtcagtctccgggctctgtcttcggaacttcctgtggtcatctccctgacaacccagataacagagcctcccctcccggaagtagaattttttacggtgcacagaggacctctaccacgcctcagactgaggaaagccaaggagaaaaatggaccaatcagttcatatcaggtgttagtgcttcccctggccctccaaagcacattttcttgtgattctgaaggcgcttcctccttctttagcaacgcctctgatgctgatggatacgtggctgcagaactactggccaaagatgttccagatgatgccatggagatacctataggagacaggctgtactatggggaatattataatgcacccttgaaaagagggagtgattactgcattatattacgaatcacaagtgaatggaataaggtgagaagacactcctgtgcagtttgggctcaggtgaaagattcgtcactcatgctgctgcagatggcgggtgttggactgggttccctggctgttgtgatcattctcacattcctctccttctcagcggtgtgatggcagatggacactgagtggggaggatgcactgctgctgggcaggtgttctggcagcttctcaggtgcccgcacagaggctccgtgtgacttccgtccagggagcatgtgggcctgcaactttctccattcccagctgggccccattcctggatttaagatggtggctatccctgaggagtcaccataaggagaaaactcaggaattctgagtcttccctgctacaggaccagttctgtgcaatgaacttgagactcctgatgtacactgtgatattgaccgaaggctacatacagatctgtgaatcttggctgggacttcctctgagtgatgcctgagggtcagctcctctagacattgactgcaagagaatctctgcaacctcctatataaaagcatttctgttaattcattcagaatccattctttacaatatgcagtgagatgggcttaagtttgggctagagtttgactttatgaaggaggtcattgaaaaagagaacagtgacgtaggcaaatgtttcaagcactttagaaacagtacttttcctataattagttgatatactaatgagaaaatatactagcctggccatgccaataagtttcctgctgtgtctgttaggcagcattgctttgatgcaatttctattgtcctatatattcaaaagtaatgtctacattccagtaaaaatatcccgtaattaagaaaaaaaaaaaaaaa

SEQ ID NO: 1378 - DNA, 2179 bp, Homo sapiens
tcctgcctcggcaaccccgggccctgagggcaggccccaaccgcggaggagcaggagagggcggaggccggcgggccatgccctggtcgtcccgcggcgccctccttcgggacctggtcctgggcgtgctgggcaccgccgccttcctgctcgacctgggcaccgacctgtgggccgccgtccagtatgcgctcggcggccgctacctgtgggcggcgctggtgctggcgctgctgggcctggcctccgtggcgctgcagctcttcagctggctctggctgcgcgctgaccctgccggcctgcacgggtcgcagcccccgcgccgctgcctggcgctgctgcatctcctgcagctgggttacctgtacaggtgcgtgcaggagctgcggcaggggctgctggtgtggcagcaggaggagccctctgagtttgacttggcctacgccgacttcctcgccctggacatcagcatgctgcggctcttcgagaccttcttggagacggcaccacagctcacgctggtgctggccatcatgctgcagagtggccgggctgagtactaccagtgggttggcatctgcacatccttcctgggcatctcgtgggcactgctcgactaccaccgggccttgcgcacctgcctcccctccaagccgctcctgggcctgggctcctccgtgatctacttcctgtggaacctgctgctgctgtggccccgagtcctggctgtggccctgttctcagccctcttccccagctatgtggccctgcacttcctgggcctgtggctggtactgctgctctgggtctggcttcagggcacagacttcatgccggaccccagctccgagtggctgtaccgggtgacggtggccaccatcctctatttctcctggttcaacgtggctgagggccgcacccgaggccgggccatcatccacttcgccttcctcctgagtgacagcattctcctggtggccacctgggtgactcatagctcctggctgcccagcgggattccactgcagctgtggctgcctgtgggatgcggctgcttctttctgggcctggctctgcggcttgtgtactaccactggctgcaccctagctgctgctggaagcccgaccctgaccaggtagacggggcccggagtctgctttctccagaggggtatcagctgcctcagaacaggcgcatgacccatttagcacagaagtttttccccaaggctaaggatgaggctgcttcgccagtgaagggataggtgaacggcgtcctttgaagcaggatcagacccagccagcagagatggagagtgactctgttggcagaaggcaggcgaggataagctaacgatgctgctgtggcctctatgcactcagcaagagcgggacgcctgtgctgggccgggcaccagggatggtgctgagtcgggcagaggcctcctttcaaggagttcacagtgaacaagatgagaagggctgggccctggagggtcaagagccccaattatgtacaagacactttgggaggaaagaagactaccttttccccctgccattggtatagctggtgccccaaaacttccacctccctccctggccacctctaaaatgactggtataggtgctgccccaccccttagctcccctatcctgggctaggaggccacaggggctgtcctctagaattcttccttccctcccccacaccattcattcaattcatgaaacaaatctttgccaagagcagtttatgtgccaggaacatcattctgtccttgcaacctggaacaagaccagctaccagcctagcttcatccgctacttgcaccaaccagtcccgggttagatcccaaatgctagaagccagggatgcccaactctgggtggccccagtcagaacctctgggatctcagtgaagctggcctggcctctgctcctgctctcaaggggctgcttttcaaccaagagccttgtgagcctggtctgagccttgcacagccactgagtattttttttgccttagccagtgtacctcctacctcagtctatgtgagaggaagagaatgtgtgtgcctgtgggtctctacaagtgacagatgtgttgttttcaacagtattattaggttatgaataaagcctcatgaaatcctcaaaaaaaaaaaaaaaaaaaag

SEQ ID NO: 1379 - DNA, 2091 bp, Homo sapiens
agtccctcgggctcatacctagtgcctgcggcaggacagccatggccgccaactccaccagcgacctccacactcccgggacgcagctgagcgtggctgacatcatcgtcatcactgtgtattttgctctgaatgtggccgtgggcatatggtcctcttgtcgggccagtaggaacacggtgaatggctacttcctggcaggccgggacatgacgtggtggccgattggagcctccctcttcgccagcagcgagggctctggcctcttcattggactggcgggctcaggcgcggcaggaggtctggccgtggcaggcttcgagtggaatgccacgtacgtgctgctggcactggcatgggtgttcgtgcccatctacatctcctcagagatcgtcaccttacctgagtacattcagaagcgctacgggggccagcggatccgcatgtacctgtctgtcctgtccctgctactgtctgtcttcaccaagatatcgctggacctgtacgcgggggctctgtttgtgcacatctgcctgggctggaacttctacctctccaccatcctcacgctcggcatcacagccctgtacaccatcgcagggggcctggctgctgtaatctacacggacgccctgcagacgctcatcatggtggtgggggctgtcatcctgacaatcaaagcttttgaccagatcggtggttacgggcagctggaggcagcctacgcccaggccattccctccaggaccattgccaacaccacctgccacctgccacgtacagacgccatgcacatgtttcgagacccccacacaggggacctgccgtggaccgggatgacctttggcctgaccatcatggccacctggtactggtgcaccgaccaggtcatcgtgcagcgatcactgtcagcccgggacctgaaccatgccaaggcgggctccatcctggccagctacctcaagatgctccccatgggcctgatcatcatgccgggcatgatcagccgcgcattgttcccagatgatgtgggctgcgtggtgccgtccgagtgcctgcgggcctgcggggccgaggtcggctgctccaacatcgcctaccccaagctggtcatggaactgatgcccatcggtctgcgggggctgatgatcgcagtgatgctggcggcgctcatgtcgtcgctgacctccatcttcaacagcagcagcaccctcttcactatggacatctggaggcggctgcgtccccgctccggcgagcgggagctcctgctggtgggacggctggtcatagtggcactcatcggcgtgagtgtggcctggatccccgtcctgcaggactccaacagcgggcaactcttcatctacatgcagtcagtgaccagctccctggccccaccagtgactgcagtctttgtcctgggcgtcttctggcgacgtgccaacgagcagggggccttctggggcctgatagcagggctggtggtgggggccacgaggctggtcctggaattcctgaacccagccccaccgtgcggagagccagacacgcggccagccgtcctggggagcatccactacctgcacttcgctgtcgccctctttgcactcagtggtgctgttgtggtggctggaagcctgctgaccccacccccacagagtgtccagattgagaaccttacctggtggaccctggctcaggatgtgcccttgggaactaaagcaggtgatggccaaacaccccagaaacacgccttctgggcccgtgtctgtggcttcaatgccatcctcctcatgtgtgtcaacatattcttttatgcctacttcgcctgacactgccatcctggacagaaaggcaggagctctgagtcctcaggtccacccatttccctcatggggatcccgaggccccaagaggggcagattcccctcacagctgcacagcagctcggtgcccaagaactggccaagccagcaaagcgggagccctgaaaaattaggggggaaatgggagaaaataatgtgacatttcaaaaacagcaccaaagcagtcagcattggaaggaaaattagatttctgacggacatcctg

SEQ ID NO: 1380 - DNA, 1796 bp, Homo sapiens
ggtcagctgagttcgccggcccagggcaggcggggcccgagcctagcggtaacccccgggcagggcggggccgctcgcagactccatatgagattcacctcgcaggtggttccctcattcgagtgctccggcgcacagacccgcgccccgccgtctgcgagcctcccgagagccgtcccttcgtccggccctggagcattgcgtttgtcgccggtgtcgcagtgcgaggatggcgccgcgggtgtagcggctctctgcgcaggccgagtgggcccagagaagcgaggaactccgcagctcgtcgacacgtctcgtctcctgtcccaattcagggcttggtgaggtgactcgcggtcgcgggtgactcgccggcaggacactgcctggaacgcctggagcgcctcccactgcagacgtctgtccgcctccagccgctctcctctgacgggtcctgcctcagttggcggaatggcggccacgggagccaatgcagagaaagctgaaagtcacaatgattgccccgtcagacttttaaatccaaacatagcaaaaatgaaagaagatattctctatcatttcaatctcaccactagcagacacaatttcccagccttgtttggagatgtgaagtttgtgtgtgttggtggaagcccctcccggatgaaagccttcatcaggtgcgttggtgcagagctgggccttgactgcccaggtagagactatcccaacatctgtgcgggaactgaccgctatgccatgtataaagtaggaccggtgctgtctgtcagtcatggtatgggcattccttctatctcaatcatgttgcatgagctcataaagctgctgtactatgcccggtgctccaacgtcactatcatccgcattggcacttctggtgggataggtctggagcccggcactgtggtcataacagagcaggcagtggatacctgcttcaaggcagagtttgagcagattgtcctggggaagcgggtcatccggaaaacggaccttaacaagaagctggtgcaggagctgttgctgtgttctgcagagctgagcgagttcaccacagtggtggggaacaccatgtgcaccttggacttctatgaagggcaaggccgtctggatggggctctctgctcctacacggagaaggacaagcaggcgtatctggaggcagcctatgcagccggcgtccgcaatatcgagatggagtcctcggtgtttgccgccatgtgcagcgcctgcggcctccaagcggccgtggtgtgtgtcaccctcctgaaccgcctggaaggggaccagatcagcagccctcgcaatgtgctcagcgagtaccagcagaggccgcagcggctggtgagctacttcatcaagaagaaactgagcaaggcctgagcgctgccctgcacctccgcagacctgctgtgatgacttgccattaaaagcattgtccaaaatcccctgttgtgtggactttgagcacactttacacaagaatctagaaaatcagatcgcgattaagagacagagaatcttggattaaccgcatgggagatgttcttccttttgaagtttcattggagcattttcaatgatgttagcctgatttggggtttcttcaagaacattctaccaaatttttgtactatttctagggaaatttttcagactttaaaattctaatggtagtcagatttcatgtcactaaacaagaaatctgacaatagtgccaggaaactaatttcctgatacattaaaaaaattccatgcaaaaaaaaaaaaaaaaaaaa

SEQ ID NO: 1381 - DNA, 2157 bp, Homo sapiens
acaagtcccagcatccaccgcgcggcccaggactgtcagggtagtgggcgttgcgtgaggcgggtaaatgttcgcggaagcggcaaagacgacacggccttgtgggatggcggagtttaaggagaagcctgaggccccgactgagcagctggatgtcgcgtgcggccaggaaaacttgccggtgggcgcgtggcccccgggggccgcgccggcgcccttccagtacactcctgatcatgtagttggacctggagcagacattgatcccactcaaataacctttcccggatgcatttgtgtcaaaactccctgcctccctggcacttgctcctgtctccgccatggagagaactatgatgataactcatgccttagagatataggatctggaggaaagtatgcagagcctgtttttgaatgcaatgtcctgtgccgatgcagtgaccactgcagaaacagagtggtccagaaaggtctacagttccacttccaagtgttcaagacgcataaaaaaggctggggacttcgtaccttggaatttataccgaaaggaaggtttgtctgtgaatatgctggtgaggttttaggattctctgaagttcagagaagaattcacttacaaacaaaatccgactccaattacattatagccatcagggaacatgtttataatgggcaggtaatggaaacatttgttgaccctacttatataggaaatattggaagattccttaatcattcttgtgagccaaaccttttgatgattcctgtccgaattgactcaatggtacctaagttggcactttttgcagccaaagatattgtgccagaagaagaactctcttatgattattcaggaagatatcttaatctaacagtcagtgaagacaaagaaaggctagatcatgggaaactaaggaaaccttgttactgtggtgccaaatcatgtactgctttcctgccttttgacagttctctgtactgccccgtagaaaagtcgaacatcagttgtggaaatgagaaggaacccagcatgtgtggctcagccccttctgtgttcccctcctgcaagcgattgacccttgagactatgaaaatgatgttagacaaaaagcaaattcgagcaattttcttattcgagttcaaaatgggtcgtaaagcagcagaaacaactcgcaacatcaacaatgcatttggcccaggaactgctaacgaacgtacagtgcagtggtggttcaagaagttttgcaaaggagatgagagccttgaagatgaggagcgtagtggccggccatcagaagttgacaacgaccagttgagagcaatcatcgaagctgatccccttacaactacacgagaagttgctgaagaactcaatgtcaaccattctacggtcgttcgacatttgaagcaaattggaaaggtgaaaaagctcgataagtgggtgcctcatgagctgactgaaaatcaaaaaaatcgtcgttttgaagtgtcatcttctcttattctacgcaaccacaacgaaccatttctcgatcggattgtgacgtgtgatgaaaagtggattttatatgacaaccggcgacgatcagctcagtggttggatcaagaagaagctccaaagcacttcccaaagccaatcttgcacccaaaaaaggtcatggtcactatttggtggtctgctgctggtctgatccactacagctttctgaatcccggtgaaaccattacatctgagaagtatgctcaggaaatcgatgagatgaaccaaaaactgcaacgcctgcagctggcattggtcaacagaaagggcccaattcttctccacgacaatgcccgaccgcatgttgcacaacccacacttcaaaagttgaatgaattgggctatgaagttttgcctcatccaccgtattcacctgacctcttgccaaccaactaccacgtctttaagcatctcaacaactttttgcagggaaaacgcttccacaaccagcaggatgcagaaaatgctttccaagagttcgtcgaatcccaaagcacggatttttacgctacaggaataaaccaacttatttctcgttggcaaaaatgtgttgattgtaatggttcctattttgattaataaaaatgcgttgagcctaaaaaaaaaaaaaaaaa

SEQ ID NO: 1382 - DNA, 3769 bp, Homo sapiens
atagagcggctcccagcgttccctgcggcgtaggaggcggtccagactataaaagcggctgccggaaagcggccggcacctcattcatttctaccggtctctagtagtgcagcttcggctggtgtcatcggtgtccttcctccgctgccgcccccgcaaggcttcgccgtcatcgaggccatttccagcgacttgtcgcacgcttttctatatacttcgttccccgccaaccgcaaccattgacgccatgtcgggttattcgagtgaccgagaccgcggccgggaccgagggtttggtgcacctcgatttggaggaagtagggcagggcccttatctggaaagaagtttggaaaccctggggagaaattagttaaaaagaagtggaatcttgatgagctgcctaaatttgagaagaatttttatcaagagcaccctgatttggctaggcgcacagcacaagaggtggaaacatacagaagaagcaaggaaattacagttagaggtcacaactgcccgaagccagttctaaatttttatgaagccaatttccctgcaaatgtcatggatgttattgcaagacagaatttcactgaacccactgctattcaagctcagggatggccagttgctctaagtggattggatatggttggagtggcacagactggatctgggaaaacattgtcttatttgcttcctgccattgtccacatcaatcatcagccattcctagagagaggcgatgggcctatttgtttggtgctggcaccaactcgggaactggcccaacaggtgcagcaagtagctgctgaatattgtagagcatgtcgcttgaagtctacttgtatctacggtggtgctcctaagggaccacaaatacgtgatttggagagaggtgtggaaatctgtattgcaacacctggaagactgattgactttttagagtgtggaaaaaccaatctgagaagaacaacctaccttgtccttgatgaagcagatagaatgcttgatatgggctttgaaccccaaataaggaagattgtggatcaaataagacctgataggcaaactctaatgtggagtgcgacttggccaaaagaagtaagacagcttgctgaagatttcctgaaagactatattcatataaacattggtgcacttgaactgagtgcaaaccacaacattcttcagattgtggatgtgtgtcatgacgtagaaaaggatgaaaaacttattcgtctaatggaagagatcatgagtgagaaggagaataaaaccattgtttttgtggaaaccaaaagaagatgtgatgagcttaccagaaaaatgaggagagatgggtggcctgccatgggtatccatggtgacaagagtcaacaagagcgtgactgggttctaaatgaattcaaacatggaaaagctcctattctgattgctacagatgtggcctccagagggctagatgtggaagatgtgaaatttgtcatcaattatgactaccctaactcctcagaggattatattcatcgaattggaagaactgctcgcagtaccaaaacaggcacagcatacactttctttacacctaataacataaagcaagtgagcgaccttatctctgtgcttcgtgaagctaatcaagcaattaatcccaagttgcttcagttggtcgaagacagaggttcaggtcgttccaggggtagaggaggcatgaaggatgaccgtcgggacagatactctgcgggcaaaaggggtggatttaatacctttagagacagggaaaattatgacagaggttactctagcctgcttaaaagagattttggggcaaaaactcagaatggtgtttacagtgctgcaaattacaccaatgggagctttggaagtaattttgtgtctgctggtatacagaccagttttaggactggtaatccaacagggacttaccagaatggttatgatagcactcagcaatacggaagtaatgttccaaatatgcacaatggtatgaaccaacaggcatatgcatatcctgctactgcagctgcacctatgattggttatccaatgccaacaggatattcccaataagactttagaagtatatgtaaatgtctgtttttcataattgctctttatattgtgtgttatctgacaagatagttatttaagaaacatgggaattgcagaaatgactgcagtgcagcagtaattatggtgcactttttcgctatttaagttggatatttctctacattcctgaaacaatttttaggttttttttgtactagaaaatgcaggcagtgttttcacaaaagtaaatgtacagtgatttgaaatacaataaatgaaggcaatgcatggccttccaataaaaaatatttgaagactgaattaagtggaaattgtactttattttatataatgtcatgtaaaactttgcttaagatggtctggttttttttttgtttttgtttggttttttttttccatgaaaacaaatgactgttcctttttatttaatttgggaggcagggggaatcagaaggcccttctttataatgagctattcatattgcaggagtcagaatgaattgatacaggtgaatttttagttacaggctaaattgcataaaagctttgtcagcttccagcatcaggggagtcatttaatagcctttttccttatttgctagtatggttaaatgagaaaatagtaaaatagatacaaagtcatctatatagtgtgagaacgtgggtgactttttcaaagtttataatttaaaaagctccaaataactggctttttcaagagacttatactcatgctcttggctatactgtgaattactgaaatgttgaacaaacctgtgaaagacatacattagccctttaagatggccaggagctaagcttgagtctcctttactgaatttcgttcttagtgcaggttacttgtagattctagtcttcacaggctccctggggctcttaactagtcacactgggagtcatgaatgtctttccaataattcagggaattctagagatcctcaaactgtaaggtctattcatactcaacacaaggaaaaaacctcattaaaattaatgactaatcaggaggcaacgtaaccaaaagcacagtgaatgaaagttttcatggtaggttcaacatgggtttattgctagaaagatccaggggatagctttaggtttaacttcggctcaccaacgtaactttctaatcatttatttcagtaatagctagaagtgggtctgaatgttttcccagagtctgatacgtgtttttttttgccagaagagaggtcttcaggagacttcatttaaattctgattattaaactgaggctttaattgatgttaatgccttatgtcaaatgtaaagttagaatttgctagggctgggatagggagtgatatttctaggacttagacattgaaaactaattcagcctgtagtaacctggatggttttcaatggcatggttagtcaaattcatggttttaaacttagaagcagctttcgggggagagggtaggttggagcatttattacatattttactgtttaatgtcttaaccgtgggccttttaatttgtaaacactgaaatgattgttgggctgtggaaaacatttacctatttaccttggaagttttaaaagacagtccactttttagcatgtgtgttgtgtccagcctgtggtcgtcttaactaataaatgtgatttttctcccaaaaaaaaaa

SEQ ID NO: 1383 - DNA, 2873 bp, Homo sapiens
cggcacgcccgggaggctttctctggctggtaaccgctactcccggacaccagaccaccgccttccgtacacaggggcccgcatcccaccctcccggacctaagagcctgggtcccctgtttccggaggtccgcttcccggcccccagattctggcatcccagccctcagtgtccaagacccaggcagcccgggtccccgcctcccggatccaggcgtccgggatctgcgccaccagaacctagcctcctgcagacctccgccatctgggggcactcaacctcctggagccaagggccccacgtcccacccagagaaactctcgtattcccagctcctagggccaaggaacccgggcgctccgaactcccagctttcggacatctggcacacggggcagagcagagaagcctcagcgcccagcctggggaatttaaacactccagcttccaagagccaaggaacttcagtgctgtgaactcacaactctaaggagccctccaaagttccagtctccaggtgctgttactcaactcagtcctaggaacgtcgggtcctgggaaggagcccaagcgctcccagccagcttccaggcgctaagaaaccccggtgcttcccatcatggtggccgatcctcctcgagactccaaggggctcgcagcggcggagcccaccgccaacgggggcctggcgctggcctccatcgaggaccaaggcgcggcagcaggcggctactgcggttcccgggaccaggtgcgccgctgccttcgagccaacctgcttgtgctgctgacagtggtggccgtggtggccggcgtggcgctgggactgggggtgtcgggggccgggggtgcgctggcgttgggcccggagcgcttgagcgccttcgtcttcccgggcgagctgctgctgcgtctgctgcggatgatcatcttgccgctggtggtgtgcagcttgatcggcggcgccgccagcctggaccccggcgcgctcggccgtctgggcgcctgggcgctgctctttttcctggtcaccacgctgctggcgtcggcgctcggagtgggcttggcgctggctctgcagccgggcgccgcctccgccgccatcaacgcctccgtgggagccgcgggcagtgccgaaaatgcccccagcaaggaggtgctcgattcgttcctggatcttgcgagaaatatcttcccttccaacctggtgtcagcagcctttcgctcatactctaccacctatgaagagaggaatatcaccggaaccagggtgaaggtgcccgtggggcaggaggtggaggggatgaacatcctgggcttggtagtgtttgccatcgtctttggtgtggcgctgcggaagctggggcctgaaggggagctgcttatccgcttcttcaactccttcaatgaggccaccatggttctggtctcctggatcatgtggtacgcccctgtgggcatcatgttcctggtggctggcaagatcgtggagatggaggatgtgggtttactctttgcccgccttggcaagtacattctgtgctgcctgctgggtcacgccatccatgggctcctggtactgcccctcatctacttcctcttcacccgcaaaaacccctaccgcttcctgtggggcatcgtgacgccgctggccactgcctttgggacctcttccagttccgccacgctgccgctgatgatgaagtgcgtggaggagaataatggcgtggccaagcacatcagccgtttcatcctgcccatcggcgccaccgtcaacatggacggtgccgcgctcttccagtgcgtggccgcagtgttcattgcacagctcagccagcagtccttggacttcgtaaagatcatcaccatcctggtcacggccacagcgtccagcgtgggggcagcgggcatccctgctggaggtgtcctcactctggccatcatcctcgaagcagtcaacctcccggtcgaccatatctccttgatcctggctgtggactggctagtcgaccggtcctgtaccgtcctcaatgtagaaggtgacgctctgggggcaggactcctccaaaattacgtggaccgtacggagtcgagaagcacagagcctgagttgatacaagtgaagagtgagctgcccctggatccgctgccagtccccactgaggaaggaaaccccctcctcaaacactatcgggggcccgcaggggatgccacggtcgcctctgagaaggaatcagtcatgtaaaccccgggagggaccttccctgccctgctgggggtgctctttggacactggattatgaggaatggataaatggatgagctagggctctgggggtctgcctgcacactctggggagccaggggccccagcaccctccaggacaggagatctgggatgcctggctgctggagtacatgtgttcacaagggttactcctcaaaacccccagttctcactcatgtccccaactcaaggctagaaaacagcaagatggagaaataatgttctgctgcgtccccaccgtgacctgcctggcctcccctgtctcagggagcaggtcacaggtcaccatggggaattctagcccccactggggggatgttacaacaccatgctggttattttggcggctgtagttgtggggggatgtgtgtgtgcacgtgtgtgtgtgtgtgtgtgtgtgtgtgtgtgtgtgtgttctgtgacctcctgtccccatggtacgtcccaccctgtccccagatcccctattccctccacaataacagaaacactcccagggactctggggagaggctgaggacaaatacctgctgtcactccagaggacattttttttagcaataaaattgagtgtcaactatttaa

SEQ ID NO: 1384 - DNA, 1524 bp, Homo sapiens
cgcgcacgcccagcgagttccagaggcgccagtggaagctgcggcggcggtgtctcgcgttcggcgggatttctcttcgctccggctcggcctaggtctacgtccccagctccagccgccggctcggactcggtctctgacccccaactcggtcccctagtccggccccggctccgggccccccaaccctcgctccggcccggcccggcccccaccccagccctgccgcccggccccaggcccggccgcggccgctcccgcctggagccgccgcgcgcccccagcccccctgcaccccctcggcccctcgccttcctcttcccggcgcggccccccggcttccgcgcgccgcccgccaccaatcctcttgctaccatgtccgtggagctcgaggaggccctgccagtgacgaccgccgagggaatggccaagaaggtgaccaaggctggcggctcggcggcgttgtccccatctaagaagaggaagaatagcaagaagaagaaccagccgggcaagtacagccagctggtggtggagaccatccgtaggctgggcgagcgcaacggctcgtcgctggccaagatctacaccgaggccaagaaggttccgtggttcgaccagcagaatgggcgcacctacctcaagtactcgatcaaggcgctggtgcagaacgacacgcttctgcaggtgaagggcaccggcgccaacggttccttcaagctcaaccgcaagaagctggagggcggcggggagcggcgcggagccccggcggccgccaccgccccggcccccaccgcgcacaaagcgaagaaggcagccccgggcgcggccggctcccggcgcgcggacaagaagcccgccaggggccagaagccggagcagcgctcgcacaagaagggcgctggcgccaagaaggacaaaggcggcaaggccaagaagacggcggccgccgggggcaagaaggtgaagaaggcggccaagcccagcgtccccaaagtgcccaagggccgcaagtgagcgtgtcggccggtcagagcggccggcgtgggcttttcggtgtttttgtttttctaccccaagtgacgtagattttgtacggctcacgccggccggggccgcgaggcctggtctgagcctcagggaggggccccgggtcctctcagtctttcccctcccccaacgatgtagcgtttttcgttgtttgctttaggtttttgaaacagccccggcgacgcctctattggctctcggccttggcaacggccgtcgtcatggttactggcccctaggcgccgatggccgaggccgcgcctgcccaccgggcggggtcgctggttggccgggcccaggcgcgcggggacgcggaggccgcgcatcctttcccagctccccaccctccttgcctttgggtgcgcgacaaacaatcgctccgggctcagggctgcgcggctcttcccttcattccatgggcctttttttgggcacaataaagcgtttaaacctttcaaaaaaaaaaaaaaaaaa

SEQ ID NO: 1385 - DNA, 5811 bp, Homo sapiens
agctgctacgccacagcccagcggcggccattcgcggaaaaagaggcagagcctgtgccagctacagcctcctccgagccaccgcgggcgggcgggaccggcctctcctcccgcctcgcccccacccccacccacctctatcccagtgtctccgtctgagggtttgtcctgttaatgcgggatgagcgatcagaagaaggaggaggaggaggaggcggcagcggcagcggcgatggctacagaaggagggaaaacctctgagccagagaataacaataaaaaacccaaaacctcaggctcccaggactctcagccctctcctctggctttactggcagctacttgcagcaaaatagggactcctggtgaaaatcaagcaactggacaacaacaaattattatagatccaagtcaaggattggtgcaacttcaaaatcaaccacaacagctagaactggtaacaacgcaacttgctggaaacgcttggcaacttgttgcctccactcctcctgcttcaaaagagaataacgtttctcaaccagcctctagttcgtctagttcttccagcagtaataacgggagtgcatctcctacaaaaactaaatcaggtaattcttccacccctggtcaatttcaagtcatacaagtacaaaatccaagtggtagtgtacagtaccaagtaattccacaacttcagacagtggaaggtcaacaaattcaaatcaatccaactagtagttcatctctacaggatttgcagggtcaaattcagctcatttctgcaggtaataatcaagctatactcacagctgctaacaggacagcttctgggaatattcttgctcaaaacctggcaaatcagacagttccggtccaaattagacctggtgtttcaataccactgcagttacagactcttcctggtactcaggctcaagttgtaacaaccctaccaattaacattggaggagtgactctagctttgccagtgataaacaacgtggctgccggaggagggactgggcaggttggccagcctgctgctactgctgatagtgggacttccaatgggaatcaattagtttccacacccaccaacaccactacttctgccagtactatgccagaatctccctcctcctccactacctgcacaaccactgcttcaacgtctttgacaagcagtgacacattagtgagctcagcagatactggccagtatgcaagcacatcagccagtagttctgaacgcaccattgaagaatctcaaacacctgctgctactgagtctgaagcccagagctccagtcagcttcagcctaatggaatgcagaatgcacaggatcaatcaaattctcttcagcaggtgcaaattgtaggccaacctatcttacagcagatccagatccaacagcctcagcaacagatcattcaggctattccaccacagtcgtttcaactccagtcagggcagacgattcagaccatccagcagcagcctttacagaatgttcaacttcaagcagtaaatccgactcaggtgcttatcagggctccaactttaacaccttcagggcaaatcagttggcaaactgtacaggttcagaatattcagagtctttcaaatttgcaagttcagaatgctgggttatcccaacaattaaccatcaccccagtgtcttcaagtggtggcacaactcttgctcagattgctcctgtggctgttgctggtgccccaataactttgaatactgcccagcttgcatcagtgcctaaccttcagacagtgagcgttgccaacctgggtgctgcaggtgttcaagtgcagggagttcccgttacaatcactagtgttgcaggtcagcagcaaggacaagatggagtaaaagtccagcaagctactatagctcctgtaactgtagcagttggaggaattgctaatgccacgataggtgctgttagtcctgaccaactcacacaagtgcatttgcagcaaggccagcagacttctgatcaagaggtacaacctggcaagaggcttcgaagagttgcctgttcctgtcctaattgtagggaaggagaaggaagaggcagtaatgaaccaggaaaaaagaagcagcatatctgtcatattgaaggatgtggtaaagtttatggcaaaacatctcatttacgagcacatcttcgctggcatactggagaaagaccttttatatgcaactggatgttttgtggcaaaagattcacacggagtgatgagctccagagacatagaagaacccatacaggtgaaaagagatttgaatgcccggaatgttctaaaaggtttatgcggagtgatcatctctccaaacatgtcaaaacgcaccagaataaaaaaggtggtgggacagctcttgccattgttacctcgggagaactggactcatctgttacagaggtgcttggctccccaagaattgtcacagttgcagccatttctcaagattcgaatccagcaactcccaatgtttcaaccaacatggaagaattctgaaaagttatttataacagagacctctagtgctgcacttgtttacacacctttgaaaatctggaaatgggctggtcaagtggattacagagtaggaaattatgttttcattcttggcttctttaagtattccagggtttggggtcaacacgtgaagtgttgaattttaaaaaatacaaaaagcagactgatgtactggaaacagaaaagtatttcctccatactataagttgtagttgtttggaaatatatcacataacctttatacagaatcttcccatctcttaatatcatgtgttaacatgtttaaaaagaccttagtagtttgcaggctggaccttaattggacttattttctttgaaagtactttgttataaattcagtcagtaataatttacgtgtattctttttctctatagcacagaaaacagatagttaactgatgatagggataatactgtatttccttagcttgatttttggaaaatcaaccgaaaatagtttggccgtcttttctaaatgttagaaattcttcaacagttgaattaggtaagttccaaaacagtaatctgagatgcatctcagatctttattaccactacattatagtagtgtgtatgcagacaatcagtgaagtccaattactttctccatttggagacacaagaggaacatagagttaaatcttaggttaaattttaggttgacaccttaggaaaatgctgggaaaaaaatggttaaaacaaaactcatcatagcttcagaaaaataaaatgaggcatcttaacatgcaatgttctaaagttaggattgattatattcctaaccctaggttgaaccacaaaatttcatttaaaatgtttatatttggaaatatttgcatagagtgtaaattgttctgtagtttcatattttgtaaatatgagttatgttgacaatgtgcagaattctttatgctttgatgtggtagccaaagaaagaattacacttttttccaaggccagcagaaaattctcttttaactacattgtaattcttgttttcctctactaaaaattggccagtcccattttatttctagtgctatgtaagaaggtaattaggaattataacacagtaatgtttttatgttacatcaataactgaattttccctaaaaattagcctaatatataatagatatattatgaagcaaaacttttatttttgaaaaggcagaataattttcagtgaagtaagtgactaaagaaaaaaactatattattgtttatgcaagggtcttacaggaaagggtctttttttttttttttttgagatggagtctcgctctcttgcccaggctggagtgcaatggcacgatctcagcttactgcaaccgccgcctcccaggttcaagcgattctcctgtcttagcctcctgagtagctgggattaacaggcgcctgccaccatgcctggctaatttttgtatttttagtagagacagggtttcgccatgttggccaggctggtttcaaactcctgacctcaggtgatctgcccacctcggcctcccagagtgctgggattacaggcatgagccaccatgcccggctaggaaagggtcttactaggaaagatggccaaaagtttcatatgaaaaaaattggattataaaccagtaacttaaatattaataaggatattttatgttttaaaaaagtatttacacagaatcataatcagtgaaattgaccatttgaaaactaaaagtttttacctacctgctcaatttattaacatcattgctttggggactgtttgaatataggtacgtgttttcttgtgcattctctataatttcaggaaaagtactaatgcgaattctcttccaaaattgtgatgtttcttgtatttttgatgaaggagaaatactgtaatgatcactgtttacactatgtacactttaggccagccctttgtagcgttatataaaactgaaggtcttttgtgctttcagtttgtataaaaaagctttgagattaaaggaaaaaaaaaatttttacactgtggttataaatttcaagtttcttaaagcttttgtagacttgtaacagagtctttaaatttaagttggattttgtaaattgttttgtatattttatttaatgtactcttaacaactgatgtatctggctttaaaacatcagaattggtttgttgttttgtttggtacagaggagcatttggtagtgttcattttaattttattatataggagctgaaacatcaaatatatattttatctatcattatgctacacaatcagtgctataaatttttttatgcaaagaaactttcttaatgttttaatcatgtttcctcagagtgacactttttgttgttgttaataccaagtatgaacactctgcatcattattccatgaaccagttctaatgcaaacctatgtatgtccattagaaatggaagttattttttaatcaacaatgaggcctattataaatttatcagatgaatctagatagctttatagcatataaaatatgttaatttgtgttagcaggtgcacatttcaccactgaaattagaaatattttgacagtctgttctgcataccattctgagtctacttttctgtctttagaagaatcgtaaatttcagtgtcctttatttgactcagtgggatatagctgttataagtaatagggcacagatgtgcagtagagtcttgtttaatggcatttcactgttcattccctttaccaccgttataaaacttttctttattgtaattatcagtgcaaagctatgtatttatcatggtaaaactccagtgttagaatagttttttcttacagtatactttctttggttaggtttgtgtatgtgttgctgattacattagaacttgatgttaagtcatttatcacactctcatgagagcagtaataaaagtgtgtaatctaggagaaaaagttaatttgtcaaacttagataagcatgatgtttaggtcctatttttcaattttataactgttttattgcaacaatatttgtatttaagtctccattttaatgccttgtggtgtttttttatgcatgtcactaagttgtcatcccacataaattgatgtgcagcatagggtattaaatctacataatgattttaaaacagaaatagttgatggtaaaatgtaaatgttttgcaaaaattccttataaaaagttttgtagtaacatttcacttgtaaattttttttgtaaaaaaaaaaaaa

SEQ ID NO: 1386 - DNA, 697 bp, Homo sapiens
gcagcgccttttacggcgccgtaaagcagctcggccgagcagactgctgcggttcctgggtggcggcggcatggaggcgcgcttcacgcgcgggaagtcggcgctgctggagcgcgcgctggcgcggccgcgcaccgaggtgagcctgagcgccttcgcactgctgttctccgagctggtacagcactgccagagccgcgtcttctccgtggccgagctgcagtcgcgcctggccgcgctgggccgccaggtgggcgcgcgcgtgctggatgcgctggtggcgcgcgaaaagggtgcccggcgtgagaccaaggtgctaggcgcgttgctcttcgtcaagggcgccgtgtggaaggcgctcttcggcaaggaggcggacaagctggagcaggccaacgatgacgcgcgcaccttctacatcatcgagcgcgagccgctcatcaacacctacatctccgtgcccaaggagaacagcacgctcaactgcgccagcttcacggcgggcatcgtggaggcggtgctcacacacagcggcttccctgccaaggtcacggcgcactggcacaagggcaccacgctcatgatcaagttcgaggaggcagtcatcgctcgagaccgggccctggagggccgctgaccctgccggagataaaggatacagagagcccctccccacgtgaaaaaaaaaaaaaaaaaa

SEQ ID NO: 1387 - DNA, 2861 bp, Homo sapiens
ggttggggtttgggggaggagatccgctcacacacaagaggagagtgttgagccgccatatctgctgctgccgccgcagttgcgaatgcagcatcggcgcttagctgcctccgcggtgcagctaaggttcgtgtcgctaccccttggcccttcgctcttgctgccttaaccccgccggcggagcccgctcttctggcctgttgagcccgctccctcactgccacacagcaagttccgagaccatggattcgggcagcagcagcagcgactcggcgcccgattgctgggaccaggtggacatggaatccccggggtcggccccgagcggggatggagtctcctctgcggtggccgaggcccagcgcgagcccctcagctcggctttcagccgtaagctcaacgtcaacgccaagcccttcgtgcctaacgtacacgccgcggagttcgtgccgtccttcctgcggggcccgactcagccgcccaccctcccggccggctccggcagcaacgatgaaacctgcaccggcgcgggataccctcaaggtaaaaggatgggacggggggcacctgtggaaccttcccgagaggaaccgttagtgtcgcttgaaggttccaattcagccgttaccatggaactttcagaacctgttgtagaaaatggagaggtggaaatggccctagaagaatcatgggagcacagtaaagaagtaagtgaagccgagcctgggggtggttcctcgggagattcagggcccccagaagaaagtggccaggaaatgatggaggaaaaagaggaaataagaaaatccaaatctgtgatcgtaccctcaggtgcacctaagaaagaacacgtaaatgtagtattcattggccatgtagacgctggcaagtcaaccatcggaggacagataatgtttttgactggaatggttgacaaaagaacactggagaaatatgaaagagaagctaaggaaaaaaacagagaaacctggtatttgtcctgggccttagatacaaatcaggaggaacgagacaagggtaaaacagtcgaagtgggtcgtgcctattttgaaacagaaaggaaacatttcacaattttagatgcccctggccacaagagttttgtcccaaatatgattggtggtgcttctcaagctgatttggctgtgctggtcatctctgccaggaaaggagagtttgaaactggatttgaaaaaggtggacagacaagagaacatgcgatgttggcaaaaacggcaggggtaaaacatttaatagtgcttattaataagatggatgatcccacagtaaattggagcatcgagagatatgaagaatgtaaagaaaaactggtgccctttttgaaaaaagtaggcttcagtccaaaaaaggacattcactttatgccctgctcaggactgaccggagcaaatattaaagagcagtcagatttctgcccttggtacactggattaccatttattccgtatttggataacttgccaaacttcaacagatcaattgatggaccaataagactgccaattgtggataagtacaaagatatgggcactgtggtcctgggaaagctggaatccgggtccatttttaaaggccagcagctcgtgatgatgccaaacaagcacaatgtagaagttcttggaatactttctgatgatactgaaactgattttgtagccccaggtgaaaacctcaaaatcagactgaagggaattgaagaagaagagattcttccaggattcatactttgtgatcctagtaacctctgccattctggacgcacgtttgatgttcagatagtgattattgagcacaaatccatcatctgcccaggttataatgcggtgctgcacattcatacttgtattgaggaagttgagataacagcgttaatctccttggtagacaaaaaatcaggagaaaaaagtaagacacgaccccgcttcgtgaaacaagatcaagtatgcattgctcgtttaaggacagcaggaaccatctgcctcgagacgttcaaagattttcctcagatgggtcgttttactttaagagatgagggtaagaccattgcaattggaaaagttctgaaattggtcccagagaaggactaagcaattttcttgatgcctctgcaagatactgtgaggagaattgacagcaaaagttcaccacctactcttatttactgcccattgattgacttttcttcatattttgcaaagagaaatttcacagcaaaaattcatgttttgtcagctttctcatgttgagatctgttatgtcactgatgaatttaccctcaagtttccttcctctgtaccactctgcttccttggacaatatcagtaatagctttgtaagtgatgtggacgtaattgcctacagtaatgaaaaattaatgtactttaatttttcattttcttttaggatatttagaccacccttgttccacgcaaaccagagtgtgtcagtgtttgtgtgtgtgttaaaatgataactaacatgtgaataaaatactccatttgaaactcttcggttatttgaaatgcttttgaataatgtttaaatgtcattatgtaatgctattcaattagctttattactttctcaaatagttgaatatgttctatcacttaaaaacttaaaaactcttcaccacttactgttttaagtgaggaatttacaaacaatgcataagtgtgtattaaaggaataattttaattttgagaaaaaaacgtatgttaaggctcttcccagtgggctttgttttctctgtccaagtccagtcaataaaggagctcttctgcttccccacttgtgatttgaaaaaaaaaaaaaaaaa

SEQ ID NO: 1388 - DNA, 846 bp, Homo sapiens
acctctcaagcagccagcgcctgcctgaatctgttctgccccctccccacccatttcaccaccaccatgacaccgggcacccagtctcctttcttcctgctgctgctcctcacagtgcttacagttgttacgggttctggtcatgcaagctctaccccaggtggagaaaaggagacttcggctacccagagaagttcagtgcccagctctactgagaagaatgcttttaattcctctctggaagatcccagcaccgactactaccaagagctgcagagagacatttctgaaatggctgtctgtcagtgccgccgaaagaactacgggcagctggacatctttccagcccgggatacctaccatcctatgagcgagtaccccacctaccacacccatgggcgctatgtgccccctagcagtaccgatcgtagcccctatgagaaggtttctgcaggtaatggtggcagcagcctctcttacacaaacccagcagtggcagccacttctgccaacttgtaggggcacgtcgcccgctgagctgagtggccagccagtgccattccactccactcaggttcttcagggccagagcccctgcaccctgtttgggctggtgagctgggagttcaggtgggctgctcacagcctccttcagaggccccaccaatttctcggacacttctcagtgtgtggaagctcatgtgggcccctgagggctcatgcctgggaagtgttgtggtgggggctcccaggaggactggcccagagagccctgagatagcggggatcctgaactggactgaataaaacgtggtctcccactgcgccaaaaaaaaaaaaaaaaaa

SEQ ID NO: 1389 - DNA, 1125 bp, Homo sapiens
ctctctttcactgcaaggcggcggcaggagaggttgtggtgctagtttctctaagccatccagtgccatcctcgtcgctgcagcgacacacgctctcgccgccgccatgactgagcagatgacccttcgtggcaccctcaagggccacaacggctgggtaacccagatcgctactaccccgcagttcccggacatgatcctctccgcctctcgagataagaccatcatcatgtggaaactgaccagggatgagaccaactatggaattccacagcgtgctctgcggggtcactcccactttgttagtgatgtggttatctcctcagatggccagtttgccctctcaggctcctgggatggaaccctgcgcctctgggatctcacaacgggcaccaccacgaggcgatttgtgggccataccaaggatgtgctgagtgtggccttctcctctgacaaccggcagattgtctctggatctcgagataaaaccatcaagctatggaataccctgggtgtgtgcaaatacactgtccaggatgagagccactcagagtgggtgtcttgtgtccgcttctcgcccaacagcagcaaccctatcatcgtctcctgtggctgggacaagctggtcaaggtatggaacctggctaactgcaagctgaagaccaaccacattggccacacaggctatctgaacacggtgactgtctctccagatggatccctctgtgcttctggaggcaaggatggccaggccatgttatgggatctcaacgaaggcaaacacctttacacgctagatggtggggacatcatcaacgccctgtgcttcagccctaaccgctactggctgtgtgctgccacaggccccagcatcaagatctgggatttagagggaaagatcattgtagatgaactgaagcaagaagttatcagtaccagcagcaaggcagaaccaccccagtgcacctccctggcctggtctgctgatggccagactctgtttgctggctacacggacaacctggtgcgagtgtggcaggtgaccattggcacacgctagaagtttatggcagagctttacaaataaaaaaaaaactggcttttctgacaaaaaaaaaaaaaaaa

SEQ ID NO: 1390 - DNA, 2848 bp, Homo sapiens
ggggttagcgcctgcgctctggacggctttggggcagggcagatttatatctgcgggggatcagctgacgctccgcattgcagactgcggagtcagacggcgctatgtacgccctcttcctcctggccagcctcctgggcgcggctctagccggcccggtccttggactgaaagaatgcaccaggggctcggcagtgtggtgccagaatgtgaagacggcgtccgactgcggggcagtgaagcactgcctgcagaccgtttggaacaagccaacagtgaaatcccttccctgcgacatatgcaaagacgttgtcaccgcagctggtgatatgctgaaggacaatgccactgaggaggagatccttgtttacttggagaagacctgtgactggcttccgaaaccgaacatgtctgcttcatgcaaggagatagtggactcctacctccctgtcatcctggacatcattaaaggagaaatgagccgtcctggggaggtgtgctctgctctcaacctctgcgagtctctccagaagcacctagcagagctgaatcaccagaagcagctggagtccaataagatcccagagctggacatgactgaggtggtggcccccttcatggccaacatccctctcctcctctaccctcaggacggcccccgcagcaagccccagccaaaggataatggggacgtttgccaggactgcattcagatggtgactgacatccagactgctgtacggaccaactccacctttgtccaggccttggtggaacatgtcaaggaggagtgtgaccgcctgggccctggcatggccgacatatgcaagaactatatcagccagtattctgaaattgctatccagatgatgatgcacatgcaggatcagcaacccaaggagatctgtgcgctggttgggttctgtgatgaggtgaaagagatgcccatgcagactctggtccccgccaaagtggcctccaagaatgtcatccctgccctggaactggtggagcccattaagaagcacgaggtcccagcaaagtctgatgtttactgtgaggtgtgtgaattcctggtgaaggaggtgaccaagctgattgacaacaacaagactgagaaagaaatactcgacgcttttgacaaaatgtgctcgaagctgccgaagtccctgtcggaagagtgccaggaggtggtggacacgtacggcagctccatcctgtccatcctgctggaggaggtcagccctgagctggtgtgcagcatgctgcacctctgctctggcacgcggctgcctgcactgaccgttcacgtgactcagccaaaggacggtggcttctgcgaagtgtgcaagaagctggtgggttatttggatcgcaacctggagaaaaacagcaccaagcaggagatcctggctgctcttgagaaaggctgcagcttcctgccagacccttaccagaagcagtgtgatcagtttgtggcagagtacgagcccgtgctgatcgagatcctggtggaggtgatggatccttccttcgtgtgcttgaaaattggagcctgcccctcggcccataagcccttgttgggaactgagaagtgtatatggggcccaagctactggtgccagaacacagagacagcagcccagtgcaatgctgtcgagcattgcaaacgccatgtgtggaactaggaggaggaatattccatcttggcagaaaccacagcattggtttttttctacttgtgtgtctgggggaatgaacgcacagatctgtttgactttgttataaaaatagggctcccccacctcccccatttctgtgtcctttattgtagcattgctgtctgcaagggagcccctagcccctggcagacatagctgcttcagtgccccttttctctctgctagatggatgttgatgcactggaggtcttttagcctgcccttgcatggcgcctgctggaggaggagagagctctgctggcatgagccacagtttcttgactggaggccatcaaccctcttggttgaggccttgttctgagccctgacatgtgcttgggcactggtgggcctgggcttctgaggtggcctcctgccctgatcagggaccctccccgctttcctgggcctctcagttgaacaaagcagcaaaacaaaggcagttttatatgaaagattagaagcctggaataatcaggctttttaaatgatgtaattcccactgtaatagcatagggattttggaagcagctgctggtggcttgggacatcagtggggccaagggttctctgtccctggttcaactgtgatttggctttcccgtgtctttcctggtgatgccttgtttggggttctgtgggtttgggtgggaagagggccatctgcctgaatgtaacctgctagctctccgaaggccctgcgggcctggcttgtgtgagcgtgtggacagtggtggccgcgctgtgcctgctcgtgttgcctacatgtccctggctgttgaggcgctgcttcagcctgcacccctcccttgtctcatagatgctccttttgaccttttcaaataaatatggatggcgagctcctaggcctctggcttcctggtagagggcggcatgccgaagggtctgctgggtgtggattggatgctggggtgtgggggttggaagctgtctgtggcccacttgggcacccacgcttctgtccacttctggttgccaggagacagcaagcaaagccagcaggacatgaagttgctattaaatggacttcgtgatttttgttttgcactaaagtttctgtgatttaacaataaaattctgttagccagaaaaaaaaaaaaaaaaaa

SEQ ID NO: 1391 - DNA, 931 bp, Homo sapiens
tttcgtcggcccgccccttggcttctgcactgatggtgggtggatgagtaatgcatccaggaagcctggaggcctgtggtttccgcacccgctgccacccccgcccctagcgtggacatttatcctctagcgctcaggccctgccgccatcgccgcagatccagcgcccagagagacaccagagaacccaccatggccccctttgagcccctggcttctggcatcctgttgttgctgtggctgatagcccccagcagggcctgcacctgtgtcccaccccacccacagacggccttctgcaattccgacctcgtcatcagggccaagttcgtggggacaccagaagtcaaccagaccaccttataccagcgttatgagatcaagatgaccaagatgtataaagggttccaagccttaggggatgccgctgacatccggttcgtctacacccccgccatggagagtgtctgcggatacttccacaggtcccacaaccgcagcgaggagtttctcattgctggaaaactgcaggatggactcttgcacatcactacctgcagttttgtggctccctggaacagcctgagcttagctcagcgccggggcttcaccaagacctacactgttggctgtgaggaatgcacagtgtttccctgtttatccatcccctgcaaactgcagagtggcactcattgcttgtggacggaccagctcctccaaggctctgaaaagggcttccagtcccgtcaccttgcctgcctgcctcgggagccagggctgtgcacctggcagtccctgcggtcccagatagcctgaatcctgcccggagtggaagctgaagcctgcacagtgtccaccctgttcccactcccatctttcttccggacaatgaaataaagagttaccacccagcagaaaaaaaaaaaaaaaa

SEQ ID NO: 1392 - DNA, 1736 bp, Homo sapiens
acaattgctctacagctcagaacagcaactgctgaggctgccttgggaagaggatgatcctaaacaaagctctgatgctgggggccctcgccctgaccaccgtgatgagcccttgtggaggtgaagacattgtggctgaccatgttgcctcttacggtgtaaacttgtaccagtcttatggtccctctgggcagtacagccatgaatttgatggagacgaggagttctatgtggacctggagaggaaggagactgtctggcagttgcctctgttccgcagatttagaagatttgacccgcaatttgcactgacaaacatcgctgtgctaaaacataacttgaacatcgtgattaaacgctccaactctaccgctgctaccaatgaggttcctgaggtcacagtgttttccaagtctcccgtgacactgggtcagcccaacaccctcatctgtcttgtggacaacatctttcctcctgtggtcaacatcacctggctgagcaatgggcactcagtcacagaaggtgtttctgagaccagcttcctctccaagagtgatcattccttcttcaagatcagttacctcaccttcctcccttctgatgatgagatttatgactgcaaggtggagcactggggcctggatgagcctcttctgaaacactgggagcctgagattccagcacctatgtcagagctcacagagactgtggtctgtgccctggggttgtctgtgggcctcgtgggcattgtggtggggaccgtcttgatcatccgaggcctgcgttcagttggtgcttccagacaccaagggcccttgtgaatcccatcctgaaaaagaaggtaagtttgagatttgttagagctgaagctgcaggaaggaaagtgggaggaggctgtggacatgaatgtggttgaaagttgtaggggaattgggaagtggcatgatgatgacacaggagcccccttggacccatcgatctcatgtctgtcctgttgcaggtgcatcaccatctacagcagcggaagagtggacttgctacatgacctagcactattctctggcccgatttatcataccctttttctcctgcaaatgtttctcctcttaccttttctctgctttttttttcttaagcttctgtatcccctcagagctcacaaatgcctttgaattctttccctgacctcctgatttttttttcttttctcaggtgttacctactaagagatgcctggggtaagccgcccagctacctaattcctcagtaacatcgatctaaaatctccatggaagcaataaattccctttaagagatctatgtcaaatttttctatctttcatccggggctgactgaacctatggctaagaattgtgacactctcatgtttcaagccaatttcatctcatttcccagatcatatttcatatccagtaacacagaagcaaccaagtacaatatagcctgataatatgttgatttcttagctgacattaatatttctttcttctttgtgttctcacccttggcactgccgcccatccctcaattcaggcaacaatgaagttaatggatactctctgccctttgctcagaattgttatagcaaaaattttaaaaccaaaaaataagtttgtactaatttcaatatggcttttaaaagtatgatggagaaataaattaggataaaggaactttgaatcacaaaaatatcaaaagtaaaaatttattctca

SEQ ID NO: 1393 - DNA, 291 bp, Homo sapiens
atggtgctacccacagatccagctgcagctggtcctttaggtccatggggatccatgtcttctggaccttgggtgccaggaatgggagggcagtatcctacccctaatatgccctatccatctccagggccatatcctgttcctcctcctccccaagcctctggggcagcaccacctgttccatggggcaccgttccactaggagcctggggaccaccagcaccatatcctgcccctacaggatcgtatcccacaccaggactctatcctactcctagtaatcctttctaa

SEQ ID NO: 1394 - DNA, 238 bp, Homo sapiens
ttttttttttttttttttttattataaattaatttcaaaaccaagttctgaggttaaataatgattgtatttgttaatcaatccaacctgggtttccttccaaaagaaaacagggtactattatcaaaatgttggaaacaggatgtttgaaactgtggggttcattaattgcagtgatgtgaagggtcctgacagcactaatgctgatatctttttatgaaacaggcatgtgctttga

SEQ ID NO: 1395 - DNA, 2267 bp, Homo sapiens
agatcagctgatgggggaggcggctccgcagccgcctagaggccccagccgccgagcgcttcgtcccggccctaagtctcggagactggccaagatcaccgcttgcaccgcgctgttgggcgaggcccggtcccgtctctttcccaggcctgagattctcgcccggcacggccgccctgagcgccccggccacccccagccccggctcgcccctcaggccccgggcctcccctcaacccccggccggcggcccaggccccggatccgcggggggggacccggccccggggggtgcgggccccatggagctgatgtttgcagagtgggaggacggagagcgcttctcattcgaggattcggaccgttttgaggaggattcactctgttccttcatctccgaggccgagagcctctgccagaactggcggggatggcgcaaacagtcagcggggcccaattcccccactggcggcggtggcggaggtggcagtggcggtaccagaatgcgaggtgagagtgagctggggggaagaggagcggcaggccctgcttgggcctcgctcgggagctgtccgggaccaggagctgtccccgaccaagagctctcttcaaccaggggaagaaaggggagctgtccccggccgggagctgtccccgactgggagctgtcccaagcttagaacagacttcagaactcgcttttccggccttcctggggtgggctggcttctccacacctgtgtgtgtgtgggtgtgtgtgtgtgtgtgtgcgcgcgcgcgcgtgcgcgcgctgtgacagggagatcctgtggacagaaagtaaatctttcgtcactcctttgccttagagaggggataagggagaagaatcttgtctttgacttgggaatacttaagtgagttcagtctgaggcataccggaaagtagaggaagagaatgtgggtagggggctgattgtgaagaagtgaccacttgtggcttgtcaccgcattgcaaagtgcattgggagcttcttgcttcggggtgatgatctctgatcccagaagcaccaagaagggatcctacccagaggaaaatagaggtgaactggcctgccagagagtccatagttcataggtttagatcatagactttgcttctggccatgtcaaatatctgtcagaagccaaggctgggacttgcctgctgtgccttcctcatggcacagtttttgtcctggtcctcagtggaagctggcttttttcagcagttgagatgtttaatttgtgtgattctactcaggcctttccaagagtcctgttttccaaactggcttgtggagatttctggtgctcctttgggacagagagaaatttacatatatcacttttttttttttgagacggagttttgctcttgttgcccaggctggagtgcaacggcacgatctcggctcaccgcaacctccgcctccccagttcaagcgattctcctgcctcagcctcctgagtagctgggattacaggcatgtgtcaccatgcccggctaatttttgtatttttagtggagaccgggtttctccatgttggtcaggctggtcttgaactcccgaccttaggtgatctgcgcgcctcgtgcctgtaatcccagtactttgggaggccgagtcgggtggatcacttgtggtcaggagtttgagaccagcttggccaacatggtgaaaccccatctctactaaaaatacaaaagattcgctgggtgtgttggcacccgcttgtaatctcagctacttgggaggctgaggtggggggtaagtttgaacccaggagggagaggttgtggtgagccaagatggcaccattgcactccagcctgggtgacagagtgagacttcatctcaaaataaataaataaaaatcaaaaaaataaaataaaggggttaactcttctaaaaaggttctttttaattctatgattttctgatctattaatgtgactagcaattttgtgagatgtagtttgtcatgttatcactactttttggttaaaacactgtggaaaaccttgagtggtaactttatcttagtccaggtgattccagttgcagcagtagctaggtgccctgcgataactctctccccttgagggtttccagtgtgggaagttgtcatttaggcgcgccaaaagtggtctggcctctcgtgcttcttgagatcccttccgggctctggtctatcttgtctccttagctgggggcctacagtcatctagagtaaaagggatggtt

SEQ ID NO: 1396 - DNA, 2438 bp, Homo sapiens
atgtttgtttcacattcagtcctaaagccttgagctatgtgtacttccctcacacaggaacaccagctgtcctgtctgtgctctgcctgcgcccaaaactcaatattttctctcagcacagaagtcaaaaatgagatatgccccttataaaaccccttcgattcctgagaaaacataataaagccatatgttgcttccttgttggggctcctccacaatgctcccaacacctgtgacccctaggaagacagggagcaaggtggatctggccaggagtcacaggatatacacccattctggagctttcctctgttgttctagaagatgttatttgattagttggggctgggagcaggggatatatgattttgtggaaaaggtatcagataatcaaatcaggtctgcctctgctatagccagtgtgctgctgcattaaaagggaacaaaaggaaggtgcaacgtaagagcagacacaacctgagatgcccttgagatttaggagaacaggagggcgccctttctgttgtgacctgactcttaaaagaaatcttctaaaagaattctttaatttggtaatgagttgaagtccagggtaatggaagctctagggcagagaacaaaagaattgcaaaatgtattcagcaccaaacaatgctaaaccaagaaacatccaatcacaaaactaggaagtttggcaagaagtggttagagaaatctctgggcttttccatgggcagggtcgacagactctcttttcagtgatttctggctctgagaaacctctttactcactagaaaagagctttatttaaatggccaattttgttcctcagaaaaagaaattaaaaaaaaagaaaaataggatactgaagacagaaccatgtgacttggtgacaaacaaaaggaggggtgcactagaatttcaataggctccctaattccatagaaaaagcaaagcaacccaatgcctcctgagcctgcagtgcatgaagagagtgcttgagctgacccagccaccaggccttctggggctagacataacttcccactggaacagcagcagcctctttcccctctttgtgttttcatgaagaaaacggctgttctcttaggtagccaggaaatagattacatggggcaaactttcaaaagcaatctctaccctggtgctcaggctacatacagaggcagaaaaggggcacggaagagcccttgctcttgagagagagtattttcatattcccaagggctttccgtgtagagttgctatttctgatatcacttaaacctttacaagaaaaaaggctgtggtgactcagtgttcctataaattcagaatgtggaaactactaatccaaagcatcatttctagcactgagtatcaagacgatcagcctgaccaaaatattgcaaagagttttctaagtctctgaagattttttttctccttgaacactgagtctatagcagtcagcaatgtaccttagccgatccctgggaatggttatggaacagtagggcttgtttccatcctttttagagtgaagagatagaaaattagggctacctagtgtgggttctttttcagaactatgtattttctcctcactgcatgatgggtaaaaatgccctgggttgaaacaagaaacattatctttccacaccactgactaaaacacctgccagtggtttctttaggctccaccttttgctccgtaaactgtagactttcagactgaaatctaatcttaagtgacctcaattaaggtattttcacaaaaggctacttatagtgtagcattattgccttaaatcagaaagccctgggaagaggataaaagatatagaaatgagaaggctctgaagttataggcatttcttgctgtttaatagttacattatcacaaaaacaagccctattcatgattgaggactatggaaatagtgacttcttgaggaggcaccaaactttcctagaactgggtactctcagatagtggctgctatttcctattctatttcagtgacgtaggttggggctgaatgtaaaatagacatcatattactaaatagaatcctataaaatgcaatcacaggtgcccgggagtactagttttaaacatttccttaacaaggagaacaatccagcaaaaagctttctttctctatacagtgtatatctctaaactttttttcctcagttttagagaacatctgttttatctggtggttctttgtttgaatgcaaactcataactttcaagtctccggtgcaagagcataatctacagatcatgggcaaaatctagccacagtcctgagagtccaggcttctgggatgcccagctgggtataaaagtccctactaaccctgtttcaaattcagaggtttctttggtttagaatgcctcaatgagattttgatacatccaagagag

SEQ ID NO: 1397 - DNA, 1641 bp, Homo sapiens
gctttttacgacgcggcaggcgcggcgcgcttagttgccggagctgaacggcgcggagctggtctgaggcgagccgagccgagcgagcgcggcggtggggccgagaggacgcgcaggtggcggcgttgccatgtcgcacggtcacagccacggcgggggtggctgccgctgcgccgccgaacgggaggagccgcccgagcagcgcggcctggcctacggcctgtacctgcgcatcgacctggagcggctgcaatgccttaacgagagccgcgagggcagcggccgcggcgtcttcaagccgtgggaggagcggaccgaccgctccaagtttgttgaaagtgatgcagatgaagagcttctgtttaatattccatttacgggcaatgtcaagctcaaaggcatcattataatgggagaggatgatgactcacacccctctgagatgagactgtacaagaatattccacagatgtcctttgatgatacagaaagggagccagatcagacctttagtctgaaccgggatcttacaggagaattagagtatgctacaaaaatttctcgtttttcaaatgtctatcatctctcaattcatatttcaaaaaacttcggagcagatacgacaaaggtcttttatattggcctgagaggagagtggactgagcttcgccgacacgaggtgaccatctgcaattacgaagcatctgccaacccagcagaccatagggtccatcaggttaccccacagacacactttatttcctaagggctggccaaggctcccatagaggcgctgtgtcagtgaagatgtacgactacctgttgggaaggacaaagggatgaggctccagagagagttggctgccacagcctctgccaagctttgtctttggggcttgctgcagaaacctggcctacggaagatacgacaccactgggagggttgtgtaggtgccaggggaccatcgtggttctctagggcgctgtggaaattgggtcttgggctgggtggcatctggcagtcatgggtaacacttgcttttccagttaatgtggccatgtgattccaagtgtcatgttgctttgtggcaagattgttgtgtgacttgtttttttgtttttgtttttgtttttttaaaggaaactatttgtgggctataggaaactttctgatgcctccggattgtgttagtagtagccatcaggagggtctccaactaaaacacttgttcctgcttgctcctttcccctctcattgttcagcattcttgtcaagttgcccagcttggagttgtctgtcacgcacatgtgtcctgtggttatagctagaaggacaggagtctcctgctgatgcgtgatagcttaagcttggggagaaggtcttttccactgcctagctaagcagtctggggagagcatggggatcatttctatgtgtgtgggtaatctggtcagtaagattgagacttagttaagattccccttggaaattccttaatgtttattagcttctaactagtgttgtaagtccgatgccagaatttggagatttgagttcttcttttcatggcttttattcactgtgactaataagcttcctaataaatccttgccagacttaaaaaaaaaaaaaaaaaaaaa

SEQ ID NO: 1398 - DNA, 321 bp, Homo sapiens
atgtcccgctacctgcgtccccccaacacgtctctgttcgtcaggaacgtggccgacgacaccaggtctgaagacttgcggcgtgaatttggtcgttatggtcctatagttgatgtgtatgttccacttgatttctacactcgccgtccaagaggatttgcttatgttcaatttgaggatgttcgtgatgctgaagacgctttacataatttggacagaaagtggatttgtggacggcagattgaaatacagtttgcccagggggatcgaaagacaccaaatcagatgaaagccaaggaagggaggaataagatcgtatag

SEQ ID NO: 1399 - DNA, 4957 bp, Homo sapiens
ccgcgcccgcgcccccgccgccgccatgggcgtgcagggcttccaggactacatcgagaagcactgcccgagcgccgtggtgccggtggagctgcagaagctggcccggggcagcctggtgggcggcgggcggcagcggcccccgcagaccccgctgcgcctgctggtggacgccgacaactgcctgcaccgcctctacggcggcttctacaccgactgggtcagcggcggccagtggaaccacatgcttggctacctggcggcgctggccaaggcctgcttcggcggcaacatcgagctcttcgtcttcttcaacggcgcgctcgagaaggcccggctgcacgagtgggtcaagcggcagggcaacgagcgccagacggcacagcagatcgtcagccatgtccagaacaagggcaccccgccgccaaaggtctggttcctgccgcccgtctgcatggcccactgcatccgcctggcgctcatccgcttccacgtcaaggttgcacagagcattgaggatcaccatcaggaagtgattggtttctgcagagagaatggtttccatggcttggttgcgtatgactctgattatgcactgtgcaacatcccctactatttcagtgcccatgccctaaaactgagccggaacgggaaaagtctcaccacaagccaatatctgatgcatgaagttgccaagcaactggacctgaatccaaatcgttttcctatttttgctgctctcttaggaaatcacattctgcctgatgaagatctggcttcctttcactggagtttacttggtccagaacatccactagcctcactaaaggtccgggcccaccagctggtcttgccaccttgcgacgtagtgatcaaagccgttgctgactatgtacgcaacattcaggacacctctgacttggatgccatagctaaagatgttttccagcattcacagtctagaacagatgacaaagttattcgatttaagagagcaattggatattattcagcgactagtaagcctatgtcatttcatccaccacattacttagcagccagacccggtccgtttggaatgcctgggatggtgccgccgcatgttcctcctcagatgctcaacattccgcagacctctctgcaagcaaagcccgtggccccacaggtgcccagcccagggggcgccccgggccagggtccatacccgtacagcctctctgagccagcacctctcactttggacacgagcgggaagaatctgacggagcagaacagctacagcaacattcctcacgaagggaagcacacgccgctgtatgagcggtcctcgcccatcaacccggcccagagcggcagccccaaccacgtggattccgcctacttccctggctcttctacatcgtcatcttccgacaacgacgagggcagcggaggggcgacaaaccatatcagcgggaacaagattggctgggagaagacgggaagccactcagagcctcaggcacgaggagacccaggagaccaaacaaaggcagaaggctcgtccactgcctcttcaggaagccaactagccgaaggcaagggaagccagatgggcactgtccagccaatcccgtgcctcctgtcgatgcccaccaggaaccacatggacatcaccacacctcccctgccccccgtcgcacctgaggtgctgagagtggccgagcacaggcacaagaaggggctgatgtacccctacatcttccatgtcctgacgaagggtgaaatcaaaattgctgtttctattgaagatgaagccaacaaggacctgcctccggccgctctgctctataggccagttcgtcagtatgtttacggagtcctgtttagtttggcagaaagcagaaagaaaactgagagacttgcttttagaaagaacagacttccaccagaattttcaccagtgatcattaaagaatgggcagcttacaaaggaaagtctcctcaaaccccggaactggttgaagctcttgccttcagggagtggacctgccccaacctgaagaggctgtggttgggtaaggcggtagaggacaagaaccgcaggatgagggccttcctggcctgcatgaggtcggacaccccagccatgctcaaccctgccaacgtgcccactcacctcatggtgctctgctgcgtcttacggtacatggtgcagtggccgggagcacgcatccttcggcgtcaggagctagatgccttcctggctcaggcgctgtcccccaaactctacgagcctgatcagctccaggagctcaagattgagaacctagatccccgaggaattcagctatcagctctcttcatgagtggagtagacatggccttgtttgcaaatgatgcatgcggacagccaatcccctgggaacactgttgtccttggatgtattttgatgggaagctcttccaatccaaactcctcaaagccagccgggaaaagaccccactcattgacctctgtgatggtcaggctgatcaggctgccaaggtagagaagatgcgccagagcgtcctcgaggggctcagcttctccaggcagagccacacgctccctttcccgccgccacctgccctgcccttctaccctgcctctgcgtacccccggcactttgggcctgtcccaccctctcagggcaggggcagaggctttgcaggcgtctgtggctttggaggcccctatggggaaacggtagcaacaggcccttaccgtgccttccgtgtggcggcagcatcgggacactgcggagccttctcaggcagtgacagcagcaggactagcaagtcccagggcggagtccaacctataccttctcagggaggcaaactagaaatagctggcactgtggttggccattgggctgggagcaggcggggccgtgggggccgggggcctttccccctgcaggtggtttctgtcggaggaccagctagagggcgtccaagaggagttatttccaccccagtgattagaacatttggaagaggtggaaggtactatggcagaggttacaaaaaccaggcagcaattcagggcagacctccttatgctgcttcagcagaagaagtggccaaagaacttaagtcaaaatctggggaatcgaagtcctctgctatgtcttcagacgggtccctggctgaaaacggagtgatggccgaggagaagccggctccccagatgaacgggagcacgggtgacgccagggcccccagccactctgaaagtgccttgaataatgactctaaaacgtgcaatacaaatcctcatttaaatgcactaagtacagacagcgcttgccgcagagaagctgctctggaggcagctgtcttaaataaagaagagtaaacttattttttatagagggtgaaggatgctggaagggtaaggatttaggaatatctggagagaaagagagcctgcagttatgtacattttgtcctttccgtaagagaaaaatgaggactttggaaattcagatccctctttgatatcagagatttaaacaacacatttttagttttaaccagttgtagtcaaaatgctacaataaaacaaaaaagagaaagaaaatgaagagcatttgactcccgcacttaaaatgaagtacacataaagtttaaactggttatgacaaaagcctttagttgtgtttcttgaactataaagaaaacaaattttggcagtctttaagtatatatagcttaaaatataatttttagcatttggcaccatatgtatgccattatatttgattttgcattactgtttcacaatgaagctttctttaaggctttgatttttatgattatgaaagaaataaggcacaaccacagtttttctttcttaaatttcatcactgttgatgtggttcttttgtgttaaaaaaaaaaagtgcaactatcaaaactaaaaaattatagagtaatattgccgttctgctgattttaaatatacaatacatcatacatactttacaagcaagttaaatggagataaagttgaaatcatagaagatgcaaatgacctttcaaaatcaacacaatgtgttctgaaactttcgtgactaataccatgcatctgtgatcaatgaactatgtggttttgaatcggatgtagaccattagtactactacttgagctaaacttctgcatggttcataatttttaaagtgtgtagttaatatgcatgttatcgtcctttcttccattcttaacagtatgtgcccatttgcaaaacaaaaatgctaataatcagtaatagtcctataaaagatgttaactctgtttagtcattgactgatcttgctctaaccttaaaattttgtgattattgacctctgttgcatttattctaaagccccccaaaaattatctagccgtttcgaatatcaacattaccctggtgtattcactgctgtatgcattattgttctttgttgctgttttatgccttcatattagcaaatatgaaattctgtgaaaaaaaaccctttgatcttaaaaaaaaaaaaaccaccccccccttctgtagcaggaaacaaattgcttgttcttgagaactttcccatcaagaatttagtagaagcaggtatacttctatcattttgatgtttttgttaatgtttccaaacaatgtactttgaaatcagaatcacttcttatcgttttcatatacttctgatgctcttcatcacattagtgatcagaaatgaggtgtaattccccaacccctgcccgcaagagctaagtaggatcttactgtaagttgaagggagttttgccctaactcatggattgtgcaagaatgaactgctgttgggtttgattgactgtcgatggattgtggtgtggtgtatctgaaggctattgaatgcaacttacaatgcttaataaaaatctttattcttttagtataaagta

SEQ ID NO: 1400 - DNA, 2221 bp, Homo sapiens
gtcggggcgtgtcttctcccggaaatggtctaagccccagctcctggcggagcgagctagcctgcgaatttcagcatgagtgtactgctgaggtcaggtttggggccgttgtgtgccgtggcgcgcgcagccattccttttatttggagagggaaatacttcagctccgggaatgagcctgcagaaaacccggtgacgccgatgctgcggcatcttatgtacaaaataaagtctactggtcccatcactgtggccgagtacatgaaggaggtgttgactaatccagccaagggttattatgtgtaccgtgacatgctaggcgaaaaaggagatttcattacttcacctgaaataagtcaaatctttggggagctactaggtatatggttcattagtgaatggatggccactggaaaaagcacagctttccagctggtggaactgggcccaggtaggggaaccctcgtgggagatattttgagggtgttcactcaacttggatctgtgctgaaaaattgtgacatttcagtacatctggtagaggtaagccaaaaattaagtgagattcaagcattgacactgactaaagagaaggtcccgttagagcgaaatgctggatccccagtgtatatgaaaggtgtcactaagtctgggattccaatttcctggtaccgagatctgcacgatgttccaaaagggtacagcttttatcttgcacatgaattttttgatgttcttcctgtgcataaatttcagaaaacaccacagggatggcgagaagtatttgttgacattgatccacaggtttctgataaactgaggtttgttttggcaccttctgccaccccagcagaagccttcatacaacatgacgaaacaagggatcatgttgaagtgtgtcctgatgctggtgttatcatcgaggaactttctcaacgcattgcattaactggaggtgctgcactggttgctgattatggtcatgatggaacaaagacagataccttcagagggttttgcgaccacaagcttcatgatgtcttaattgccccaggaacagcagatctaacagctgatgtggacttcagttatttgcgaagaatggcacagggaaaagtagcctctctgggcccaataaaacaacacacatttttaaaaaatatgggtattgatgtccggctgaaggttcttttagataaatcaaatgagccatcagtgaggcagcagttacttcaaggatatgatatgttaatgaatccaaagaagatgggagagagatttaacttttttgccttgctacctcatcagagacttcaaggtggaagatatcagaggaatgcacgtcagtcaaaaccctttgcatccgttgtagctgggtttagtgaacttgcttggcagtgatatttcagcttggacattttacccttcagtcggcccaagaaatcaaaataaaggaaacacatttcatatactgcaggtaacaaaagtcaaagtattttatcttttcacagcaagaacagtccatgttgtatataatacaaccaacattatagaacttttagggttgtgactggctttggtgcaaatgtgtgctcaagctaataagttattgtgaaactgagtttcctttaacttacaaagctagttgccatatttctattttattttaaaaagtaaacatgcggctgggcgtggtggctcatgcctgtaatcccagcactttgggaggctgaggtgggcatatcacctgaggtcagcagttaaagaccagcctgaccaaaatggagaaaccccatctctactaaaaatacaaaactagccgggtatggtggtacatgcctgtaatcccagctactcaggaggctgagacaggagaatcacttgaacctgggaggtggaggttgcggtgagctgagatcgtgccactgcactccagcctgggcaacaagagcaaaaatccctctcaaaaaaaaaagtaaacatgggcactgattgttttaataaaaatgggaaacagactaaatggctattcacaggaaactgataagatatatgttatttttttaaatgagctagggcaatatgttttgacagaaaactctctaagatttagtaagtgaaaaaaagtaggatgcaagagtttttatagttgattccatttttgttgaaggagaaaaactaaataaatacgagtaatttcatagaaacgaaaaaaaaaaaa

SEQ ID NO: 1401 - DNA, 923 bp, Homo sapiens
  misc_feature (805)..(805): n is a, c, g, or t
catgcagacaaacttttgttaattcagagcgatacaaaaggcactttgaatctataaaacttgaaaaagttaaaaattgtatgtcggataaagctttaagtcatctgtcactattaacctcagtgcagcaattctgactcctgtgcctggattccttttatgataattttgccacctacaggacagattaggtgctggtcgcctgaattattttgtgttctgaattattttgagctctaaaatggtaaagtacaaatactcatgttttactgtgccttggccttttataaaaaggtatttataattcgttgataaaaaccaatatttgaagctgttgattaccaacaaaaaagtttcactctctttatagtgcttcaggatacaactttttcagggccttattagagaaaaactgattcacatgttattcttctaaagctaaattattaaaatgtaggttgaaagattggattgattgtgaatctacactaaagatatggttccaggcagacctccttagagacctccaggcagacctccttactgtcttcaggtgatgtttaatttcattactgttactgggtgcaagtgtctttcattggaagtgaacttactccagttatcgaatgtctatcatatcataattgcatttctccaccattgaggtatttaacaaagtccctaagagattcatttcttttattattcataccaaacaatagcgtaggctcacaaatttacacgtgtgggtcttttctcctggaagtatgatgggctggtaacacacaacggggcggccctgtcntttaccacaacaacaaccaacaccacaaaacgaaacaagaaaaacaccaaaaatacaaccaccaacgatcacacgagcgacgaagaacggaaaatattgaattgtttaaaattcgggt

SEQ ID NO: 1402 - DNA, 2160 bp, Homo sapiens
ctaccgcgcccggcagggttgtttcttaaaggtaaataagctccctaaatttgtctgtaaattggaagtaactccagtgaaaatgccaacaggaatttttttttggcttgacaaactaaggctaaaattaatatagaaatgagcatacaataataggaacactatgaaaaagaagagtaatgagaggtgggaccaagtctataagatattaaagggtaagtctctccggcccggtttccctcggtgtgctactgtgcgcgcgatccagcaccatggggaagcgggacaatcgggtggcctatatgaacccaatagcaatggcgagatcaaggggtccaatccagtcttcagggccaacaatacaggattatctgaatcgaccaaggcctacctgggaagaagtaaaagagcaactagaaaaggaaaagaaaggctccaaggctttggctgaatttgaagaaaaaatgaatgagaactggaagaaagaactggaaaaacacagagagaaattgttaagtggaagtgagagctcatccaaaaaaagacagagaaagaaaaaagaaaagaagaaatctggtagcagttcttctgattctgaagatgaggataagaaacaaggaaaacagagaaagaaaaagaagaaccgttcacataaatcttctgaaagctccatgtcagaaactgaatcagacagtaaggatagtttaaaaaagaaaaagaagtcaaaagatggaactgagaaagaaaaggatattaaaggactcagcaaaaagagaaagatgtattctgaagataaacctttatcatctgagtccttgtcagaatcagagtatattgaggaggtgcaagcaaaaaagaagaaaagcagtgaagaacgagaaaaagcaacagaaaaaacaaaaaagaaaaagaagcataagaaacacagtaagaagaagaaaaagaaggctgctagttcaagtcctgactcaccgtaacattaagaaaaatcaggattcccttataaagaaagtgcaatgtctgaggaaatttcaactgtgaaaactacaacatatttactaaaatgcatgaattttcttgtttttagaattattcctggactattcagtagccactcagatgccactgtgtgaaagggccataaatgttgcctgctgcttgaacatctatttttttctcttccagtgcttgataactctgggagataatacactgcagtcgtactagtggttaagatatttgggaataaaattaatacttttgactagaagcgtctaaggataaaccaacagaaattgaatctggatacatctttaagatgtaatcagaaatgaccagatgactctagttagaatttttgaaggagggattacattaatatttcaaaacccttactctgtagataagtgtattttaattttttcccctcgtatacttttatttacctggggaaggagcttttagggttggggggtggtttgctatctctttagctagcagaatagtgtgcctttgatcctcacacatctgtattatggacacagtagccatgcttcacggggaggtcagagctggctaccagcagtcttgccctttactgagcttagtgtcatctttggatgctgtcatatgctgctttgagtgaaccagagaaacagccatttgcagcatgagaaagccccaaaagctctgggatttacctccacttcagtaataatgaatattttttagcattagaatgtgttatgtcatttgaattaattttgactacactttggcttgggagaggaattattttaaatagacattggtactttttgaacttgatagctaaagattctaaaatgcatgttttatactaagttttaaccagtcaggaaaattttatgtaactagtgatagtttatttttttgtatgaattttgtttaggctgcaatgtttagcttttgttaactcctcactcttgctgtcttaagttcattactatgtttaatggcctacttgccaagatatttagcatgtaaaaagcagggttttgattaaaaaaaaaaaaggcttcatattgaagctgagacttacaataacaagttgagtggcaagcctggtatgctgtgtcttattgccagaatcttagtaaatgtaatgtttaaaaaaaaaag

SEQ ID NO: 1403 - DNA, 1570 bp, Homo sapiens
gcacgcgggggcggggccgcgcctgcgcagaccgcctgttatggcggccgcctaagtcccacagagacgggagtcgggtgggatcccaggctgggccccgcggcggctggattctcttccctggccaagtctctgagatcttctcccagggcgatgcaaagctactcgctaccagcttggacctgtctgcagtatctcctctgggacctgccatgctgaggacccattctcacctctgagggactcctgtcctaggactaaggtggagcctgggccatggtacagctggctcctgcggcagccatggacgaggtcacctttaggagcgacactgtgctgtcagatgtccacctctataccccgaaccatagacatctcatggtacggctgaacagcgtggggcagccagttttcctgtcccaattcaagcttctatggagccaagactcttggacagattcaggagccaagggtggcagtcacagagatgttcacacaaaggagcctccttctgctgagacaggcagcacagggtcccctccaggaagtggccatggtaatgagggtttctccctccaggccgggactgacaccactggccaggaagtggctgaagctcagctggatgaggatggggatttggacgtggtgagaagaccacgagccgcctctgattccaacccagcagggcctctgagagacaaggtacatcccatgattctagcacaggaagaagacgacgtcctgggagaggaagcacaaggcagcccgcacgatatcatcagaatagagcacaccatggccacgcccctggaggatgttggcaagcaggtgtggcggggcgccctgctcctggcagactacatcctgttccgacaggacctcttccgaggatgtacagcgctggagctcggggccggcacggggctcgctagcatcatcgcagccaccatggcacggaccgtttattgtacagatgtcggtgcagatctcttgtccatgtgccagcgaaacattgccctcaacagccacctggctgccactggaggtggtatagttagggtcaaagaactggactggctgaaggacgacctctgcacagatcccaaggtccccttcagttggtcacaagaggaaatttctgacttgtacgatcacaccaccatcctgtttgcagccgaagtgttttacgacgacgacttgactgatgctgtgtttaaaacgctctcccgactcgcccacagattgaaaaatgcctgcacagccatactgtcggtggagaagaggctcaacttcacattgagacacttggacgtcacatgtgaagcctacgatcacttccgctcctgcctgcacgcgctggagcagctcgcagatggcaagctgcgcttcgtggtggagcccgtggaggcctccttcccacagctcctggtttacgagcgcctccagcaactggagctctggaagatcatcgcagaaccagtaacatgacccatcgcctccacaaggcgcggcgtctcgactgttcttagagtgtatttctagtaaaatcagaagctcaccaaagcaa

SEQ ID NO: 1404 - DNA, 348 bp, Homo sapiens
atgacaaagaaaagagggaacaatggtcgtgctaaaaagggccgtggccacatgcagcctattcgctgcaggaactgtgcccgatgcatacccaaggacaaggccattaagaaattcatcattcacaacatagtggaggccgcagcagtcagggacatttctgaagcaagcgtcttcgatgcctatgtgcttcccaagctgtatgtgaagctacattactttttgagttgtgcagttcacagcaaagtagtcaggaatcaatcttgtgtagcccgcaaggaccaaacacccccaccccgattgagacctgcgggtgctgctctacaacccccaccaaagcccatgtaa

SEQ ID NO: 1405 - DNA, 553 bp, Homo sapiens
tagccaggcatggtggcggtaattcgccaaaatgacaaacacaaagggaaagaggagaggcacccgatacatgttctctaggccttttagaaaacatggagttgttcctttggccatgtatatgcgaatctataagaaaggtgatattgtagacatcaagggaatgggtactgttcaaaaaggaatgtcccacaagtgttaccatggcaaaactggaagagtctacaatgttccccagcatgctgttggcattgttgtaaacaaacaagttaagggcaagattcttgccaagagaattaatgtgtgtattgagcacattaagcactctaaaagccgagatagcttcctgaaacgtgtgaaggaaaatgatcagaaaaagaaagaagccaaagagaaagttacctgggttcaacggaagcaccagcctgctccacccagagaagcacagtgtgtgagaaccaatgggaaggagcctgagctgctggaaactattccctatgaattcatggcataataggtgttaaaaaaaaaatagaagacttccggactgtaa

SEQ ID NO: 1406 - DNA, 1026 bp, Homo sapiens
tggcccaggagggaggaggacgacgtccctcccgaagagaagaggctgcggctgttgctggaggggggaagcgcacagcccgaggacggggaggacgcgccgcggccgggcagggaggagaccggcacccagacaggtggcgacggcaaaggagcggaattctccacgagttttgagcagcctcggttttcccaccccctccaaatcatggaagaaacagggtaagagcaaagacaaggtggctgtggcctatgtctaccctctcggggcgtcccttgtcttctctcctccttgggcagggagaccatcggagtgcaacctggctggggcggggaggaggtgcagggcctggccagagcgggcctggccacgggcaagggacagcgacctcctgggccaggacaggtgagcgcggcgcaggcccgggcccggcgtgtccgcgctgcgcgggagaggccagcagagggcgccagagagccaggagcggcccgcggaggagcccgcgcccgccccgatgcccagctccgcgcctcgcggacccagcaagctcgcgctcagacgccccagctccgccgagaggacgctcgccccgggtgcttctttttccccaagtgcaggcagagcccctggagccatggccagcccttccggcagctccgaagccactggcaagccccgaggcagggatggccggcccaggagggaggaggacgacgtccctcctgaagagaagaggctgcggctgttgctggaggggggaagcgcacagcccgaggactgcgaggacggggaggacgcgctgcggccgggcaaggaggacaccggcacccagacaggtggcgacggcagaggaataaccttcactcttctctgcaacgaatcccaaaagtgtgtagttgagctgactgcaaggtgcttgacacgcaagagattccacaaatgggattcggcctctggaaagtggtggtagttccagatttatgtgaatgttactttgtttttccctataaaatctattctttaaac

SEQ ID NO: 1407 - DNA, 1202 bp, Homo sapiens
ctttggcgggattggctccgcgtttgggctggtccgctgctccccacctaccagggtcggatccggagcccttccccgcggggcggggacctccaaacaaccgactcctttccaggtgaagggtgacttggctgaagaaacacttaaattctggaaatagcgactcagtatcatggccagcagccttaatgaagatccagaaggaagcagaatcacttatgtgaaaggagacctttttgcatgcccgaaaacagactctttagcccactgtatcagtgaggattgtcgcatgggcgctgggatagctgtcctctttaagaagaaatttggaggggtgcaagaacttttaaatcaacaaaagaaatctggagaagtggctgttctgaagagagatgggcgatatatatattacttgattacaaagaaaagggcttcgcacaagccaacttatgaaaacttacagaagagtttagaggcaatgaagtctcattgtctgaagaatggagtcactgacctctccatgcccaggattggatgtggtcttgatcgtctgcaatgggaaaatgtatctgcgatgatcgaggaggtatttgaggcaacagacatcaaaattactgtgtacacactctgaaccagtgaacattttggatgtttccgtgttctcctgtgtcatctctactgggccataggaccgggcaaacctaccttaaaataggcagaggaaagtttcatgagaagtagtgtgtttaacaagacagactttggttgctgtattcaagtatttggattatgactgtggaggagggcttgcttaagatatgtggttgtgtttttttgtggaaaagtaaggagttaggtggcttgataataggcagggaaaccagattgtcgggactatgacctttttctccagtatgctacctgatttgtttggctggccactaggtggcagcattggttctacttctctgctttttaagagaaatttcaggaaggatgatcattccagttagtttggcattttttgtcgtttgtgcacataacttggtgttatccttatgtcatcagattcctcctaggggagagtttttgttttaattacaaaattaaattctacattgttaccaagaaatttgtggtgataaaaatggaaaaataaaaatttggggagttaaaaaaaaaaaaaaaaaaaaaaaaaaaaa

SEQ ID NO: 1408 - DNA, 84661 bp, Homo sapiens
ccagctagaagccttttatttcaacggcttcatgtgctgctcctttacggagccctcccagcagttagcagtaagcactgaccctctcgtggtggaattccaaacacctgttaccccaagcagcttggtgtcatgggaagtgactgaactgactctgccatgagcttgcagagggctcctcaggccagaaccttgggcagggctcggaacatttctggacccagctttctccaaatgtaaaacaaaaggcttgaactcaatgacccctgaagaaggtaggttccctttcttttcaaatgtcctttgtagaatttgtgcaattttgaaagcccctccggtattctcctctgtgaggcttccaggggcgggaggggtgggaccctgctggtaagaccccatgggagggctgggagcggggcaggccatagaatttgagacaagtgggccgggcacggtggctcacccctgtaatcccagcactttgggaggccgaggcgggtggatcacgaggtcaggagatcgagaccatcctggctaacatggtgaaaccccgtctctactaaaaatacaaaaaattagccggacatggtggcgggcgcctgtagtctcagctactcgggaggctgaggcaggagaatggcgtgaacccgggaggtggagctggcagtgagccgagatggcgccaccgcactctagcctgggtgacagagcaagactctgtctcaaaaaaaaaaaaaaaaaaaaaaaggaatttgagacaagtagttccagctcacatctcagagttctagatgggcttgggcatgccgatacaaaaaggactctgggctgttttcctttgtgacttttgaaatggcggagcggtgtgcgctagaagtgggtgtttcttgataaatgggcagattcttaaatctggaacctctctgagtctggggcctaggaatccacctgtttcgcaagctgcctgagtgattctgatgctcactgaaatttgaagaacacaggcctggagagatggaggccaatggcatgcacagaagctgatgcctgatgaccaggctccagggtggttcctaggatctgggtgggttgagtatctgcgtgtttagccaggaccaactgtgcagatgctgcccactcgggcctcccccacccataagcccacattcaccagcctccccagaaaagacgatcacagttgccacagcctctgagggctccctgcagagccacaggtattctggggagccaagtggtcacaagccccagttggaactcaggcagaaccggagcgtgccgattactccatctctgagtctcagtttcctcatctgtaaaatgggcccagtaatagtacttatcttacagggttgtcttgaggaatatattatgcacataaagatcttaaaacagggcagacaccaggtaactgttccacaaatgagaacttttgtcctattgctactgattatcaccattctgccctgaccccattgtattagtctgttttcacactgttataaagaagtacctgagaccgggtaatttataaagaaaagagatttaattgactcacagttctgcatggctagggaggcctcaggaaacttacaatcacggcagaaggcaaagaggaagaaaggcgcgtcttacgtggtggcaggagtgagggagagaagggggacttcccacacattttcaaaccattaaatctcgtgagaactcactatcacatgaacagcatgggggaaaccactcccctatccaatcacctcccactatgtccacaaatcgagatgagatttgggtagggacacagagtcaaaccaaatctcccatgcactggcttcctcctccagcccctcccccacaccctgaccctggagtggtggcaggcaccagttgttactaatcatgacacaacccccacccccacagggcttgcaaggacacagccagccactcagttaagatggtaatgaagcagctgtgaaacaagaggcctttccatctgggatcccagctgacctgactcctgcctaaggttggggaatctgctgtgtggatgctgcccccccgcccagctgtttatccctggtgtgatgatggctcaggctcactgcagcctcagcctcctgggctcaagccatcctcccacctcagcctccccagtagctgggatgacctgtgtgcaccaccacgcatgactggtttgttttatttttggtagagatgaagttttaccatgttgcccaggctggtctcaaactctctgagctcaagtgatcctcccgcctcagcctcccaaagggctgggattagaggcgtgagccactgtgcccagctgcaatcacttatttatgtctctgttaatctgctcgcaggcccagctcccgcctcattcgcctccatggaggcagcccccgcccttgggcgccaatggtaggatggagtaggggggctgtgcgtggcgagatggaagtaggagtacaatgcccccttccccttcctctggatgggagtggcggagggcaacactctacagctgtgggtgagatgatgcggccctagaaaagctctgggacgaagtaccaagggctacaatcctggccgctcctcccagtcactatgtgacttgggaaggggcttgaccccaccttggagggacaaggacatctgattcattcagaaattgttgattacacttgccctttgtgttcagcactattcgaggtgctggggatatggagatgaaggaaacaaaccagctcctgggtgtgctgggggagggagcatctggagaggggagtcaggggtcctcccaggagggagagcgagagcagccatgtgaaaagtgcagggaagggcattccaggcagaaggaacagcatgtgcaaaggccagagggtcaaggaaccaaaaggagttgagagttggctcaggagagagagaagaataaggggctagagaggcgggcagggcatgggcatgcggttgattctaagagcactgggaagccgtgggtgcctgaagtgatcgagaaaagccaggtcaaatggcagccagggaactccaggacccaggagtcctgctgtcagagatcccaggcccctcagccccaccctccctaacctcgtaggcctggggctcagtgaggttcatggccccgctcctgggagcagctgaccctgtgcaccctggtgagcccctgaggggaagctgctcaccagggattggggtccccactccttccgagccctctcaacaaggcggctttgtctggcagccccaaggacccccacgctcctccccaggccccctactctgagctctgaaaggaggctttatctgcatcccaggccagactgctgggaagtgagtggccgggactggcacatggggccaggcagcagccgcagccctgactcctggggctgcagacacagagagagccaaggacaaaagggtgccctggggaatcagcccggccccagaggaagacaagaggactacacaggctcccctgcgccccatcccctcccccgcaatctggtcacttgatcgcagtggtcagtgacacggccctttgtgcagcccctgcctcaggggagaaggaggcaggtaaggcagcgctgcttgtaatcggacctcccggggcctgcttcccgttccctttctctggtcctgggaagctttgggagggtgggaacggtttgtcaaggacggtacctttccaaatgaaaaggagcttcaggaaagatcgatgccctaagccatcactgggccaactggagagaatgagaagcagaaagaagaaaggccagaaaggctgatatttctgagccacctcttcctgggtgcgtggaagatggtacctctcagccgggtttctgccaccctgcttagccctggttaatgtggataatggcaacaatgatgtattccaagtgcctctatggagattacctctaccatccacaatgaccctctgtggcaaggagcagcagccccattttacagggacaggtacagaggcccagagagactaaaccacctgcccaaagccacacgagaggcccagccaggattcaaacccaggaacgtctgatgccagagcccaggccttgaaccttgtgcctcccagcttggctgggtccacccatctgccaatgctgtgtccagaagccccacgtcagctctgtcctggctgtggacatcctggatgtaagacgtgggaggaaccccagccatcacctctacaagaaaacttaaaaattaggctaggtgcagtggctcacgcctgtaatcgcagcactttgagaggcaggcagatcacctgaggttaggagtccaaaaccagaccggccaacgtggcaaaaccccgtctctacgaaaagtaaaaaacaaacaaacaaacaaacaaacaaaaaacttagccagacatggtggcgtgcaactgtagtcccagctacttaggaggctgaggcaggaggatcactagaaacagggaggcagaggttgcagtgagctgagattgttccattgcactctagcctgggcaacagagcaagactccatctaaaaaaaaaaaaaaattaaaaaatgagccaggcgtggtggcacacacctgcagtaccaggtactcaggaggcttaggtgggaggatcgcttgagcacagaaggttgaggctgcagtgagctgtgttctcaccactgtactccagcctgggtgacagagcgagcgtctctcaaaaaataaaaaggtagtttactaacatgactgaactgtacactgaaagatggttaaggtaaattttatgttatgcatattttgccacaatttaaatttttaaatgttcaaacataaagaaagaagtgagtctagccagtatccaagaggcactaaaccaagtgacaccagcccaagtctctctgatgcagtgagaatttgtgggatggaatggaagagaacgaaaaggaggatacgtttaggccgggcgcagtggctcatacctgtaatcccagtaatttgggaagccgaggtgggtggatcacctgaggtcaggcgttcgagaccagcctggccaacatggtgaaaccccttctctactaaaaatataaaatattagccgggcatggtggtgggtgtagtcccagcaactcaggaggctgaggcaggagaattgcttgaacccaggaggcggaggttgcagtgagctgagatcgtgccattgcactccagcctgggcaagaagagtgaaaccctgtctcaaaaaaaaaaaaagagaaagaggatacatttatcacagcgggtgcaatgttcagcccaaatcatcttttgggccaccagtcatgcctgttgtatttgggaaatgccaatcattgcacaaatggggagactgaggcccatagagaagggcacaccctgatgaagggccagtcatagtcacgaccaggctggaatctgcagccaccagcctctggatgtgcctcaccccaggggtcacaagaggcccagcaaggagttaatgccactgggaggacagtgaggcgccccctggatcttgccccccaactccaggaaagagggtaaaggtgaaggaagaaatggctggttgcctccacactgtgtgccctcagcccatctgggttgggcaccagggactgggcaggtgtacagactttacttcctgcagaccccaggagggctgtggcatcgggagggagactgaggctgcctggccgaggggaagtgggatggtgacagtggccgcgttgacggctcggccccaggcgctgcgcctgagctcgtctcagccaaacgtctaacactcatagagacacaggctgggaaaccagagctcagagagaagtcacttgcaagtcaggggcagagatgggattcgaacccagatctgtgactccgggccctgcgggcaagtgcctaggaagatggtgggggcccgtgaggaatcatcgcaaccaaaccagcttcccttctggccccgcactgaagccatgtgagctttctggaacacaattgcatgttattcctccctctcttgcctgagctgaaagcttcctggggctctttaaagtgtgacgctggtccctggccacctctggagccctgtccccacctgtctggactccctttggattttgtccctcagctagactgacccatttgcagtccctcaaaagctctgccacctgcaaaccgggccacctgggcccaggctgagcccagtcttccccaccatcaaagtctgcacccgcaaggacagaacatgcagcgcgtacggtgcacactgtaaagtgcggtgcccccgctacatgacgacaagggagagcagatcaaacccagcctggctgcagctggcgaacgctaagaatccagccgctcagaccgtggtctctcacttccctggcatgcccttcactgcctcctcccgccccgtcctcactgtccccactgtccccaggggaggcaggtccaccctcagatttaccagggcatgttaagacacagtttgaagccatctccgaggtcatgaggtcatggcagtttcccatcgatctatttgtccctcccttgcctgacgccctttgcccccatgggcccccagagccatatcaaacttcagcagtttctcccaaggtccaaggagccaaaacacagggcagggccttaaaacacagccagcgggcgatttaccagctgggctgcccaacccctgacctccggaggagatgtaatgcatctccctggtttagccggatcaatggtgctgtgaaaaacagccccatgtgggccagttgggacaggagggagacacccctgccgccagaaatcccacccggacagccgcggagtcagcctccgtgcacacgcacggccccaggacctcgctgggctcgccgactgtctcaggcaggagctgggattgctgagaccagcccctagaattcggatggggaaactgaggctggggggcttctcaaggtcacagagtaagttcaaggaagcctccagtttccccagggggaactctccctgctcagcttcggccttctcctgtgggcgaaggtggcagtggccagccagtctggtggggcagtcgtggtattgggggtatcataggtccctggaaggccaagcttggctgtcccacagcctctgggcaggaccagtggacccagtgtgcctccaaggtgggacttcctgcctttgactctgtgtggggcagaaactccaccttcaacagagtgtcctgcctgagtcacaacatcccaacgagggcagaggccagaggcagcaagccaccccatgctgggacccccttgctccccagaaagcacagtagcccatatttagggaggaaggttaacaagagcaggagggctctgcttccaaattctcctcggtcctcgtgtgaccctctacccctagcctgagccagcaggaagagcaggcggctctacagcctcccgccttcaagcaggggccatagacccacaggggcccctgggagctcactagaaaggcagaatctgggcccctttgctccagacctactgaccacagtctgcattttaacagctgatacatgcgcgcgccaaggctgagagtgctggtgtttagaacctcccggagtgaaatgagaaggggcgagtgtgcatgtgtgtgttaagatctttaccctaaagaaagggcctgagatgaggagggaaggtgggaagggagttaggtaaaaaggaaggtagaatggaagggaggaaaaaaaagataccctccagatgtccaaaaagtatctgaagtaacttcattcacctcccattccttcactgcatatttattgagcatcagagacatgctaagcactgagctgagcgctggggtagagcagcgagcaaaatgggcgagacctcagccccatgcgccccaccaccccacagcttacggtctcaagctgtgctgtccggaacagtagccccaccacgtgtgagcgcgtgaactgtggccggtccccattgagatgcgctgtgagtgttaaatacacactggatttcaaagacagtgcaaactggccaggcgcagtggctcacaccagtaatcccaacactttgggaggccgaggcaggaggatttcctaagctcagaagtttcagaccagcctgagcaacatggcaaaactctgcctctacaaaaatacaaacatcagcccggcctgtactcccagctactcgggaggctgaggtgagaggatcacgtgagcccaggaggtcgaggctgcagtgagctatgatcacactgccactgcactccagcctgggtaacagagcaagaccctgtctcaaaaaacagtgcaagcaaaagaatgtaaaatatctcaattttaaaaatattcactacatgccgacatgatcatactgtgaatatattgcattaaacaaattcacgtatttcttttttttttaatgcagctactagaaaactttcaattatgaggcttacatttctgttgtacaacactgctctagaggatgagacagaaaacaaactaataagcaaacaaaaagttacaagcaaacaaaaatgtaagaagattacatgtgatgaaaagccctgggaaggaaaccagcaggatgagatgcaggactggagatgaggagcgaggtctcttcaaataaagacatatgagctggcacagtggctcacacctgtaatcccagcactttgggaggctgaggcggggggatcacttgagcccagaagtttgagactaacctgggcaaatggcgagaccccatctctacaaaaaatttaaaaattatccaggtgtggtggcatgcacctgtagtcccagttacttaggaggctgaagtggaaggatcactttagcctgggtgtaagttacatatagtcaactgcacaaatctgaactgcacctcaggagtgttccatgccgctcccagtcactatggctgtggtggtgcattagctacctattgcttcaaacaacacacgttgatcatctcacagtggctgtggctcgggagtctgggcacagttgaatgggtcttgtcttcagggtctcatcaggctgcagtcaacagacacacacacgcacatacgcacactccccacttctcatttcactccgggaggttctaaacaccagcactcccaaccttggcatgcacatggatcagctgttgaaatgcagtcaaggtgtcagccgggctgcatcttctttcagagctcaggtcgtcttccaaggtcttgcattggtcggcagaattcagttccttgcaccagtagaactgagctccctgttttctggctggctgtcagccagtggccccctggtgccacgtggccatctctaaggcagttcacaccatagaagcttgcttctgcaagtctctcttcagctttttttgtttgtttcattttctttgagatggagtctcgctctgtcacccaggctggagtgcagtggcgtgatctcagctcactgcaatcttagtctccagggctcaagggatcctcccacctcagcctcccaagtagctgggattacaggcatgcaccaccacgccagactaatttttgtattttggtagagatggggtttcgccatgttgtccaggctggtctcaaactcctggactcaagtgattcacccacctcagcctcccaaagtgctgggattacaggcgtgagccactgggcccagacttaaggttttacctaattaagtccagcctaaccctttcaatgaactcaaaatgaactgccttgagatctaaattacacctgcaaaactccttcagctttatcatctcagccaaaagcacatccctagtcccacccacagtcaaaaggaggggttacaaagagtgtacataccaaaggttaaaaatcagtgggagtcagccagggatggtggctcatgcctacagtcctagctacttgggaggctgaggcgggaggatctcttgagcccaggagttcaagaccagcctgggcaacatagcaagactccattcttttaaacaaaaattacaggggtcactttagggtctgtctgccacaaatggtaatgacaattctaacctcttcaaccccaattaaaaattaatcatttactaaaaacttacgaattcattaattaattgtgtcagactccttttatcttttttcttttttctttttttttttttgagatggagtctcgctctgtcacccaggctggagtgctgtggtgcgatctcagctcactgcaacctctgcctcccgggttcaagcgattcttctgcctcagcctcctgagtatctgggattacaggcacagccaccatgcccggctaatttttgtatttttggtaaagatggggttttaccatgttgaccaggctagtctcaaactcctgatctcaaatgacccgcccgcctaggcctcccaaagtgctgggatcacaggcatgagccgccgcgcccggcctgcatcatatttcattatgggaatgcaccacgatttatttcacaacttctgttgacagatatttgggttgctcccagtttctggctattgaaatagagctgctagcacgtgggattctggatcagattttagacaatccaaagacattaatgaaaaaactgatgaaatcaaagtctgtagtttaattagtaatattgcacccatgttaatttcttagttttgacaaatgggccatggttatagaagatgttaactgtagaagaaagtgaatgatgagtatacaggggctctcggcactatccttgcaacttttctataaagctaaaattattctgggcccaggcgtggtggctcacatctgtaatcccagcactttaggagccaaggttggaagatcacttgaggccaggagttcaaggccagcttggtcaacagagggagaccctgtctgtacagaacaaataataataaaaataattccaaaataaaaatttttataaaaataagtaaataaagctaatagcaaacatctgctacaggccacggaggagtagtgggtatacaactagcccttgatggaatctatgaggctactctgttcggtgcaagaccatagattcagactgtgcaagaccacaatccctgagagaagggaaacccatgaagtgagccccacaatcaccagatctctgcctggggccaatttcccagccacagaccagagagcagggatccaagctgcagtcatcctgctgagctgggaggcagagataaggacacggagctactgaggccgcagggtctgcagggctggaggaaaggatgatgccagggctgggtttctttttttttttcctttctttctttctttctttcttttttttttttttttttttgagacagagtttcgctcttgttgcccaggctggagtgcaatggcgcgatctcggctcaccgtaacctccacctccaggatacaagcaattctcctgcctcagcctcccgagtagctgggattacaggtatgtgccaccacattcagctaattttgtaatttttaataaagacggggcttctccatgctagtcaagctggtctcgaactcccaacctcaggtgatccacccacctcggcctcctaacgtgctaggattacagatgtgagccaccatacctggatcttttttttttttttttttttttttttttttgagacagagtcttgctctgtcacccaggctggaatgcagtggcaccatcccagctcactgcaacctccgcctcccaggttcaggcgattctcctgcctcagcctcccaagaagctgggactataggcatgtgccaaacctggctaatttttggatttttagtagagatagggttttgttatgctggccagtctggattcaaacgcctgagctcaggcaatccgcccaccttggcctaccaaagtggtaggattacaggcatgagccagcatgcccagcctcaggctgggtttctaagcaagtctttgactatggcctggggggcacacactcaggacaagacgacttgaggctttccagagagcagctgctgtgagtgcagtgtgggaccagatccttgaagaccccctgggggaaaagaggcgggatggcagaggaaagggtgggagcggatcacacaggtccctgagggctgagaggagggtttggcttttgctccaagcaaagtgaagacaccaaatggtttgggcagaggagtgccctgccctgccattgataaagggccccgctggctgctgagtgaagagcctgttagatctgtggtgggggctcgggtcagagccgagggtggaggtggctgtcagtgtcagagcggaagccactccaaaggtggagcccatcaactggacctgggggtgggaggaagacaggagccaggagggctccaaagttctggcctgttgatttccgagacacttggcttttccttttttctccttttgaaaaccagttaatagacgcttggctttttcttacagcaggtgtgcattaccattgcaatgagaaaaccccaaaaagacataccttttactggagggggagaaggcattctccatgttgaaagcattctccactcctttcccgaggggagccatgaaggagacacgcgtctttcccaggtgccccccattgcccagtggtctgccccgtctgctgcacaaggtttgtctctgtctcttgctccttcttcccgctatgtgtgtccctcctgtcctccagcccctgaacaggtgctgcagggatggacaatggggaagagccagcactggggctgggtgggggtggatgaggggtgcaagaagttcaatgaaagacttgcctttggttaaaacaaatttttttttttaaaagagcatctttctcccctatccgagcaaggatggcctttgggaccaccaatgcttgtgactacgacttgcagaacagagacctctcttggtctcactcctgcgcccagcctcttgtggcctcactggccctggctgtggtccctcctgcccctcaggggtcccttcccacctcagaaccttccttttttttttttagacggagtcttgctctgtcgcccaggctggaatgcagtggcgccatctcggcttacagcaacctccacttcccgggttcaagagattctcctgcctcaccctcctgagtacctgggattacaggcgtgtgccaccatacaccgctaatttttttttcatatttttagtagaaacagggtggccgggtgcggtggctcaagcctgtaatcccaatactttgggaggccgaggcaggcagatcacgaggtcaagagattgagaccatcctggccaacatggtgaaaccccgtctctactaaaaatacaaaaattaactgggcgtgaaggcgcgcgcctgtagtcccagctacttgggaagctcagggaggagaatcacttgaacccaggaggcagaggcttcagtgagccgagatcgcgccactgcactccagcctggcaacagagcgagactccactccgtctcaaaaaaaaaaaaaaaaagaaaaagaaacagagtttcatcatattgtccaaactggtctcaaactcctgacctcaagtgatctgctcactcggcctccaaaagtgctgggattacaggtgagagccattgcctggatgtcccagaaccttctccctgttctgttacccagactcctcctttccctctctctctgcccacctggggctcggcctccttcagggctcagtgttccggggcccctcatccccctcccccaacagtctccccacccatagggtctctgcctccaggagacctccagaccttccagccagcgtgaggcctgttacaggcttgtgtgacttcccctcagagcagtgtcaaggctgtaatgaatgatgatttctgggatttttcattcactgtctatcccccgtgctaacctgggagcttctcgttcacctcagtattctcagcccctagcagaagacctaacccataactgatgctcaaaagatacttattaaatcaaatgatatataactcagacagagatgagtacatctgaacaagtggcgcccaggagctagcacgcagaatgggctttgaaagtggatacaatttcactaagtgaagatggaagaatggaggtttccaggggggagagctcaccatgaacgaagaaagggaagcaggaaagtgtgtgtcaacttcagtgcccggaagtgcatgcacagcaaaaaacaaatatttttaacctttttacaaaaaatactgggagtctctctcaacctattctggtctgggggctgcccaattcatgaatcaccagaataagtaaataaatgtataaataaaatacttatggcagggtgtggtggctcacacctgtaatcccagcactttgagaggccgaggcagacagatcacttgaggtcaggagtttgagaccagcctagctaacatggggaaaccctatctctactaaaaatacaaaacttagctgggtggggtggcacatgtctgttatctcagctactcaggaggctgaggcaggagaatcacttgaacctgggaggtgaggccgcagtgagcccagatcatgccactgcattccagcctgggcaacagagtgagactctgtctcaaaaaaaaaaaaaaaaaaaaaaagacaaaaacttaccaaacgaatgactatttggaagggtggatggacggacaagcagatgggcaacaggttaaagcaaagctcctccttttaaggaaacagaaaccgagggctggagagaaagggggctcctgaagatgactgcgttgcattgaggcaaaaggaaagccgttgtaccttcagaccatctctcgccatccaccctgcgtgaccattgcctacgccagtcttccctcctcccaggacccctgccccccacccccagcatcctctccagtgccccctcaaaggtagctactttcctgctcattactttttaccaaacctggagccgaagccctgagtgagcagctggaggcggggatgggccctttgtccaagcctcagcccgagggtgggggtggggaatgaagctggggggctccgtcctccccgctctctctgccatctccctcgctgacttttgtccttggatcgcctgcgtgatcagaagaggtttcattctctggcaactgtgcagccattagcgagaggcagacgcattaccctctcaccgcacaatcgttggctacttcagttattctatttcacctgaagactttatttgcagccgagcctcccctccggagcagggcaggccccatctgtcggacagtttgctccagcgtctccggccattatgcctccacttggaggacgggatggatggcatgcgtgcaagggagcaggggagagagcgagctggggagagagcgtgcgtgtctgcctgcctgcactccctcccacttgtctctttatcattctcccagggccgaacagaacttgctttgaagagtgatgtcagacgtgtacaaaacagagcgataaaacctaatgcactcgcgcccctttgtctgcctgattctcctcccgaacatttcccactcagaaagccacttaaaacacatcagcagtaactccacaaaacagccacttgttggctaattgagctaagcagctgccagcagggctaggggaggggtggggaaggaagctggaggcccctccactcccccagccagagcctggctcctggggagggtgcccggcccagccattgcctccctcccgtacctctgcaccgcaaggctctgcaaggagagaagacgcagctctgctcactgggtggagggcggggaggcaaggaactcgcgcctggggggccgggttggggagccaggtgggcaggattctctgccagctccctgggagtcactggccatctctgggcctcagtttccccacccaccccataagcgggttggactgtggcttctggggtctcttccagttcccaaaggctgcctgttgttacgcactgggagcttccgacagacctgggttcaaatcccagctctgccttttgacctgtagcctcaggctctctgagtgtgtttcctcatcaggaaaacgagataccagcagcgcctgtcatgattagcacaaggtgaggtggtgcctggttagtccttggagccagtcagcacaagacagggttgctggggctcataacagggcagcccctggcccagacttggaaactagggtgagctaagctgagatcagaaagataagaacctcaccagactagggtgtgggcacaggcaggggccagtgaacagcatatgtaagagtcctgaggcagagctgaattggaggaccagaaagaaggccagcgtgagtggagtcccaagggaggagacagagaagtggccagggccaggtgagaaggacccagtagactgtggtaaggagcttggctttatcctgagggcatagggagccatggagggaggggagcagccaggtaccttttttaaagacccttcctggttttagatggagaagaagctggtggtcagggttcaagagcagaaaagacactcttcctaccctgttccaacagcccagcctggatggcaaaagcgacagaccctccctcagagggacaaggatgagacggccgaaccagtgctcctgcccgggctccacaggcccctttcctcgctggccccactggagaggcaggggttaagctccatggcctgtcccctctgtcacacatgtaccctgccatctctgggctcaactgtcgctgcgctgtatcgggactccatcagagaggctcaggcagcagcttgcagtgttcaggccggcggtctcgagggtggcgagttcttgcactcctacaacagcgcttgaggacggctctgtccgctggcctatgctgcagcctcctcctgcccctgcggcagaggagggagagccgtgggcacagctagcactagcacgtgtgggttcagaggtctgagcggccacttcccgcttccagacctcggatgcgacgctcatctgcacggtgtgggcagagataacatcctccccagaacagcatggaaatgtttcagcagggtgctcggcttagataagtgctcggcaaaccagagttgccatcatgattcccccacggccctcaatcctctcctccctgcaaagcgtgcatccttttttaccccatcttccacccctcccaatttcccttttggcctcatcttggaggctgtaagtcagggtgaatcattcatcaaaatatctcactcttcctcttccagggttcctgatataattacctccctcttcggttttgctcctgatccctcttctgtttttttctgtgtgaactttattttaaccatcctttgtgtctgtgaatgttttttttttttttaaatcttgccaatgaaaataacttaattgctttttctggtttttaaagtaacacacgctcattaccaaaaacatccagacaacgcagaaaggtagaacgaggggaaaaacagtgaggttgtttttaagcagcctgcagtagtttgtagcagggttgggataaggaggccccctctttataaaactggggtgctccccacctgcccccagccctcagccaccaacatcttgcccactgcctaaatgccagctcaggttcttgctcccccaataggcttcctagactcccacagcccagggcgatctttctgtccactgacttcaattcttttcatttctttttcctttctttctttcctttttgtacaatggcttgcaatcatggctcactgcagcctcgacctcacgggctcaagcaatcttgatcctcccaccttagcctcctgagtagctagaacgaaaggtgtgtgccaccatgcctggctaatttttgtatttttttgtggagacagggttttgccatgttacttgggctggtctcaaactcctgagctcaagcgatccacctgcctcggcctctcaaagtgctgacaggcatgaaccaccatgcccagcaatccttttcatttcaacaaacatttattgagcctctactttgagccaagacacaggatctggccatctggattcatccccttctgcctgcgtttcattggtttttcgttatttttctgcctggtgtgtagactcctgctcccccgcctggactgtaaggtccccacgggcagacctacagctctgtttttgtatccccatccctagcacatattgttcctgagagggacctcgcagctgcctacagggagggcaggtgctgtggattgcatgtgctggacaccacgccaagcctctggcaccaatgatcttgtgtgatcctcaccttgacgacgggaggtgggtgttgttattagcttgacttttcaggtacagaaactgagtttatacacaattgcccaaggaaccacgatgggtgagctgagagtcaagaattgaacctgagtctctgagaccgaggcttgagttctgagctgctacaggggattgcttccttgtacagctcagtagtggcacagggcgggggacaaatgctctcagcaaggaatgcctgggacaggaaggacagtgtcatcgtcctgggctgatgcttgaccatgttactttctttttttttttttttttttttgagacagagtctctctctgtcacccaggctggagtgcagtgacacggtctcggctcactgcaatctctgcctcctgagttcaagcgattctcctgcctcagcctcccaagtagctgggattacaggtgcccatcgctacgcccagctaatttttgtatttttagtagagatggagtttcaccatcatggccaggctggtctcaaactcctgacctcaggtgatccacccgcttcagcctcccaaagtgctgggattacaggcatgagtcaccgtgcccggcctctgccaagttttttgaagaacaaatgaatcataaaatgctggtcatgtcacttctggcttaagacttctcccagcttgcaggagcagtttccaatgcatttgctgcaaacccttcaaatgaaatcttacactgaaaatctaaatgaacaaccaatgaaagtgcagcttccctgagacctggggtggggctgggtgcagaacctgcatcatctcgtccgttccctccctctggttcaccttcctccaggtgccagtggggctctgaggattccagggagctcagtttgaaccactggcctaaagctcaggtccaaatgcttggttagagcgtataaggcacaccatggtgccgccagctggccagccctctcccctacctctctgccctgctctgtgtgtacctgcaccttccactcagaatggccagtggttctcccaccacaactgattcacagctttggcttgatcacaggctgttgcctcctcttcggtgctttccacttactttccactgggttaactcttatgcagcctttgaaacttggtcaagttcaagaccagcctggccaacatggtgaaaccccatctccactaaaagtacaaaaattagccaggcgtgtgggcgggtacctgtaatcccggctgctggggagactgaggcgggagaatcgcttgaagctgggaggcggaggttgcagtgagccaagattgcaccactgcactgcagcctgggtgacagagtgagactccatcagaaagagagagagagaaagaaagaggaagagagaggaagaaggaagggagggagggagggagggagggagggagggaaagagagagaaaaaaagaaagagagagagaagggaggaagggagggagggaggaaggaaggagcgcccatcttcatttgtcatgaaaaacgtgactactgctcacttctgcagctagggtgaaacgagggggccaggagagcaggttctacaatttttctttaatctgctcctttagcaagtaagtgttgagctcctgcagtgtgcttggagtataaatttgaaaaaggcagaagcaggcaccagcctgggggaactcacaggctagaggagaaacaggtcatgagtccccttgtgactggcaagccccgcatgggggagcatgaaggtggggctgcttcacagcctcagggagctcattcctggggaggggaagtctagccaagacctgaaggaggaggattagccatgcaaagaggaagggaagggtgttctgggcacaaggaacagcacatgccaaggcttggaggtaagagagagcagatcggtctggggacgggaaggaccagtgtggctggaaggagacacccagccagggtgatggggctcaaggcacacaggaggcagcagatgaaggtggggtcagacttgcagaacccttgggctgagcctaggagtttggaggccactgaggaggattatgcaaagaaatgacccaatctgaaatgcacttagaaaagtttctctgggccgggcgcgatggttcacgcctgtaatcccagcactttgggaggccaaggcgggtgggtcatgaggtcaggagttcaagaccagcctggccaagatggtgaaccccgtctctactaaaaatacaaaaattagccaggcgtggtggcaggtgcctgtaatcccagctactcaggaggctgaagcaggagaattgcttgaacccgggaggcagaggttgcagtgagccaagatcacaccactgcactccagcctgggtgacagagcgagactccgtctcaaaagaaaagaaaaagaaaaaaatgaaaaatctttctggagaagcattaccattatagattagcagttgaggccaggtgtgttggctcatgtgtgtaatcccagcaccttgggagtctgaggtgagaggattgcttgagcccaggagttcgagaccagcctaggcaataaagtgaaactccatctcaattaaaaaaaaaaaaaaaaaaaaagatcagaagttgaaagttcaggttctggcatcccaagggcttgagttcaagtcctggttctgccagtaagtgaatgatcttggggaaattgatcaagtcttctgagcctcagtttctccagctgtaagatggggacaataatagtctctactgccaagagccgtgggaggagtcagtgagacattgcaggaagtggatccctcagaatggcagctgtcaggggcaggctttccatctgagtcattcactgctgtatctccatacctggaaaatgatagaaactccataaaatatgtacccagtgaatgcagaaatggttgttgagtgcatgatggattcgaggggcaaacagggatccctcttgactctggaaggcaagaggacaataaatatagctaattcaataatcatgcaggctcaagacacaaggcgttcagcaatgtacatacattagtccccctcaaacccaatatctccctcatttacaagtgagggcactgaggctcggaggagctggacgcattggccaaaatcacccagcaagagagcactgagcttggaatttgtacccagccctttgcctcagaagcctttgaagtaaaccacaatgccaggggccccaccaatgccatgcaccgcactggttttcttgctctgttggcagctgcctgtagctaaggcgcctgcaggtgcaacataggtgggggctggtgggcatagaatttagtggtccccagaaagggcctggtcccagggcttttgcatccatcaccagctatttattgagcacctatgatgtgtgccctttatagctacaaacttgtgaggtggggtgggggcttgcaggctagtggaggtgcctgccaccaaattgagaattactggggggtggaggcacacggacagggatagacaggctgatggccactggcagccatggtgattaaaacacaactggagtcccagctactcaggaagctgagacatgaggattccttgagcccaggagttcaagcctgcagtgagccatgattgggtcacttcactccaggctgggcaacatagcaagaccccatctcaaaaaaatagagtaaactcaataaacattggatgcttcctgtgtccatttccctcacctgggtcctgctgcacctgcctcaccatggcctccaggatcctgcagctgggctctgattggctgttccctgtccccatgcaggtgctatgaaagcctgacctgatgggtggggaaggctgcttgaggaggtgacggttcagtgatgctcagtgagggttaagtgggtggagcgagcgagagagagagagagagagagagagagagagagcagggcaggggaggacctacagctgcaaggcccaaggcaggagggagctgtgagttgggagagagaattcgtgatgaagctggagaggaggtggggctggtccacagggccctgtgggccatggggagagatttgggtttgatccgaggccaatgaggggttgtatcccaaggtcgatgagtcatggaggttctaagcaagggaggggtgtggcctggtgggaggggcccaaggggggcagggaggtagtggatggcactacccagggcagaggtggatgaggatggcacagaggccaggacggtgggatggagagtggtgcataagaggtaactcggactggcaggagccccctcctctgcatgtccccagcatcgaggcccaggacctcatgctcagacaccattcctcccagtcctagtgctcccagagaccattctggagcctgtggcaggttgctaggctgggacccctcatctggcagagcgggcaagagtgagagctgcagcctccagccctggctccccagagtgccaattctgaaaatgacaaacggagagccaataagaaggttggaaaatgggtacctccgtgcctccctgtgtctattgtagggtttggaaatagctgagatgagacgagagctgctaggaggggtgcccgctgggcagaggagaggcccaaagctgctgctgctgctgctgctgctgcaggaagtaagaggagagactggaggggagcggaggggaggaaaggaacagcagaagacagaaaggacaaatgtcaaaacggacgcacaaaaaagaccagttgtggtgtgtggcctaggattgtgggaggggtgtgtgtgtgtgtgtgtgtgtgtgtgtgtgtgtgtgtgtgtgtgtgatgcgggctttgaggagcaattcaaaagcccctggcccctgagcccatctgaacaccccccttctctcttcaccccaccaaccaccaaaaaaaaagagagagagagagcgagagagaaagaaggaaaacaaaatatctacagttgtcgagacaagaggagaaaaatagaggcaaacatccgtaattttctctgtggggctttgcggtaattgagccatttggataaaaataaaggcagcaggccccttaggtaagaagagcttttgcaatctaagaagcttgaattatgcgtcttgtgtcacttgaaatcccccattctcccccttccttgggtgacccaaaccactttcccttttcttattatttttttaagtaccctgtcaaaatgtcgactgtagagtagagaatttcagctgtcacaactaatttcaatttttccacgtgctttcccccttggggagggggcctggcagagccccctttccctccctcttgcatctgctcactctttttatttctcattattgttattattttaaaaccagatttacatcatcagtgtgtttggggagtgtttaaggactgtggtttgctcctgaggaaggctgggcctggcgctgttggtttctggctcccaccccgcctgcaccccctcctgcacgctcccacctccacccgcctgagcccctgggactcccacctctctcttcctggtcccaagctgccagccgccatcgaccacccactggggaaaatccagacttcaaaagagtcttgaggttctaggagagccgtgggaaccatgctcatttccctaccaaagggaagttccggggcaggcgagatccagaggagcttttccatcttttaaaaaattgtgtaatttgtttgtgtagagacaaggtctcactctattgcccaggcgggtcctgaactcctggactcaaataatcctcccgcctcggcctcccaaagtgctgggattacaggcgtgagccaccgcgcccagcctcagctattctaccttttgcctcatctttcttgcctcctcagtgcattcattccatgggcttcagtccagggccatctcctatgagctggccctgccaagctgctgggcacaccgaggtgagtaagacacaatccttgcccctgaggagatgacaacctagtgggctctaggagacaaaaaggcaggcggacggtgcagagtatctgatgatgtgctggtcagcactgtgcaaggacaggggggcacaggggagggacgggcccttctagcccagctactgagaggtcttctatggtttttattgttttttgttttttggagacggagtttcactcttgttgcccaggctggagtgcaatggcgcgatctcagctcactgcaacatccgcctcctgagttcaagcgattaactttcctcagcctccagagtagctgggattgcaggcacccgccaccatgcccagctgatttttgtattttttgtagagaaggggtttcaccatgttggccaggctggtctcgaactcctgacctcaggtgatccacccaccttggtctcccaaagtgctgggattacaagcgtgagccaccacacccagcctctgccataatttgaatgggtctcctccaagattcaggtgttgccaatgtggcagtatcaggaagtggggccattaagaggtgacgaggccacgagggctcctcccttgtgaagggaggtgcccttctgtaaaggggcttgacagaggaggatcacgcccttttgccctcctgccttctaccgtgtgaggatgcagcaagaaggccctcaccaagccaggcgtggtagctcacacctatagttccagcactttgggaggccgaggcaggaggatcacttgagcccaggaggtggaggccgcagtgagctgtgactgcaccgtggcactccagcctgggtaacagagagagaccttatctcaaaaaaagaaaaaaaatcttaaaaattagctgagcataaaggcagccaactaaatgcttgtagtcccagctactcagcaggctgaggcaggaagaacgcttgcgcccaggagtttgagatcagccggtccacattctacacaggtctctcgtgtagagactctatctctacacaaaacaaatattaaaaaaaaaaaaaaaagaaggccttcaccagatgccagcaccagaacttggacttctcagcctccagaactatggaaagtacatttctatgttttataaattacccagtctgaggtattttgttagagctgcagaagcagatgaagataaagtcttcgccgaggagtggtgccccagcttttcacaagcaaatggatgctgtctctacttaaaaaatacaaaaattagccgggcatggtagcacacacctgtaatcccagctacttgggaggctgaggctggagaatcgcttgaacccaggcagcagaggttgcagtgagccaagatcgcgccactgccctccagcctgtgcaacagagtgagatcctgtctccaataaaaagggggggtgggtggatttggacacagacacacacacggaggcagaaaactgtgtggagatgaaggcagagatcaggatgatgccttcacaagtcaaggaatgccaaagatggccagcaaaccaccagaagcttggggcttggggagaggcagggaacagactctccctcactgccctcagaagaaaccaactccgccaacaccttgatctcagatcctgtagatctcagaactgcgagacaagaaagctctgctgtttaagcccccagcaggtgtactttatgacagcagccctagcaaacgaacacacgtggagacaccaaacagcatgtctgagaattgctgtaattgagcaaggcgggtgcatggagtttgaaagtggcagcagttggggtggagtatgtagaatcggggacattacctgcagggcggtggagagtgggggaggacatccatagagggatttctttttttcttttctttttttttgagacagagtctggctctgttgcctagccaggctggagtgctgtggcgcaatcggctcactgcaacctccacctcccaggttcaaacgattctcctgcctcagcctcccgagtagctgggattacaggcacctgccaccacacccgggtaatttattgtatttttagtagagacagggttttgccatgttggccaggctggtctcaaactcctgacctcatgatcggtccccctcagcctctcaaagtgctgggattacaggcatgagccatcgcgcccggcccatgcagggatttcaagcaggaaagagatgggatgagatgcgctttgtaaaaggcacaccctggttacagagaaagcagcagaagggctgagacacctttctcctcccattcctggctccccttcccactctctctcccactccttctagcactctctggggatgggcctggctttactcacctgtgggttttggggcccaggacagggcctgctcctcatggacctccttgaccagtttgttgagtgacaaaacgggcccatcagcacctggtttctcagctctttctccttggttaacggccctcatggagcacgctggtgttcagaaaacgggatcaaggactggaggaggagctgcgggcaggtggcaggagccagaggtaccagcccctccccgctgagaagccactggattttttttttgtttgcttgttttatttggtttgtttgatttgagacagagtctcactctgtcacccaggctagagtgcagtggcgcaatcttggctcactgaaacctctgcctcccgggttccagcaattctcctgcctcaggctcctgagtagctgggattacaggcgtgcaccaccaaacccagctaatttttgtatttttagtagaggcggtgtttcaccatattggccaggttggtctcgaactcctgacctcaggcctgcttcagcctcccaaagtgctgggattacaggtgtgagccaccacgctcggccagcaagtgctgtttaaatgaggaggtgagcgacaacacgtccacactgggacagaggcagaaggagaagcagtcaccttggggctggcatcaccaaacgagggctcccatggacaaggtagagaactgggcccctgcttctcagtgtacctcctccttggtccaagtgggttcccagtgagatcagcttggctgtctcctattgtagcaggatgagccgtggacaaaatccctcagacaccgggttaaagaaggaagtggctttactatgttgccctgctttcttcccctgcccctgccgtccctgggagagagaagggacaggcttagaaaaggccaggactcttctctaggagtggaggagtctgaccagtgagtgacattacctgggaggagtcaggctgggtcactcctgtgtccccagtgtctgccataaaaccacactgcgaatggtccaattgccatctgccaggccctgcccccagggctctgtatggattctcacagcagcactgtgtgataggtactttattgtccgcattttacagaagggaaaactgtggcacagagcggtcacctgacctgcccaaaatcccactgctggtaagaggcagagttgaggacacaacccaggaagtttggatctgacctcctcactctgaaaacatacatgctgcccccatgagggccccaatgggcattcaatacctatttatccaattcagcactcacttccagagaggcagcgtagcccagtggttaagggcatgctctccggagtcagagagcctgaagctgaactccagaactaccccctcccagctgggccactgaacttctccaagcctcagtttcctcacctgcaaaatcgaaatattaagttggtgcaaaagtaattctgggttttgtcattacttgtaatactaatggttggccaggtgcagtggctcatgcctgtaatcccagcactttgggaggccgaggtgggcagatcagttgagctcaggagttcaagaccagcttgagcaacatggcgaagcaccgtctgtacaaaaaatacaaaaattagctggtcatgatggcacgcatctgtagtcccagctactcaggaggctgaggcaggagaatcaattgtttgggcctgggaagaggaggttgcagtgaaccaagatcgtgccatcacactccagccaggtcaacaggagtgaagccctgtctcaaagaaaaaagaaagaaagaaagaaatactaatggttcctaccagcggcgagtcctggctgcttttcatcaaaaggtctccttttcctcccaggtacacaactagactgcatttcccaggatcccttgcaagcaggtagggccatgtgactgagttctggccaatgaaagataaggaggaagtgatgtcaccacttctggtcctggctcctaaaacatcctgcaccatccttcatgctctggaccctgggtccgtgcatgacttcatggagcagatcccatacccaacacttctcctcatactggactgtgatgtgagcaggaaacaagctcttactgtgggattacttgtgttaaaccaagttagcctaaagctgcctccttacatattttaagttcagcctaaaggtttctctgtacatcataaagtataacctaaatggaattataaacagacagtagcctacactcgtaccaatcaccaagttttggccaatcaaatgtggcccactgttcaaaccgtgttcaaataaggcaaacaccaagctataaccaatctggcattttcttggcctccaaaagtgctgggattacaggcatgagccaccatgcctggcctatctctataaattttataactccaaagacctcacgttagtgaggtcatagtatttgtcattttatgtgtgacatgtcatttagtataatgtctttaaggttcatgtgtcagaatttccttcctttttaaggccgaaaatcatattcctttgtatggatggaccacatatcattcatccgttcatccatcagtgaacactgggttgcttccacctttttgctatgtgagtcatactgctatggacataggtatacacctacagaagatggattttgatgccatgactgagatacgggaaaaaaaaaaaacaaaactttttttttttttgagatggagtcttgctctgccacccaggctggagtgcagtggtgcgatctcggctcattgcaacctctgcctcctgagttcaagcgtttctcctgcctcagcctccctagtagctgggattacaggtgcctaccaccatgcccagctaatttttgtatttttagtagatacggggtttcaccatgttggccagggtagtcttggacattctcctgaccttagctgatctgcctgcctcggcctcccaaagtgctgggattacaggcatgagccaccatgcctggccaaaaaaaaaaaaaaaaatgtttttaagaagctgacatttttgaaaatttgagacagagtctcactctgtcacccaagctggagtgcaatgatcatggcggctcactgcagccttgacctcctgggctcaagcaatcctcctgcttcagcctcctgggtagctgggaatacaagtgtgttccaccacgcccaactaattttttgtgttttatgtagagatgaagttttgctgtgttgcccaggctggtctcaaactcctgggctcaagtgatcctcctacctcagccccccaaagtgctgggatgtgagccactgtgcctggccagaagctgatatttgaagtcaatgtcataaaaagggggcaaaccaggaactcccctgactggtttcttgctgggaagaagcctgggggagccattggttggcaaagactttactatctcttgcacagatgaggaaatgaggcacaaagaggaaggacgagcaacgtgctgaaagtcaaactgcccagaagtggaggagggaggatttgaacccagggcctctctgtgaggctgtgccatccagccacccggccactgtgttcatcccttcttatttttatttttatttttatttttttgaggtggagttttactctgtcgcccaggctggagtgcagtggtgcaatcttggctcactgcaaactctgcctcccgggttcaagccattctcctgcctcagcctcctgagtagctgggattacaggtgtgtgccaccatgcccggctaatttttgtatttttagtagagatgggggtctcatcatgttggccaggctggtctcaaactcctgacctcaggtgatctgcccacctcagcctcccaaagtgctgggattatggcgtgagccaccgcgcccggccttgttcatcccttctttcaggcagatggcacaggtttctggctcacgctggtgccagctcagcgacagccctgtcagtgacccaaagccttcttggagacggtggttcctcagtgcccggtggccggctgtgggagtctgagacctattttgttcattatgaatgaaaagcagacgtgattttaaatgtcgtgctttggctgctagtgccgggtggagcagggccccagcgagcagtcacaccagataaaacatattatttaggagtgattggaaggcagacaagctgaaacattgtgcacggaagggctaccgcaattcgctcatgagcatcatagtcactttccccgggctcgtaggtggattcacatttagggcaatttccctcgcggtagctcagctccgtgagtgggctcgggcttgaggcttgaggacaagcgatttcccagccgagtgacttccagcctccacatagagcgcggggctcggtgaggcatggcttccctgaatcaaatccacgctgcccactgagatatgatctcagaagtagctccttggctctcaagactcacgagaagggtgggccgagccctgaccccatggctgagcacctgctgtatatcataaccagcaggccgggcccaggattggtaaagcaggaaacaggcttaaagaggttaaggtgtgcatccaaagtcacacagctgttccccaaggagcttctaaatgttaggaaggcacggctgtctagcaggtgcaaatttttgtggtactggtacttgcacagaaatttagacagaggaggcagtgtagcaccatccagatgatggcacttaggtgattctccggccctctgaagccaaatcctaggagggctcctcagacccctgcgtaagaaatctgaacgtagggtctggggcatcaccacaggctgaggatccctgtgggggaagtggaatgtctttttcacactggggttggaggcggggctgaggctgcagctacagcgaggaggaaggccatggagcccaagagccactagccacagtatttcatgacaggagaccaacaggagccagtgtttagagactgaagttctgggatgggaacactggccccaactccagacacagggcaatgaggcatccggcatttactgaacacccagcaggtacaagacccttggggtttagcgggagggagctgtgggacaatgatgacagatcactaccgggggctctccaagcacccagcgctgggccgagccctcggggagacttactctctgtgggtagcgtgttccttagcatacgccgactaccttagcaagtgttaaaagaaaaactttagccaaattaggtttacaagagttcagctgggtgcagtgactcacacctgtaatcctagcactttgggaggccgaggcgggagcatcacttgaggtcaggagtttgagaccatcctggcctacatggtgaaaccccatctctactaaaaatacaaaaaattagccaggcgtggtggcaggcgcctgtagtcccagctacttgggagcctgaggcaggagaatggcttgaacccgggaggcgaaggttgcagtgagctgagatcacactgctgcacttcagcctgggtgacagagcgagactccatctcaaaaaaaaaaaaaaaactcattttgaaagaaactggaaaattttttcagcacgttcacctggaaagcattggaggaagataaaaatgggaactactgagtttctgtaattattcatctggtgtagaagctggcgctgctgttgaggtaccttccggctcagaggtaaagccaaggccacgtcagataaaccagagaataaatggatagacttgccttctttgtaggcattaaatgtggagacctccagagagaaggagaggttgtgtgggctgggctgcctcagagaagtctgtatttatttactcatacatttatttattcacatgtgaaacagtcaagcacctacttcatcctttgctgaaaagaatttttctcttttttttttttttgagacggagttttgctcttgttgcccaggctggaatacaatggcatgatctcgactcactgcaacctctgcctcccagattcaagcgattcttctgcctcagcctcccgagtagctgggattacaggcatgcaccaccacgtccagctaatcttgtatttttagtagagatggggtttctccatgttggtcaggctcatcttgaactcccgacctcaggtgatcatccacccgccttggcctctcaaagtgctgggattacaggcgtgagccaccacgcccagcctgctgaaaagaatttacagagcacttacagagagtagggtgtcacaactgcagaggtgaacaagacaggcagagaactgccagctggatgctagaggcagggctgctagctgggcaccaggagggtccccaggaatggaagcccccactcctgtcccaccaggaggctctggtttggtaggggagacagacatggggcaaatatgcaaagcatatcctggaatatgaccttggtctgcttcctgctttctgcttaggcagggattggaatagatactgaccggccatggatgggaaaagggaggccccaggatgtgctggtggaccgcctggtccttgagcattgatacatgtcacagggtcaggtgtaaaggctcatgcctgtaatcccagcactttgggaggccgaggctggtggatcacttaagcccaggagtttgagaccagccggggcaacatggtgaaaccccatctatacaaaaaatataaaaattcggctgggggctgtggctcaagcctgtaatcccagcactttgggaggccgaggcgggtggatcatgaggtcaggagttcgagaccagcctggccaacatggtgaaaccccgtctctactaaagatacaaaaaattagcctggtgtggtggcacgcacatgtaatcctagctacttgggaggctgaggcaggagaattgcttgaacccgggaggcggaggttgcagtgagccgagatagtgccattgcactccagcctgggcgacagggcaagactccatctaaaaaaaagaaaaaaaattttgaaaattagctggttgtggtggcaggcacctgtaatcccagctactcggtgttggggtgggggctgaggaaggagcatctcttgagcccaggaagtcgaggctgcagtgagccaagacagcaccactgcactctagcctgggtgacagagcaagaccttgtctcaaaaaaaaaaaaaaaaaaaaaaagatgtcccaaaaccactctgacctgagtccggagtcttctcccctatctgggtttctggggcctctcattgtccccagagaagttcaaaggcaacactgggctccattgaggcaggggatgcagggttcaaaccctgacctcatccctgtgcagcctctgtttcacccgaccctaccagcttagccacctccggaggttatccacaagataggtcccatgcctgctcggcggggggttccttcccttctctgcctggggcaggcatgcatggcccacatgaggggccagcccgaaatgccagcaaattagtgtcccaggagtgaccctcaatcagtgagagggaggaggtgggcagttcttaggggtgcccccacacagtagctcagaggtcccccacaaaaactgagccctagttgcaccctgttccaaggactattgtagcaaccattttactatgcctgcggatttacagatccaaaattcagaccaagcacacgggggaacgcttggctctgccccgcagtgtctgagaatccagctgggaatactggaatggttggcgggcaacttcaatgcctagagataaaaaaaaccctgtggtggcatctttccctgaatgccaggcactaagctgggatggtctgaatcctcagctcagctggggcagatgactgaagtgcccacacatggcctcgtcacgtagcttgggcttcctcactgcatggcggcctccagtagtcagatttccaatagggcagctcaggggctccagtggacaaggcaggaagctgcattgccttttatgacctcatcagggatggaagttacacactgtcacgtttgctttgctatattggctgaagttgtcacaagtccacccagattcaatggaagggggtgtagactctacctcttcatgggaatttgtggccattttaaaacttcccccaccccagctgctggcagggcatcctcgattggctctcctcccctcctggtctctctgcccctcacccacactgcctgcacccaggtgtttgtctcagccactcactaactgtgagtccctaatctctcccagccttggtttccttagctataaaatggggatactaatggtcctgcctcccagcgtcagtgtgaggagtaaccgagatgcacacatgcagtgtttgtagctgagtgcttagtatagagattagccttttttttcttttttcttttttttagacagaatcttgctctgtcgcccaagcaggctggagttcagtggtgggatcttggctcacagcaacctccaccttccgagttcaagcgattctcctacctcagcctccggagtagctgggactatggtgtgcgctaccatgtcccgctaatttttgtattttttgtagagatggggtttcaccatgttggccaggctggtttcaaactcctgacctcaggtgattcgcccactttggccttccaaagtgctgggattacaggtgtgagtcacccaccatgcccggctggaggtttgccatttttatgaactatttcctcatgattgtggctaaagccagctcttgtatccagtaacttcactccgaaaaattggtggtgcttcactcacagtcctgggtcccaaatctctcttatgcaggctgcccactcccttgaggatgacagcaacccagagggcagctaaggttacggcttaggaatttggcaggtgtgagcaattgcattttcaaataactgcaacagcgtctccctcctatcccacgggcttacccacaaggtgactgattctcctgccatcaaaaagcaatgtctgtgtcccctcctcttgaatcagaatgggcttttgttgtctgttgcaaccaatacaggaagacagaggtgatttcccaagcaaggtccaagaggcaggcagtgtctaccttgctggccagactatctctcttgaagaagccttgagccaccatgtgagcagtccaaggccctgagactgctgcgtggtgaggccacaggaagaggacctgacattcataaagacagacagaggctcacttagcccccggtggtcccagacgccccgccaacagcagcttctgcccgcccctgctattccggctccagtatctgattgtagccccacacacgagatgctcccctgccagaaacacccagctaagctctcccaaattcctcacccacaaagtaagcataatagaatgcttgttttatggtgctaaagtttggggtaatttattacttagtaagagtaaccagctgggtgcggtggctcacacctataatcccagcactttaggaggatgaggcaggcggatcacccgagatcaggagcttgagaccagcctggtcaacatggcgaaaccccgtctctaataaaaatacaaaaattagccaggcgtggtgatgggcgcctgtaatgccagctactctggaggctgaggctggaaaatcgcttgaacccaggaggcagagtttgcagcgagccgagatgacgccactgcactccagcctgggtgacagagtgagattttgtctcaaaaaaaaaaaaaaaaaaaaatagtaaccggagcaccaatttaggaagcatcctgtagcaggtagcagtgtaactgggcaacaaaacctgttcccacttagcttgccgctctctctcctgagccagtcatgcctgcaggaacatctcaaaggtcgccctcccatgccagcctggcacctcaatgctgtatgtttcctaaaagcacagctttgaggcctccaaaggggcaaagtgtggtggattggcaaagtgcagtggctcatgcctataatcccagtgctttgggaagctgaggctggaggatcgcatgagaccaggggttcaagaccagcctgggcaacatagcgagatcccgcttctatttcaatttttaaattgtttaagtgtgctgggttatctgacacttctgtgacctcctagtgagaactaaacaccagggatcagcaacctggaccccttcacaagggtttccaaagggaatcctttggccccatggcacttctatttatttatttagagatggagtcttgctctgtcgcccaggctggagtgcagaggctcactgcaacctccgcctcccaagctcaagcaattcttctgcctcagcctctgagtagctgggattacaggtgcgtgccaccatgtccagctaatttttgagtttttagtagagatggtgtttcaccatgttggccaggctggtctcaaactcctgacctcaagtgatctgcctgccttggcctcccaaagtgctgggattacaggcgtgagccaccatgcccggcccccatggcacttctgtgacattgatggggaaagtgcagcagaactaggcatggcagaatccctcttgcctctcttgaaggatggtgatacctgtctgggccctggtagggtttgatctgccctcatggcacctccacctactctgaaaatcctcaggcggaggctgggcacggtggttcttgcctaaaatcccagtactttgggaggctggggtgggagaattgcttgagtacaggagtttgaggccagcctggacaacatggggaaaccctgtcgctacaaaaaaatacaatactagctgggtgtggtggtgcacgcctgtagttccaactactcaggaggctgatgcgggaggactgctgtagcccagaaggtcgagggcgcaacgagccaagatcacgccactgcactccagcctaggtccacagagtgaggaaaaaaaaaaaaaaacctgtcccagctgggatgcgagtgccctcctgctgaaggcaggagtcaggccgaggcagcaacaggaagagcaagatagaagctgcctggcctcactgtggtctctgccactgagtggaaatatttccagttcggtggcttagtccttgcgacgcagcccttgaccctgttggtgataccaattctcaagctggtctcaaactcctgagctaaagcgatcccccagccttggcctctcaaagtgctaggattacaaccgtgagccactgctcccagtcctgcccctacatattatatactgtatttatacagcaacatttaactagaaaaaagaaaatgctattaagaaaattgtctggggatgggcgcggtggctcacacctgtaatcccagcactttgggaggccgaggtgggcggatcacctgacatcaggagttcgagaccagcctggccaacatggtgaaatgctgtctctactaaagatacaaaaattagctgagcgaggtggcaggtgcctgtaatcccagctactcatgacactgaggcaggagaatcgcttgaactcgggaggcggatgttgcagtgagctgaggtcgtgccattgcacaccagcctgggcaacaagagcaaaactccaccttaaaaagaaaatcatgggcaggcacggtggcacacaccgttcgggaggctgaggcaggcagatcacctgaggccgggagttcgagaccagcctggccaacatggtgaaaccccgtctctactaaaaaacacaaaaattagcagggcttggtggtacagacctgtaatctcagctactcaggaggctgaggcaggagaatcacttgaaccagggaggcggcggttgcagtgagccaagattgtgccactgcactccaggtcaaaaaaagaaagagaaagaaaggaagcaaggaaggaaggaaggaaggaaggaaggaaggaaaaagagagagaaagaaagagaaagaatataaaatcacctgggcacagtggccctttaggagtccgaggtgggtggattgcttgagcccaggagttcaagaccagcctgggcaacatggtgaaaccccatctctacaaaaaatacaaaaattagtgtggtggtgcgagcctgtagtcccagctactcgggaggctgaggcaggaggatcaaccacctgagcctgggaggtggaggttgcagtgagccgtgattgggccactgcactccagcctgggtgacagagcaagaccctgtctcaaaaaaaaagagaaagaaaatcatgaggaagagaaaatatatttactattcactaaatggaatcagatcatcataaaggtcttcatccttgtcttcacgttgagtaggctaaggaggaggggaggaaggaaagggttgctctggttgtctcctgggtagcagaggtgaaagaaactccgcatccctgcggacctgcacagttcaacccgtggtgttcaaggctcagctattttcacccagctttcgtatcctcattatgaactaaagattaaactctttttaaaaatggatgtttaggctgggcacagtggctcatggttgtaatgctagcactttgggaggctgacgtgggtgaattgcctgagctcaggagtttcagaccagcctgggcaacatggtgaaaccccatctctactaaaaatacaaaaaattagctgggtgtggtggcacccgcctgtagtcccagctactcaggaggctgaggcacgaggatctcttgaacccgggaggcggaggttgcagtgaaccgagatcacgccactgcactccagcctgggcaatggagcaagactctgtctccaaaaaaaaaaaagaaaaaaaaaagatttttaatcacataaataatgcataaaatattactacttctttaaaaaaattttaaacatgattttaaactttaaaaaaagacattttaaacatttaaacatgacagtcctgtgactgtctgttttgctcactgtctcatccccacatccattcccagctctccagaggttatctctgttattttgtggcagctgcctcgggtatttttctacgtatttgcatgcatatacacttatcctttgaaataaacagtgtggtttgtgtgcatttgatttgttttcacacaaatggatcggacagatcacatcattctacaacttgctttttttactcaataacacatcttgtaatttaccaatgccagcaggaaaagaaggagggaaggacctcagatctgagagaagctgggcagacaaacctcaggggtgaaggccctcattggacaaactactcgttggtcactggacacttgtcttcaggacactcccctgtgctctccagaggcttatctggtttatctctcttttttttccttttctttctttcttttttttttttcatctttaccacttcttccaggatagtttatcttggcaaacaaaccacaatccgttctctgcatgaaacatctacaagtcccaggttctaacatatgaaaacaggtcaggcacagtggcagatgcctgtaatcccagcactttgggaggccaaggtgggcagatcacttgaggtcaggagttcgagaccagcctggccaacatggcaaaacccgtctatactaaaaatacaaaattatccgggcactgtggcacgcgcctgtaatcccagcatctcgggaggctgagccaggagaatcgcttgaacctgagaggcaaaggctgcagtgagctgagattgtgccactgcactccagcctgggtgacagagcaagacttggtctcaagaaaaaaaaaggaaagaaaacatccttctctttcactgaagcatgaagtggactgtggctagtgggagggggcatctctgtgaggcatgtttatgaaaaggcagtgcaggcctgggcctgtcctcagcactggcccttgtcaaggcctgtttccttgagcctggagtcctttgggagctgtgagaaccaaaagagaaacggcacacctgtacatttactcatccttttaatttaggcaaggattcttcattcttcaagagatgacaacaaatttgggcttttttttttcttttttaagacagagtcttgctctgtcacccaggctggagtgcagtggcacgatctcggctcactgcaacctccacctctcggattcaagcaattcttctgcctcagcctcccaagtagctgggattacaggcatgcgccaccacgcccggctaatttttgtatttttagtacggccggggtttcaccatgttggtcaggctggtctcagactcctgaccttgtgatccacccgcatttttttttttttcgagacagaatttcgctcttgttgtccaggctggagtgcagtggtgcgatctcagctcacagcaacctctgcctcctgggttcaagcaattctcctgcctcaacctcccaagtagctgggattacaggcatgaaccaccatgcccatctaattctgttttttttgtttttgtttttgtttttttttgagatggagtatcactctgtcacccaggctggagtgcagtggcatgatctcggctcactgcagcctctgcctcccaggttcaagcaattctcctgcctcagcttcctgagtagctgggattacaggcacatgccaccacgcccgactaatttttgtatttttagtagagacaggatttcacaatgttggtcaggctgctctcaaactcctgacctcaggtgatccagccacctcggcctcccaaagtgctgggattacaggcgtgagccaccgccccttttgtacttttagtacagatggggttttgccatgtttgccaggctggtctggaactcctgacctcaggtgatccgcccaactcagcctccaaaagtgttaggattacaggcatgagccaccgcacctggcctgcctggcctatttagtagctttaagccactcccaagtggctacatcccaacttccatagggatacaatccacattgtttttcgttttatgattcccctcacacttgttccctcctttgacattgctttattgccctctccagttctcttctcttcccaaaagcccaaagcaacaatcagggatggctaaggtagccgggctggtcgtttttttttttttttttttttttgagacaaggtctagttgtcgcccagtgtattagtctgttctcaagctactaataaagacatacccaggacaggtgatttatatatatatgaggtttaatggactcacagttccagatggctagggagggctcacaatcatggcagaaggtgaaggaggagcaaagtcacgtcttacatggtggcaggcaagagagtgtgtgcagggaaactgccctttgtaaaaccatcagatctcacaagactcattcactatcacgagaacagcctgggaaaaaccacctccatgattcaattacctcccaccggttccctctcatgacacttggggattatgggagctacagttcaagatgagatttgggtggggacacagccaaaccatatcacccagactggggtgcagtggtgcagttatggttcacttccacctcagccttccctggctcaggtgatccttccacctcagccttccaagtagctgggactacaggtgtgccaccatgcctggctaatttttttttttcccctttgtagagacagggttttgccatgttgcccaggctggtctcaaactcctaggctccactgatcctcccaccttgacctcccaaggtgctgggattataggcatgagccaccatgcccagccatgggtggtcttttatgggtccttttttagtttttgtttttgttttgagacagagttttgctcttgttgcccaggctggaatgcaatggtgcagtcgtggctcactgcaacctccacctcccgggttcaagtgattctcttacctcagcctcctgagtagctgggactacaggcatgcaccaccacacccagataatttttttttttttgcatttttagtagagacagggtttcaccatgttggccaggctggtctcaaactcccgacctcaggtgattgcctgcctcggcctcccaaattgctgggattacaggcgtaagccaccgcgcctggctgggtccttttttttctactccttccttgactaactcatcccagttctctcaggactttcctggttttagcactgtaaagctccacactccaggaatctcttccttcctgaatggctgcttaccctacctactcccccaagccccaccaatctaatacatcacatggaagagaaatttttttctttttttgagatggacttgtgcttttgtcacccaggtggagtgcaatggcgcaatcttgcctcactgcaacctccacctcccgggttcaagagattcagaagagaaacttctgttggtccctgtggtagacagaattctaagacggcccccgggttcctgtcccctcgtgtacacgccctgcataaccctctcacctagagtgtaggtgagatctgtaaatatgatcggatcttgttcctgcggttaggttactaatcagttgattttttactccatcaaaagaaagattcttctggatgggcctgacctaatcaggtgagcctttaagagaaggtggagtgtcagagggaagcattcactcctgctgctcctgaacaccctgctcccataaattctacagctgcaagaaaggagttctgccaaaaaacacatacgcttggaccccaagcctcagatggaacctcagccccagaaacacatttatttcagccttgtaagccctcaagaagagagtccagctacactctggcatgacttatgacctacagaactgtgagataatatacctgtgtggttttaagctgctaaatttgtggttgtttgttacacaacaatagaaaactaatatgatattattaagggcagccttccatgtaagagaaagctatgtaactatggctagttcctcagtgtgcctgagccattgtgaataatgccgacttctctctctctctctctctctctttctctctctctctgggtaggccaggcacggtggctcacacctgtaatcccagcacgtgagaaggccaaggcaggaggctgaggtggaaggatcacttgagtccaggaggtcagggctacagtgagccatgatcacaccactgcactccagcctgggtgacagagtgagacctgtcttaaaataaataaataaataagccaagctcagtggctcatacttgtaatcccagcactttgggaggccaaagtggacagattgtttgaggccaggagtttgagaccagctgggccaacatggagaaaccccgtccaaaaatacaaaaattagctgggaggatgtggaggtacaaacctgtattcccagcttcttgggaggctgaggcacaagaattgtttgaacccaggaggcagagattgcagtgagctgagatcacgccactgtactccagcttgactaattcaagactctgtctcaaaataataataataataatttctaccaggaggcagagattgcagtgagctgagatcacgccactgtactccagcttgactaattcaagactctgtctcaaaataataataataataatttctaccaggattctggatgcgtcacttgacttcactgtgcctgactttctttgttataaaatggatctgatgttcacctacttcgccttacaaagatgatggaaaggacaagaggataagagagagagagtaattccgcacctcaaaaggaaaatgaacaaattcgagtccaatcctttctttttgtgtaactctgtcatagacacggaccgttttgtctgctgggtaaacactgcatcaacacagtgcatttggagagaatggttccgtcgttccactccaacttcatggttgatggggctccaaccttggccactcttgattggtttagggatgatacctgacctttctgagccaatcggaatcttgccttgtgattctagaactgagatggcaaagtcagtttcttttcagtagctgaaaatgaagtcatgtaaactcctaagttcatctgaggctaagcagggctgtttgctccaatattccatcatccaggctgaggaacaaaaatagcaggttggccacaggaaagaaggatgaggccaaaagaggtacacaaggccgggcgccatggctcacgcctgtaatcctagcactttggaaggccaaggcgggtggatcacttggggtcaggagttcgagaccagcatggccaacatggtgaaaccctgtgtctactaaaaatacaaaaattagccagtcttgctggggcgtgcttgtagtcccagctactcaggaggctgaggtgggaggatagcttgaacctgggaggcagaggttgcagtgagctgagatcgtgccactgtactccagattgggtgacagagcatgaccccgtctcaaaaaaaaaaaaaagaaaagaaaagaaaaaaaagaggcacatgagatttaccaaggagagagctgaagagagcacttcctgactggccagcctttcccatgcaccaacctcagactgtctgtggtatgcatttcacaagcttccccagcatcactacagcacgtccccagccttctttccactcctcaaagttctattttatttatatatttatttattcattttgagaaagtgtcttgctctgttgcccagagtgatcatggttcaccctagtctccatctcctgggctcaagcaatcctcccacctcagcctctggagtggctggtactacaggtgtgcactaccacacccagctactttttttttttttttaattttttttagagatggagtctcactatgttgcccaagctgttctcaaactcctggactcaagtgatcctcccacctcaggctcccagggtgctgggattacaggcatgagccactgtacccggccaaagtttatttcctggggtgaatacatttttcattgtggtaaaatataaataacataaaattggccgagtgcagtggctcatgcctgtaatcccagtactttgggtggccaaggcgggtggatcatgtgaggtcaggagttcaagaccagcctggccaacatggtaaaaccctatctctactaaaaatacgaaattagctgggcatggtggcacacacctgtaatcccagctacttgggaagctgaggcaggagaattgcttgaatccagggggtggaggttgcagtgacccaagatcatgccattgcactccagcctgggcaacaaaagttgaaactctgtctcaaaaaaaaaaaaaaaatccgccagtgcagtggttcacgcctgtaatcccagcactttgggaggccaaggcgagaggatcgcaaggtcaggaattcgagaccagcctggccaatgtggtgaaaccccgtctctactaaaaatacaaaaattagctgggcatggtggtaggtgcctctaatcccagctacttgggaggctgaggcaagagaattgcttcaaccagggaggtggaggttgcagtgagcctagatcgcgccattgcactccatcctgggcgacagagtgagactctaactcaaaaaaaacaaaaaaaatcgactgggcatagtggtgggcacctgtagtcccagctactcgggaggctgagggaggagaatcgctagaacccaggaagcctggtcaacagagcaagactctatctcaataataatcatcatcataacaacataaaatttatcattgtaaccatttttaagtgtacaattcattggcattgttatgcaaccatcgccaccatccatctccagaattttttatcatcacaaacaggaactctctaccatgaaacaatgacttaccatttcctccctcctcccagtccctggtaacctctattctaccttctgtcactgtgaattggactactccaggtacttcgtataagtggaatcatgcaacacttgttctattgtgtctggcttaatttatttagcataatgttttcgagatgcacccatgttatagcatgtgtatatcagaatttcattccttaaggccaaataacattccattgtatctatatgccacattttatttatctgttcatctgttgatggacatttgaattatttctacattttaccaaatgtgaataatgccgctatgaacattggtgtgagacaaatccctggttgttgttttgttgttgttgttgttgtcgtcgagacagagtctcgctctgtcatccaggcacgagtgcagtggtgtgatctcgactcactgcaacctctgcctcccagattcaaatgattctcctgcctcagcctcccgagtagctgggattacaggcgcccgccaccatgtccagctaatttttgtatttttttttcttttttaagtagagatggggtttcgccatgttggccaggctggtcttgaactcctgacctcaggtgatccacctgccttgccctcccaaagtactgggattacaggcacaagccaccacacccagccctgatccctttgtcaatcagcgataatttttgtttcagatgatcataagatttctatctaatacaggaaatgagaaactgtaaccccgaaagccagatgacctcctgccttcccagaatgaataatccaaccctgatgtgtccccagacccatctggaattctgaatggggaaatctaggtaggaatgaagtctgggaactggaaaatgaaggatactttttgtacgattccaccaggggcctggtagtcaagagaatgagagtagtaatttaagatagtggggtttggcacgtacaagctatttagcaagcaggcattatggaataaacacgcaagcagaagctcaaagagaagaaatgttcaaaacatgacattgttttcatctttttagcctcagaacgtggtaaattcattcacacatgatttgtttttgtctacattcactaagcatctaatatatgtctaccaggacggagactgttgtgctaagcacaccagaaatgacctctgacatcttgtaacatccagtctagcaggggctgcctcatagtaagtgttcagtacgtgtgtgtgtgtttgtttatttgtttgtttgtttcgaaaaaggggctggctctgttggccaggctggagtgcagtggcgtgatcttggctctctgcaacctccacctcctgggctgaagcgatcctcccacctcagcctcccaagtagctgggattacaggtgcgcaccaccacacctggctatcaatacatattttgcatgaaatatttagtaatcatttctgtatgcttcgtggcatttaatatgcagccagtttttgacaaatgtcatgcttgaacaagtttctcacaatccaaagtgaaaagtctcccagatcatacacaaaacaaaaccaaaatacaatagctggggctggtcgatctgaaggggatatacccaatcttgcaagggtttctttggctgagtttttcccacaagccagtgagctttgtattcacaggcaaaaccccgcctgagacacctgtcagccaccaccattacttgctgcaataaaggtatagatgaatgttctcagactttttgagggtagatttgagagaccacctagaggcctaaggtagaaaatcaggccatatcatatggtcagaattgatcctatttataatagccagttaaatatatgtgagtaactcttctgtgtaaagacctcattacaatgaaagtatctccaggcaatcacaaggatgaggggaaaacaaaatattaaaaatgaaagtaaaaatattaaaggtttaaaagctacagtatcagccaggcacggtggctcacacctcttatcccagcattttgggaggccaaggcaggcagatcacttgaggtcaggagtttgaaaccagcctcgccaacgtggtgaaaccctgtctccactaaaaatatacaaaagttagctgggcatggtggtacacacctataatcccagctactcgggaggctgaggcaggagaattgcttgaaccagggaggcagaggctgcgagccgagattgggtcactgcactccagcctgggacacagggcgactccatttcaaacaaacaaacaaacaaaaaactacagtattaaagtgcatgggagggagaacaacagctgacaagaagtactaatacagatacgtgactcacgcctataatcccagcacttttggaggccaaggcaggaggatcacttgagctcaggaattcaagaccagcccaggcaacatggtaagaccctcatctctatgaaaaaacattattaaaaaacaatttctggccgggcgcggtggctcacacctgtaatcccagcactttgggaggccgaggcaggtggatcacgaggtcaggagatcgagaccatcctggctaacacggtgaaaccccatctctactaaaaataccaaaaattagccaggcgtggtggcgggcgcctgtagtcccagctactcgggaggctgaggcaggataacggcgtgaacccgggaggcagagcttgcagtgagcagagatcgcgctactgcactccagcctgggggacatagcgagactccgtctcaaaaaaaaaaaaaaaaaattttctatgccgggtgcagtggctcatgcctgtaatcccagcactttgagagaccaaggcgagtggatcacttgaggttgagagttcgagaccagcctggccaacatgttgaaaccccgtctctactgaaagtacaaaagttagccgggaactgtggcaggtgcctgtaatcccagctactcaggaagctgaggctggagaatcccttgaacctgggaggcagagagtgcagtgagctgagatcacatgacttcactccagcctgggcaacggagcgagactctatctcaaaaaaaaaaaaaacaatcctagaaggcacaaatcacaaattggatggcagagtagccataaagcagagcagaagccaagaatctttgcaggccggacgtgatgactcacacctgtaatcctagcactttgggaggccgaggcgaaagacacttgagcccaggagtttgagaccaggctggaaaacatggcgagactttattgctaccgaaatttaaaaaattagctgagcatggtggcgtgcacctgtgcttccagctactcaggaggatgaggtgggagggggatttcctgagctcaggatgccaaggctgcagtgagctgtgtccacatcactgcactccagcctgggcgacagtgagacctgtgtcaaaaaaaaaaaaaaaggctgggtgaggtggctcactcctgtaatcccagcactttgggaggccgaggcgggcagatggtttgaggtcaggagttcgagacaagcctggataacatggtgaaaccccatctctactaaaaatacaaaaattagctgggtgtggtggcaggcgcctgtaatcccagctacttggcaagcagaggcgggagaatcgcttaaacccaggaggctgcagtgagccaagatggcgccactgcactccagcctcggtgacaagagcgaaactccatctcaaaaaaagaaaaaaattcaggaaatcgacccaaaaaggctactagaactaataagtgagtttagcaagttttagggataaaagttctatctaaaaagcaattaggctgggtgtggtggctcatgcctataatccagcattttaggaggctcaagcaggataattggttgagcccatgagtttgatgggcaatatagtgagaccctgtctctactaaaaaataaaaaactaaccattgcatggtgacatggggctgtagtcccagccactccggaagctgagatgggaggattacttgagccggggaggttgaggctatcgtgagctgtgtttgcactactgcactccaggctgggtgacagagcgagactctgtctcaaaaccaaaaacaaaacaattaatttctgtacatcagtaataaataattgaaaatcaaaatgttaaaacatatcatttacaacagcaccaaaagccatgaaatatttaggtataaatccaacaaaatatgtgcaggatctgtacactaaaaactataaaacactgggccagaaattaaagaccaaaattaatagagtgatatataatgttaatagattggaagacacactattgttaagatgtcagttttctccaaattgatctatagattcatgatttcaatcaaaatcccaacagatatttatttatttatttatttattttagagaacaagtctcgctctgtcgcccaggctggagtgcagtggtgtgatctcggctcactgcaacctccgcctcccaggttcaagcgattctcctgcctcggcgtccgaggtagctgggattacaggctcaccccaccacgatctgctaatttttgtatttttagtagagatggagtttcgccatgttggttggccaagctggtctcgaacccctgacctcaggtgatccacctgcctcagcctcccaaagtgctgggattacaggcgtgagccaccacacccggcctagattttttttttttttaagatatcaacaagataattctaaaatttatttgctaagacaaaggaacttgagtagccaaaacaattttgaaaaagaagaacaaagttgaaggacttacactacctgattttaagatttactgtaaagctacagtaatcaagacagtatggtgttggggaaaagatagctacatatgtcaatggaacagtatagagagtccagaaatagacctacacgtttgtggctaattcattttttttttaaatgaaggtacaaaggcaattcaatgaagaaagaatagtcccttttacaattggtactgaaacaatcagacacccttatgataacaaaatgaagccaggtgtggtggctcatgcctgtaatcccagcactttgggaggctgaggcgggaggactgcttgaactcaggagttcaagaccagcctgggcaagatggtgagacctcatttctactaaaaaaagaaaaaaaaaaatagccaggtgtagtggtgcatgcctgtactcccagctactgggtaggctgagatgggaggattgcttgagccccagagattgaggctgcagtgagccatgtttgtgccactgcactccagcctggacaacagagcaagaccctgtctcaaaacaacaacaacaacaacaaagaatcttgacccgtacctcacacttgatgcaaaacttaactcaaaatggatcataggcctaaatgtaaaacctaaaactataaaacttctagaagaaaacataggagaaaatctttgtgaccttaggctagacagttctcttattagataagataccaaaagtacaatccatagaacaaaacattgataaattgggcatcattgaaatgaagaacttcttctattcaaaagacaaaataacagaaagacaagccacagactgaaagaaaatatttgcaaatcatgtattttataaaagacttgtatacagtatataaagaaccttcaacgtccccaaattttttaaaaacccaacttctaaaatgggcaaaacttttgaacagacagttcatcagagaacatctacaaatggcaaataaattagcagagttgtttgctgaaaccaaagcaaaacaaaatatcaaatggcaaataagcatagaaaaagatattcaacttcattagttattaattaaatgcaaattcaggccaggtgcggtggctcacgcctataatccaagcactttgggaggccgaggcaggtggatcacctgaggtcaggagttcgagatcagcctgatcaacctggtgaaaccctgtctctacaaaaaaatacacacacacacaaaattagccaggcgtggtggcacgtgcctgtaatcccagctacttgggaggccgaggtaggagaactgtgcgaacctgggatgcagaggttgcagtgagctgagattttgccattgcactccagccttggcaacaagagtgaaactctgtcttggaaaaataaataaataataaataaataaatgaacttcaaaccacaatgagatgctacaacacacctattagaatggctaaagttggccaggcgtggtagctcacgcctgtaatcccagcactttgggaggccgaggtgggcaggtcacgaggtcaggagttcgggaccagcctggccaacatggtgaaacctcgtctctactaaaaatacaaaaattagccgggcatggtggcacacgcctgtagtcctagctactcaggaggctgaggcagacgaatcgcttgaacccaggaggcggaggttgtagtgagccaagattgcgccactgcactccagcctgggtgacagaacgagaccccgtctcaaaaaaaaaaaaaaaaaaaaaggctaaagtttaaaatgctgaccagactcaaatgttgtcaagtaggtaaagaaactggaaaactggaatgttcacatgttgcttacaagaatgaaaaaaactgaaaaatggtacaagcactttgttgtttctgtttgttttgttttgttttttagagacagggtctcacgatgttgcccaggctggtctcaaactcctgagctcaagggatcttccctccttggcctcccaaagtgctgggattacaggcgtgagccaccacgcccagcaataaaactgtttaaagaaatattggagccaggcgaggtggctcatgcctgtaatcctagcactttgggaggctaaggtgggtggatcatctgaggtcaggggttggagaccagcctggccaacatggcaaaaccccgtctctactaaaaatacaaaaatcagccatgcatcgtggtgcatgcctgtaatcttagctacttgggaggctgaggtagtagaatcatttgaacccagaaggaggaggttgcagtgtgccaagattgcaccactgcactccagcctgggtgacagagtgagactcaatatcaaaaaaaaaaaaaaaaagaaaaaaatatatgtatgtgtatatatatgtatgtatatatatgtatatatgtatatgagatgctagaagacaataagagatgccttcggtcttctaaaggagaattatttacaatccagagctctataactagctacatcattaattttgaggggccagctgagttggctcatgcctataatcccagcactttgggaggccaagacagaaggattgcctgagcccaggagttcaagaccagcctgggcaacatagtaaggccctgtctctattaaaaaataacgtttttttttaaagtgtgaaggccgaatagattgttttggaaaagtgtggtaccaaaaaatttactagccaaatttactaagtttctttgaacttacttgagagtgtagcactactctatggtaccagcagggtggtacgaggccaaaggtggaatcggggagatatacagtcactttcctgtcaacaatggacagcatatttgacggtggttccatgaaattataacactgggccgagcttggtggctcacacctgtaatcccagcactttgggaggctgaggagcgtggatcacctgaggttaggagttcaagactagcctggccaacatggcgaaaccccatctgtattacaaatacaaaaattagctgggtgtggtggtgggcgcctgtaatcccagctacctgggaggctgaggtagagacaattgcttgaagccgggaggtggaggttgcagcgagccacaatcatgccactgcgctccagcctggaagacagagcaagactcggtctaaaaaaaaaaaaaaaaagattataacactgtatttttactgtatcttttctatgtttagatacatgaatacctaccactgtgttacaactgcctacagtagtccatatagtaccatgctgtacaggtttgtgacctaggagcaatagcctaccccatatagcctaggtgttgtagtaggctatactatcttggtttgtgtaagtatgctttgagatgttcacatcatgatccatttctcagaacatagtcccatcactaagtgacaattacatatatacatatacatatgcattccctattaaaggtagattctaatttactctcagatgctaagacaaagagaactattccaatcattggatcactcctattgctccaaggcatgcctgtatccctcagtcagtgttggagagtcttaataattctatttttaaattttcagatttcatgctgacatgctccttagtctgcacttgaaattccagtggacacttgacattggaaaaggtctgctctggggacctgtgaaaatctctaaatggagaattctctcactcacgatttatcgctataagctatttctgcctcagagatataaacaacgcagatcttgggatggcaaggcaaagcttccccaaattacaaatgaccagatgctgagggtctttagggtagttaacgaattctggaaaccacccatgttatatcctttaaaatctactgtacaacattctccatgcttatttttttctcttgatgtatttgaaaaatcatgttactattcaaacatatttgctgtttctccctggagatggactatatttctctgccacttgatcagtgcttggccacggcttgctttggccaattaaatgtgagcagaagtgccatatgccaccaacttctaggcaaaagctttaaaagccaatgtatgcttcatacttctgcatcttattgacaacaggcaaacattcttcaaccaataaaacatgaacaaaagtagtgcctagcatttgaggaagaagctttaaaaaccagttcgtgctttgtcactcgcttcttcctctgccctgataaagtttaatgttccagacagaggctgctatcagccttggctgaagagtaaacaggacacgtagtggaggcaacaccatgttcatgtatccagtgagaaataacctgtattgttgtaagctactgaggttttaaggcttgttactgtagcataacctagactctcctcattgatacagtttcattttagcgtggcttctagttggtaatatctagaggcattgcaatgttatcaataggaatggtttgcaaaactagtcacaaccacagtatgtggatttttcttttcttttttttttttttagactgagtcttgctctgttgcccaggctggagtgcagtggcacgatctcggctcactgcaacctccacctcccaggttcaagtgattctcccacctcagcctcccgagtagctgggattacaggcacccgctaccaagcctggctaattttgtgtgtgtgtatttttttgtagagacagggtttcactatgttgaccaggctggtcttcaactcctgacctcaggtgatccgcctgtgagccactgcacccggcttttttttttttttttttcgagacaaggttttgctcttcttgcccaggctggagtgcaatggcacattctcagctcactgcaacctccgcctcctgggttcaagcgattctcctgtctcagcctcccaagtagctgggattacaggtgccctccacacgccttgctactttttgtatttttagtagagatggggtttcaccatgttggtcaggctggtcttgaactcctgacatcgggtaatctgcccgcctcggcctcccaaagtgctgggattacaggtgtgagccaccacacccggccgaatttttcttttttaacctctaagaatctttccctgtcttctttggacaagatcatctcattcattcatttcacaaatactgagagccaaccaaatgccaggcattggtgctaggtggtagggagagcaattaacaagacaaacatagaccttatgtcagcagaggctttattctagtggaaaaggcagacaataaacatataactgcatgatgatttaaaagcaactgtgataagtgctataacaagatgatgaagtctagggtgttagtagaacaattaacagtgaacatgacaagctcagggtcatcttcatcttctgtgcccccaaatataagtgacctgctcaaagttaaccagtaaaagaggggaaaacaaaactgtcttcctacttagggattctctggtctttggaccaaaccttggaatacaacttacatttgggccaatagccttgttttccctatttatactcatagggaaagccagctggaatatgcatgaatcaacattctaacctcagagatatatttctaaaattcaaaacagaagttatcactgatacttggttcagctgaacgactgtgttcatgaaagttgataccattgccattccttgatttttacaagcatagcaaacttaaaacgctcaacacacccagaatgggcaataaatggatgtgttggcatggtcctcctcgtgctggcacttcaacaacacagcaagctatgtacttttgaacaggggttggaacattttttctgaaagcaatcttcaatcttgcaattttgccaaattcttttattttgccataatctatgaattattctacttggcattattgaatgcaaaataagtttactaagcacctactatgtgccacaccctagggatacagggaaaaataagtctctgctctaaagtaactcacagtctaggaaagaagtcattaacaaataaataactatactttggttattggtcaagtattcctcatacttctttagaatgcccaaagctctcttggcataatgacacagtgaggggtgagggtggggtcatcaaggaaagttatatgggacttttttccccaagaaagggtcttgctctgtcacccacgctgtactgcagtggcgtgatcatagctcactgcagccttgacctccagggctcaggtgatcctcccactccagcctcccaagtagctgggactacaggtgtttgccaccacgcccagctaattatattttttgtagagacggggtctcactatgctgcctaggctggtcttgaatttctgggctcaagagttctgcctgccttggcctcccaaactgctaagattacaggcgtgagctaccgcacccggcccgtattggattttatttatttccttttcttggtgctcatcctccttcacaacttcaagatgggcataagatgtttgacaacatggttcttcattaagtccaactccttatcataatagggcttgggaaatattaaacacgagggcaatcgtgctaacacaaaaatgggcgccccctaaaccttgttacttgtttgctcacttataagaagagccaactcaaaggctcaactgaattctagcactaagattccttccttgctgtagaagatctgtacctggtcacttccattaaagttacataggcgttccaagaagcctcctgcaatacagttgtgactcagccggtatgggagtaatgacggtcctgtggtatttcctgcacccccagagtcccagagtttgttaaggaccgtgtaagaggacaccacgctggcttttcagtgggcgcgtctctcctgggggcatcaccagacaaccccaggcggaagtggcggtggcccatcctcatgcaaactgcagtgtaagaactggggcccgggactcctcgcaaatgtgggacactgacattctgtgatgctgtcccaatgccctttcaaagcgctcagcccccaaattcccaaccaacagccatttcagggaggggctacccaggaccaggcttttgatgaaccacgactgttcggggtgccgtcttgggagagccacgtcagtccctctgagattccaaacggccgacagcggacacctcgggaccacatccaagcctcggggacctgtcaagacgccatcgacggtcctggaccaaatcccgcccgggaagggaagggtcgcgaccggaccctggagacccacggctgcctggcgatctgagcccaccccggcgctgccgtcccgcccccacttccgatcggtcgaaggtcacgtgccctgaccccgccccgcagacgcgactcctccagctgcgagcgtcccggctttcccttccgccggaagtagggcgactttccttttccggctacgggtccccaagcggagcgggaggccggaccggggagccgagcggcggcgtcggcggcgtcggcggcggcggcgacggcggcgggggcggtaatggcggagctggtgcaggggcagagcgctcctgtggggatgaaggccgagggcttcgtggatgccctgcaccgggtccggcaggtacgggcgcagccggctggcaggagcacgagatcccgaggcggggcctggcgggcggggaagaggggttcgggcctggggggcgggaggcagcctgaaccgacgtctcagccgggccgggccgttccgtggagttcctacagccgggaggagccggggggataaggcgccactgcgaggcccaggcccggcctgtcgggcgggtctcccaggtgcctgaagtcgctgggaaagggtttgcttagagcgtctggccccatcgtgccccagcggccagcctggacccacagtgtagctagcgcggggttctgaacctcgcgaggggaggggtccgggaagcccacggggaggatctgggtgtagacataaagcagctgtctgacgcccagtagcttgttaaaacttggggaacatcgtctttagactttctgttgagtagaaggaactcgagggcatcttatatgtgagggtgctctttggagaggtgagagagggaggtgttacatgtgtgggggtggtccccaagatgtagaaatttctcatggcaagcttgcctctactggggagaatgatatggcctcattccgacattgaaactttactgtctgacaatgtcgtgcatttaatcaaagttaaattaactgggttttagaaggctccaggcttccccagagagtgaatatgggacctgccaaaaatacttactggcttctggcatggtacttagaacagaacgtgttcttcatttgtatctaaaacttacttacaagtcagccctaacacttcagcttcctcggttaagtgtcttatgtcctcctctcttcttatgtaattgtaagcgcactgatactttaaaagttgggctataactaattactgcttgattcctaacagaaagccacaggagtcattgtattagaagaaggtcttcactcgggcgcttgaagatatggtctttacatctctttccagtattccaggggagggaaccctacctgtttccctgataactgacttttcatgttatatattgatgctcctatagacattatattggatcccagaactttccaaacctgtggttccacctaaaattttatctgatgaattgttactttactgcctagctgccaaccagtacagtagtgagtatccatcttacttagacttcagatccacccatggctgtaatggatgaacatgccacccagctccccttccaccactctgcttgctggcgtgttacagtgctctcctctacagtacagggtcctgaaccttgtttctcactggctactaatatgtaatggctttcgctctgtgctgatgtgtgacagtcaccttgttggccttctatgtccgggaagaattatagtcactgccctaaagggctcagatcctcagtttgcagaaggcctgtagttgaacataaagtgaattttgaaccattgagaagacattccgcttctcttgagccagtggttgaactcatattcttggacaacctgctccagagggagaccctctggtaaatgctgacctaatgtggattgttgaagcagtggtgtttactactagcagtgaaaacttcattggaattgttctcagctctgaaatgcaccattgactggagcagtaataagcccaatggagacagggctgtaagtgtgttccttctgaatgttaacagctggaggtccatactatctccaaggatttgatggcctttaaaaactaaagaaaaaccaggttggtgggtaattttaggtttattgtatatagatttgcattgggcaagaacggaatgttagaaatctgtaatactgtatgctgatggtaaacttactgtaaggatctcatttgggtatctggaaggtgatagttctgtttctttgttatatacacagcatgttacagagatgtgatttttctccccattaaacagaactaaaagacagtatatttatttaaacgcaaagctttttccccttttatgtctcctcataaactccagagacagtctggaaggccctcttaaatttgtcaaagagcagtaaagtgtctcacgctcagtttttctagcagatcgtaatactctcagttgaccctgctgggatttgaacctgcagtttctattaagtttggtgtgtgaagtccaacaccttatcaactaggctttccctctgacatcttgaagcctccgtgtatatcctttggactctgcagcaaagtgcatcagttgttagtttactctgagcatggtattcttagattgaaaagaagtctctgaagatgtcaaataaaatgtaaacattttctccagcagtgtgaagtctagtgagttaatgtttggcacaagcaggtaatttacatccattctatagggtagtagaaatgtgatctgggcaagtcacagtggctcatgcttgtaatctcagcactttgggaggctgaggtaggaggatggcttgagctcaggggtttgataccagcctgggcaacatagcgagaccttgtctctactaaaaattaaaaaaattagctggatgtggtggcccacccctgcagtctcagctgtttgggaggctgaagcaagaggctagcttgagcatggagatcaaggctgcagtgagctgtgattgctccgctgcattccagcctgagtgacagagtgagacactgtctcaaaaaaaaaaaaagaaaaagaaaaagaaagaaatgtgatctcattcagttccatggatgaagatctaaaaactgctggatattaaaaaacatctgtctacttttcccaagtcattggctggttagcagaagtagtgtttcttcaactagttcagataagacaaaatcctgagtagttcatcctgttccacagccgtcctctgcacttctatactgactgtctgcctaggttacaaggggacctctggatgagtagatccaagtctggtttatgttgttccattctcctaaaaatatttttaaatgttcctagaaggtctaccattgataacttagtagcacctgtcatcacccgtgagcaatcccttgttaggagagtgtgatgccacagtgcattataggttgacagcagccttccacaagctggaccagctagctgtctgccagtcgtcgcctaaatagaaattgttctccgagaaactactaatactttttaggactttaaaaagcattagatctgttttgatctagatagacccactcaatgcctctggattgtataactacagcatataatgttgatacagaatgcagtctaaatggtgcttcatagagttcgttcggcatcacggtagcactacacttaaatgagtgtgaccaagccattgtagaatcagtagaaagtaaccttttgacagatttttaggcccgaacctcttcttcactggcacctattttggggaaatgttgattggtgtggggcctcagaagttccacagtcctcctgaaaatctctcccagtgctgctgtttcacagtttaagcctgagcagtaggtaatttgggatgtgtgttgtataccctgggctgatttagaactttaatgctttaagattctgacttcttagaacaagcactaggtttccttttaagagaacactgtacatctaccattaaaagaaaaagcctccattcattggccagtgggttcgccctgcgaggctcatttaacacatggttttgactcccggctcagtcaagtgtgctgaacactcaagagatctaagtggtactccactgagactgtcttgtacatgtccagtgattgaatagctcaagtcatcatttcacaagggactaactcctgcctgtacactcattttagctttcataaacacttgaaggaaactagtgtctgcaggaaatccacgggctgctcctgtagctttacattgttgggacccagtagagtacctggcggagtgagtcttccttaaagggttttggtgatgtcactgagtgtgtgtgcgccaccacatgttaatggaagtgctgaacttcatactgggtattggaaagtagatagtaaataaactatatattccactgtatgtctctaaggcttttctcatttgcagatgagaacatttataatgtgataatttatcatataatataattattttggggtagagacagggtctcactatgttgcccaggctggtctcgaactcctggcctcaagcaatcctcccacctcagtctttcaaagtgctgggatgggtgtgaggcaccgtgcccccatgcctggctgtctttattttaaaatctgatagcccatgtgtattaccaaactttggtttcttctgaagtaccagttatttcataaatagaaatttacttagaccacagttctcaaacttgtggcctgtgagctatagaagacttactatgggcctgcaggcatgctttgtttgacccacccagcaccaacacttaaaaactagagtgatttttggctgggcacggtggcttacacccgtaatcccagcactttgggaggccgaggtgggcggatcacttgaactcaggagttcgagaccagcctggtcaacgtggcaaaaccccatctctgctaaaaatacaaaaattagctgggtgtggtggcaggtgcctgtaatcccagctactcaggaagctgaggtgggagaatagcttgaacctgggaggcagaggttgcagtgagccgagatcgtgccattgcattcaagcctgagtgaaaagagcaaaactttgtctcaaaaaacaaaagaaactagagtgattttgcattaaaaaaaagagagagcaagatttcgggctgggcatggtggctaatgcctgtaatcccagcactttgggaggctgaggcaggtggatcacttgaggtcaggagtttgagaccagcctggccaacatggcaaaaccccgtctctactaaaaatacaaaaattagctgggcgtggtggcacatgtctgtaatcccagctactctggaggctgaggcaggagaattgcttaaacccaggaggtggaggttgcagtgagccgggatggtgccactgcactccagcctgggcaacagagcaagcctccatcccaaaaaaagtttcggtcaggcactgtggctcatgcctgtaatcccagcactttgggaggccgaggcagggagatcacttgaggtcaggatgagaccaacctggccaacatggtgaaaccctgcctccacttaaaatacaaaaatgagtcaggtgtggtggcacgcacctgtaatcccagctactcgagaggctgaaccacgataattgcttgaacctgggagacagaggttgcagtgagtggagattgcatcattgcactccagcctgggcgacaaagtgagactctgtctcaaaagaaaaaaaaagatttctggtttccctagaaaagatctggccacactgctcccacagcctgcacagcgataatcagcaggagctgagtagctgctgcgtttttgacatgaggcattcacactctccgggttgtcttcattcccgccatcttgctattgttttatactgttctttgggatgcctaattgacagttttttacttatctttttgtaaattgtgagtcagtcgcctctggtttttatttgaaatttctaatggaaagctctggattgagagttaggaggtctgagttgcctgtaagccgatgcatgaccttgggctgggttgggctttcctagcatttgatctataggctgtttaaagatcttccgtggaaaagagatcatgggcagttaagtttggggaatgcaggattaaataaaggtgaattggcttctttactgtaggacttctcagaacctttaacatgcttatgtgcattaactcctacagggtttagggtgtgtttcgtaaatgtcctgaagttagatcacttcgtgccctctttccatggaaccaaatcacattctgtgcatcaaacgtcaggaaatgtggagctagataatttcagcagtcccttcaaacccttagacattcagagcatccatctaactggatctggaaaaagctcaccatgttattttggttcttgtgctttcttatgttatgtctgctgtctattcatactcccttctctctccttttctgtgtagtctttattctgataactttatcttagaatcatcccaattgaaaatgttctgcatttggagttttattataaagattttgtttgttggttttgggttttcttgagacaaggtcttgttacgttgtccaggctggaatgcagtggcacgatcacagctcagtgcagcctggatctcctgggctcaagggatccttgcacctcagcctcccaagtagctggcatgcaccgccactcccagcctacatttttattctaataccagatggttacaaatcacttgcaagactgagtagtgtgattggaagtagtgatttgatttagattacttaccattaattgaagatctgctgagtccaaggccccttgctggatgctgggccagtgcaaagataagtaagacaagtttgtaagtggttttatcttattgcggaattcagtctttacaaccatcaggtaagataggaccagggctattaattctctctctctcttttttttgtaaattgagacaggatctctctgtgtcacccaggctggagcgcagtggcgcagtctcagctcactgcaacctctgcttctcgggctcaagcaatcctccttcctcagcctccccagtagctgccaccacacccagctaataagggctattaattctcattttatatttgaaaataatgagccagagggagataaagcagttttctcagaggtgcacatgggtaatatatgcagcagttcttggacccatgccctctgcattttaggaaggacttggttccttagcagaggtggttgggtggtttttcatctcaatgaggtggctgaagcagcaatctttttttttttttttttttcagacggagtctcgctctgtcacccaggctggagtgcagtgatgtgatctcagctcactgcaagctcagcctcccaggttcacaccattctcctgctcagcctcctgagtagctgggactacaggtgcctgccaccacacctggctgattttttgtatttttagtgaagacggggtttcaccgtgctagccagaatggtctcaaactcctgaccttgtgatccacctgcctcggcctcccaaagtgctaggattacaggcgtgagccactgcacccggcgttttttgttttttttttttgtttgtttgtttttttgagatggagtctcactctgtcaccaggctggaaggcagtggcatgatctcggctcactgcaacctccgcctcctgagttcaagtgattctcctgcctcagcctcccaagtagctgggactgcaggcgtgcaccatcacgcctagctaatttttgtattttctgtagagatgcggtttcaccatgttggccatgatggtctcaatctcctgacctcatgattcacctgccttggcctcccaaagtgctgggattacaggtgtgagccacccagcccagcctgtcagtctttaaacagatcactggaggattgttggtggaattcgatggaatggaaggggaaagccaatgggagtgtcacatttagggcctttggtgggagtgacccacctggaacagtatttcagcatagagcctcacctgatcatcttagcattctgcctacaagtgggcctctccatacccactttaaatgtagcaggtgtttaatgagcaccttctctgtgccaagcattttgctatgcattaggaaagttctttaactttttcagaacgtggacctttttgagactcttgaaactttgaaccactccctagaaatatttaaatagtttgggatgtaattttgggaagtcatgaattctctaaaactaaaccctggggctcctaattaaggactctttgtcttaagggtaccaagatgatggagacagatccagtcctcagctctcatagtggggagacagtgtaaccaacataacatactcggtgagagtatgctatttagatgtagtttgtaaggtgatctgctaacacaaatgtggcagtatttaattctgcctaagcataggagagatgaggttgtcaggaaaacctcccaagaagagctgcatcttattcaattgtcatagaattctttatttcaattattgcaagtaagcagggcaggatcagccggggccccatctctgatgacaacaatagttctcattcatcgagcccatgttgtgctgggtgccaggcaaggattcttatatatgttctttcatttgatggtcacaaaactcccggggagtggcattgtgatgtgattattaagagacaaacttgagcttcagacagtatgagttcaagttctggttctgccacttaactagtttggctttggacaagttatttaacttctttcagtcttagttttctcatctgtaatacagaaatagttgatgatagtaataattttaaaaacaatattgttagaaattaggaggttaccctggttggtggggtgggtagtgactgaagggggcatgaggcagacttctggggtcctggtgatgtttcttgatctaggtgctagttacataggtattttagtgtccgaaagttcagtgagctataaacttatgatccatgtatttttctgtgtcattgttctgcaataagaggttaaaatagcaagcatttctggttccttactgtgcacccggcattgtttctagtgctttacatttgttatcttgttatccctgtggatacaattccaggcaaactggttccaagtcccacggtaaggagaatagtagctactttagaaggtcactgtgacaattaaatgagggcactgtcaggcacttagtaggcagtatgtttgatgcactgtcttctttgtaacattaggtagtgggatgcaggactgggacctgcccctgcggcccatgactccaaacctgtcttaggaacttgttctttgccacagggctacttccctggctgcatactgtttcctcccactgtggggagtagagtcttgcagtccaacctacctttctcccaggcaggacctctctgggtggctgtgccgcgcaggctctggggaagcaagttgggtcccacaccctcgatgctggtgtgagccttcacctctgcttgctgtatccatgccaatcaacaggatccctgttgagtagcagggacacatatgtggatggcattcaggtggctttgcctgtttctaattggtatagagttctagtaagtatgaagttgtggggctatgtgcaactttttatttggatttataaggtgacctactttggttatgaaacttgtcagagaattttagtcttgaaaatgtgtactgggaataattaattgtcatgttttctaactttagtgatttgtgtaccacctttatgattttttccgtatcattgaaccttcaatacattatttaatattcttaaatttacattatttatttatttatttatttattttgagatggagtctcgctcttgtccccaggctggagtgcaatggctcgatctcggctcattgcaagctccacctcctgggttcaagcaattcttctgcctcagcctcctgagtagctgggattattggcatgcaccactatgcccagctaatttttgtatttttagtagagacggggtttcaccatgttggccaggctggtcttgaactcctgagctcaagtgatccaccagccttggcctcccaaagtgctgggattacaggcatgaacccctgcacccagccagatttattttaaatatgtatgtatgtgtgtgtatatatatatatatatatatatatatatatttttttttttttttttttttttaagagacagggtcttgtacctgcacaggctatggtgtggtggcttaaccatagctcactgtaactttgaactcctgggctcaagggatcctcctgcctcagcctcccaagaagctaaggctacaggctcacgccaccacactcagctaggtttttttgtttttgtttttgtagagataaagcctcactatgttgcccaggctgatgtcaaactttgggctcaaacgatcctcctaccccagccttccaagtgctgggattacagatatgagccaccacacccggcctatttaattttttttttttttttttttttttttttttgcctgtgacatacccccaaggagatcctgagaacacatgcccctaaaatgttttttaaaagggaactaagtcagtatcataagtggaaaactttgtcatgcatagaaggtaattgtgagaacaatggaactttaaaaacattcatccgtgtatctcccaagatcaccttgtgcatttttcttgggaaaacactggtttagtttgcctctgcattttacaggtgaagacaccaaggagcaaggctcttaaaggtcttgcccaaggtcacatgcgggaagaactggctggaaaatcaggactgttgactgattcctggtccagtgctctccttctctgagtttccactaactactggtagttaagtgtctgtgacgttgatttgtttttcatttatcactgtgcttaaaatagcatgggtagtgagataacccatttgcctccccctgaaaagggggaaaataacttgtgtggtagaaaattggtagcagagtcctctcagggtcacgcttgcagataaggaggagagtggccttggttttgtggaccatcctggcttttatctcctggcctacagcattatgaactgaggactgtacctcacttcccttaagtaactactgtttaaaatgatcaattatgtgaagaattgcttgggctctgtgcactggaagtcaggctttatttaagtccttgggaactgagatatgtttaagaaaatattaagtggagggaagggagcagccaagtggtcagagaattttagtcttgaaaatgtgcactgagaataattaattgaaaataggaaattaatgttttctaactttaatgatttgtgtacctcctttatggtttttgccatatcattgaatcttcgacataccatttacttggactccagagtcaggcagacctgggtttgaatactgtttctgccactttttatttttgtttttgtttgtttttgttttttttttggtaaactgaaagcaagtttattaagaaaggaataaaatagagcaggctgtttctgccgcttataagatgggtgactttgggcaggtcactccatgtctgagccccagtttttattgtcttaaaatggaaataataaggccgggcacggtggctcacgcctgtaatcccagcattttgggaggctgaggtgggcggatcacgagggcaggagtttgagaccagcctggccaacatggtgaaaccccatttctactaaaaatacaaaaattatccaggcatggtggcgcatgcctgtaaccccagctactcgggaggctgaggcaggagaatctcttgaatccaggaggcagaggttgcagtgagccaagaacctcctagagaatcatggtgaggaataaatgagatagcatatttaaagtggttttagcagagtagcacgcattacagtttaattctattaggcatttaaaatcattttttggaacaaggtagtatgtggaagaatgaaggagtatattgcttctttacagaataatgtaacatagcctacaccgtagtataaatgtaatttatacattgtaatgttgaactcatacccagcatttgtttaaccagggttcaaatgcagtttcctcacttcagagctgtatcccagctgttattctgtactactactctcatagtggaaatttcccaaattgtaggtaatgaagtgagcatgaattaagaagaaacctgaaaggctcagtcacattttggaagaacacttgttgatttaatctaaattaggaataggaagctgtcgaaacaacttttatcatggcggctttggaggaaaaaatgacatgaaactactacatacgttagaaggctggccaaggactcaggaatacagtttagctactttagaaggaagagaaaagggccaggcgcagtggcttacgcctgtaatctcagcactttgggaggccgaagcaggtggatcacctgaggtcaggagttcgagaccagcctgcccaacatggtgaaactccgtctctgctaaaaatataaaaatgagctaggcatggtggcacatacctggaatcccagctactcaagaggctgaggcaggagaattgcttgaacccaggagacggaggttgcagtgagccaagattgcgccaccgcactccagcctgggcaacagagcaagactccatctcaaaaataaaatgaggaaggtaaaagatctggaagcccagaggcatcatttaaagggaaccgggataatttcatatagagcttgtctttttgttttgttttgtttttgagtcaagagtctcactctgagatgagtgtggctgtgttctaacaaaactctaattacaaaggcaagtggttcaccagtggtagattgccaagccctggcctaggctacagtaatatctcctaaggctgagtctggcttagactatcttttccttccttccttcttcctatcttgtctcctagcagtcaaggggatcttgtttgttgttttctgttgttgttttaaagagatggggtctcgctccatcttccagctggagttcagtggctcgatcgtagctcactgtaacctcaaaccccggctcaagcagtcctcctgcctcagcctcctgagtagccgggactacaggaatgcaccaccacgcacagctacttttttattttttgtagagatgggggtcttgctgtgttgcccaggctggtctagaactcctggcctcaagcagtcatcccgctttgacctcccaaagtgctggagttacctttgctagccaccatgcttttggctggggtgttttagaagcagaaatcagcatgttactctcctgcttaagacttgcagtagctgcccatcagccttcctataaagtccaagctcctcaccatgacctgaaagggtccagtgtgaactacccacctttggaacatatctagttccttccatgctggcaagattgacttcttttccaggctcatacctaccaagcttgctcctgcctcagggtctttgtacaagttcctctgcctagaacatgctttctcaatttttatgtagccagctcctcatcatcacgtaggactcagatgtcactcctcacaatggcctgcccattcaccccatttaaagcagcttcctaagcacgctctgtgtgacattatcttctcttactgtggtaatgcttatcacctgctgaaatgatcagtttattgattacctggtttacctttaacttcccccagctgctgactcttaagtgccaggcctggtagttctccttcaccacaaaagctccagtgcctcaaaaagcccatcacacagtaggtacttaacatttgttgggtgaattgccttgttttacaaccctagtatttgtggtgtgttcaagtattcctccgccttcaggaatcttattatcttttcaaaaactatgaaatatatggtattaccctggggcatcatgcagagaggagggaggcttgcctcaacatcacagaactcgtaaatgtaagggatgatgtctgctgtttaaatcctgtatttggttttcagtatcatgattgtctttggttgtttatttgtttcaggtaatttctgttggtcccaataggtgtgagacttctgggaacatttggactagctcagaactaccactgaagactttgctctggggcacagctgtgctagctgcccccaatagacccctgtttattaactttaactgagggactaacatcaagagcagttgctgtaaatattcctttggttaaatgaaagagttgctttattatgaagatcacatataatttcctgctgagaacaaagtagataagtaagaagttctgcataccatttgtttctggggggaaatttttaacagctatgttctgtcctttcactgataataaatattaaaagttgaaatagctcttagaggtcatctccctttctctgctgcaggaatccttctgagattgtctggacacttccagtaaagacaagcttatgttacatctctttagatcacacatcagtttatagacattaaagtttataggatgggtgtattcctaaagaattgtcaggctgggtaccatgactcacacctttgagccatgggattagccaaagtgctaattccagcactttgcgagactgaggcaggaggattgcttgagctcaggagttcgagaccagcctgggcaacatattgagtcctcatctctattaaaaattaaaaaaataggccaggcgctgtggctcatgcttgtaatcccagcactttgggaggccgaggcaggcagatcacctgaggtcaggagttcgagaccagcctggccaacgtggtgaaatcctgtctctactaaaaatacaaaaattagccgggcgtggtggtgcatgcctgtaatcccagctactcaggaggctgaggcaggagaatcgcttgaacccaggaggcagaggttacagtgagctgagatcgtgccattgcactccagcctgggcaacaagagcaaaactccatatcaaaaaaaataataaattttaaaaaatttagctggacgtggtggtgcgtacttgtagtctcagctgcttgggaggctgaggcgggaggatgacttgagcttggaaaattgagggtacagtgaacaatgatcacatcactgcactccagcctggatgacagagtgagacccgtttgtcacatttgagcacatgaggcctttcaaatattcttggggaatttgttgcataagcgaaccctgtgagaaaagttaaactttttgaagaaagttcttcaattgttggcttgcttttttttttttttttttcttcttaagatgggatgtgcctatatattaagtggtgacttaaaaatactaatttgcggccgggcgcagtggctcacgcctataatcccagcactttgagaggccaaggggggcagatcacccgaggttgggcgttcgaggccagcctgaccaacatggagaaaccctgtctctactgaaaatacaaaattagctgggcgtggtggcgcatgcctgtaatcccagctacttgggaagtcgagacaggagaatcgcttgaacccgggaggcaaaggttgcggtgagccaagatcatgccattgcactccagcctgggcaacaagagcgaaactccgtctcaaaaaaaaaaaaaaaaaaaggatactaattttctggtagagacacatttttgaaagtactaaagacaagttattattaagaccaaaagaaaactcacttaacagtgaaaagtatttgtgctcttgcggtgctgccttccattaatcaaggtcaggggagaaatgggataatagccctttaaagaggacacttgtctttctccctcagatagagccatggtttgttactgagtgtttaaatctgattctctctgtagattgctgctaaaattgattcaattcctcacttgaataattccacacctctagtggacccctcagtatatggatacggagtacaaaaacggcccttggatgatggaggtaagttgccagaaatatctttgcctttcaggtggtagtgaacctgccagttaagtttgaatttgtcagccattaccttaacgactctctgaagtgtcactctgttgagaagaaaggttgaagggaagtatttaggatgatttttctcagcagttcttcagcatttgagttcctatttgccttgataatacagaaatcttttcgctgggctctgagataaagacttggcccctgagcatcagcttggaagtaatttgacctatttgagaattttgtttgatttagcctaactcccttcttcagtgcgcatgggaattgaagttcccactttctccacagaaaagctacgatttggtgcatggctctagggaagctgtggctacatcttgaccttaaagaaagagaagaatggtgacctttctgcagtctagctgccagctttttcaccattcccatttatgtcaggctttttctagaagcatcccttttctttaattcgtttatttgttgttttgttggctggtttatataccctactccatcccaaaaagaatttgagaacacttagaagtgccaatccccagcactctggcagagtatctatcagatgtgtttctgtagagagcttggacatctttatcatattttgtctcctgttactatagaagagatagtgaagtacactagattgacatgaatttgcatgtagtcgagtgagtcggtgtcttctctgtgttctttttctgtcgctatgtacccaatcatttatgtttgtacatatttctgtgatgtattattatgtgaaaaatgaagatgtagaacagtatgtattatataatcttttctcccaaaagtgcatatttttatatacatagaaaaatataatttgccatgactcatttctctggtctctaggaattcttgtttttttttttaatccctccttagcgatgggatcacactctgctcaggctagagtgcagtggcgccgttgaactcctgggctcgagtgatcctcccacctcggcttcccaagtagctgggactacaggcatgagccaccatgcctcctagtacgtttttaaatcctccagttcatagacttgtttgcaaatctcaatgtcctgaataaaccctatgttaaggttctttttagttaacttaagagttgaagtattttattttatttgtaatttttgtgagtgcataggtgtatatatttatggggtacatgagatgttttgatgcaggcctgcaatgtgaaataagcacctcgtggaaaacgggggtatccatcccctcaagcatttatcttttgagttacaaacaatccagttactctctttattttaaaatgtacaattaagttattgttggctatagtcaccctgttgtgctatcaaatagtaggtcttattcgtacccattaacccccctcccccctgagtccccttagccccctactacccttcccagcctctggtaaccatccttctactctctatgtccatgagttcaactgttttgatttttatattgcataaataagtgagaacatgtaatttttgtctttctccgcctggcttatttcacttaacataatgatctccagctccatccatgttgttgcaaatgactggatctcattcttttttatggctgagttgaagtgtttttaaatagacccaaataacacctccaaaaagttctagaggactgaactttaacctcgtaaaggttaaccctgcttcaagggaaagttagaaagttcatgttgctaaagaagtgatctggtagcctctgtcaaagaaaacccaagccaaaccaaacaaacagctacacagcctttggaaatctttattgctaagaaaaatgtgccagaattccggccgcttggtctgcctctgcttttctaaacttttcatcacgccatcagcaagactgtgagcctagaaggtggccaggtaaacatgaacatcacttcccttcacaggatctgcttattcacattctttgtctcttaagagagtggcccagtgaccttacccctaccagaagacaactgacaaaaaggggctgtggcagtccccagacgctgagatcaacacagaactcaaattctacacgtggagaacagcttggagaaaaaaacaatatgtgtaatcctgttatttaaacagtgctcaacagaagacacgattaattttatcgagctgtaatacagaatgtaagaagcctgagggaaattccttgttcttcaaatacagcctgttgttacctaagaccgggtgttcagggaggatgagagattcagcacgacacagaaactttccttcttgctataggagggcttcatatttagagggaagaaaaagataaaccatggtcattttctgtttgtgaagacttattccccaaaaggtagacatggaaaaaaatatggttatcaaaacaagtaagtgaaaatacgcaatataaatgaacccgaggttttaagtgagattctggacctactgggtgatctttggccaagtcagctaacatctgcctgtgacccagttctctttatcaatactgataatctctttattagtgctaatttctttcaaatgtatgtgcaatggactaatgggagaaaaatgtctgcaaaatgctagagggtttcatttgcaaatatttaggtattccttatgcagaggacgcagcagatacctgctcactgcaagcacaagttttaacccttcagcgccaggcagtgggtgaaaaaaacaaggctgaattgtgaaattgttgtgaaaggctgaatgagttgtgaaatatattgatctcaatttctggaaacactgggccaaagagacactgtccgttagtgaggtgtgtgcacagaggcagacaacttagttttgtttttacgttgctgtctcaagaggaaccaaagtatgattgcctcgaaaaggtaaagaggttactttgcattacagctttctgctaaggcaaaaatgcagttaatgcaatcatccctatttggcctagggaatcactaacaccagtcaaatataaaaagatcacagcgtactattttggataagtagtttaaatggttatcttagttccagtggccctggggtggattttctgttttgtggtcataaacactttgtaaatacacacgaatttttacaatcaagtgagtgccatccccttaaaatcttcagtgtgagtctaaagaattttcccccaaaggctcccacatctaaaaacagtggccatctcctcttagaattcctagagatgcccagcatggtggctcacacctgtaatcccagctacccaggaggctgaggtggtgggaaagcttgagcccagacattcgaggccagcctgggcaacatagcaaaaccgtatttccgaaaaataaataaggccgggcactgtggctcacgcctgtaatcccagcactttgggaggccaaggcaggcaaatcacgaggtcaggagattgagaccatcctggctgacacggtgaaaccccgtctctactaaaaatacaaaaaattagctggatgtcatggcacgcgcctgtagtcccagctgcttgggaggctgaggcaggagaatcacttgaacctgggagacggaggttgcagtgagccaagatcgcaccactgcactccagcctgggcaacagagtgagactccatctcaaaaaatacatatatacatatatagatacacatatatacacacatatatacacatatatataagtatatgtgtgtgtgtgtgtgtgtgtgtgtatatatatatatatgtaaagttttttttaatatgctaggcagtggaacaagggaaaggatttgttcctgatatagaaagggatttgggttagttgtgtttcagagagtggcagttttgagccacttgtcagaacgctgttcatgagtctgcttagaacccagagcagaatttagagctcagtttgaaagcttgcctgaatgcctgtccgtgggaagagcagtcaccagtcactccaccgccctccagctttggatcaggccattttaaccttcactgtcttcaatcttgatacccacatgttccagcagtctttgatatgcatccttggcaccccaccagttcaggaatctgccttctggtctcagttgtggcacctttttcatccagtacttctctcatgtttcaactggagcctctccctgcagtcagtccaaccagtttcattcctccagtaaccagggaggtgcagatcttgcaacctggccattgcctgccctcccgcttggctcctcccgtgcacctcctgtgctcctcctgtgtagcagcctggctgcctgtctcctctctcccctcacccagctcttaacctgcccaactcctgctcagccaacttcttcctagaaacctgtcctcttccttatcttttgactttcttcggggctcagcccacatgccacctagcctcttggtcttctctctaccttttccttccttcctccctccctccctccctccctccctctttccccctcttttccctttttcacacacccacctgaccagtgaatattaagtcatatccttctctgaatttctaaagcagtgtatttgccctctgctcagggcagaccttccttccgcggttactgggtcccgctgtgcacctctcctagcagagcctacgtgatgtggccataaagactggcttcatttcccatggactcttcatgctcaagttctcccatgtttttcatgctcaagttctcccgtgtttcctacgatttgcatttttaaattttgggaaaagtaagttccaaatttaagacaatagtattagctaagtgatttagaagtgcgaatttaaatgtaatctaaattagaggttggcaagcttttctttcttttttttaaagacagggtctcactcttgctgaggctggagtgcagtggggcagtcatggttcactgcagcctctatcccccaggctcaggtgatcctcccacctcagcctcctgggtagctgggactgcactgcacctggcaacaagcttttttataaaggacctgatagtaagcattttaggggccaggcatggtggcttatgcctataatcccagcactttgggaggccgaggtgggaggattgcttgcgtccaggagtttgagaccagcctgggcaatatagcaagaccccatctctacaaaaaaatgaaagaagattagctgggtgtggtggtgcatgcctgcagccccagctactcaggaggctgaggtgggaggattgcctgagcctgggaggtcaagaccacagtaagcagtgatcgcaccactgcactccgcttgggtgacatagtgatctcagaacaaacaaaaataaatttaagcttgcaggctatgtatcccacctactaagctacgctattggagttcaaaaacagctgtagcatctacataaacaaagagcatggctgtgagccaataagatatttcaccgaaacaggcagctggccctcaagcttaatttgccagccctcaactaaaatcagcctcatcagttgatgaaaacattttcttcatctttagttagggaagtatatagagagtacccctcccccagtttctttaaacaagtctcccgtctcatggttcactgtccaactgccctaaccacctgaaacaagtgctttctcatgtttgcccagagctgatggacagacagagaagtcacttcccatttgtccctctgtatctctcctgatcaaagatcaaagcctttccagttttcttcctcaggagcatttttaggagcttttttagttgaactaagcaggcctcatactccccctgcattctgtgtagtgggtggcaccaaaaccaggacttcaggagagtacagcactgtcctcaccactggggtggcgggggtaaggccatgcaaggggctttgaaactatgcctgcctcttcactcaaagactcgtctttgctatttatgtagcacctttttttttgtcctttttattctttttacttcatgacctgctgaagaacagcaccttttatagtaccacactttctacttttgataatacagttgttccccatttattcatgacttcgttttccacggtttcagttacccacggtcaaccactgccgaaattattaaatggaaattttagaaataattcctaattttttttttttttttttgagatggagtcttgctctgtcacccaggctggagtgtagtggtgcgatcttggctcactgcaacctctgcctcccaggttcaagtgattctcctgcctcagcctcccaattagctgggattacaggcgtgcgccaccacaactagctaatttttgtatttttagtagagatggggtttcaccatgttggccaggctggtcttgaactcctgacctcgtgatccacctgcctcggcctcccagagggctgggattacaggcgtgagccaccgcacccagccaattcctaatttttaaattgtacaccattctgagtagcatgtgtatccacactgtatacactacccactcaccaatgtataggaaaaaatgtagcgtatacagggttcggtactctccatggcttcagccacctaccaggggtcttggaacatatccctcatggatgagggggaactgctgtattcttacggggtaaaggacgaattcttgggcgttctgtcaaatgaattatttgcaggaagagtgaaatagactatttctgtgatcctttccaagctttgtttcagtacttgtggcatagggcaaggacagaaaaggaagacaggagggaggaaaagacgtttgaaaatcccagacctcaaggagagacaggagataggaggtacaagtgctagcggtggtgagagccatgatgcccggacccctgcctgtgacctgcaccccaggcaggtgctgaggccaccagtctccactctggaaagagggaagtgaatctcagaagtgttgatactttccctgaatgggggatgatgacagatattggagggatgaaaagccaagaccaaaacctagttcctgagagtaggaggggttaggaggaaggtttgccttttgtgaagagggaagaggtaaagtgaggctgggatgtggttgggcagtcatcatcaagggcagatgaaggctttccaggggcggtggacatgggcaggcttcccaggttcctttttcagctccttacctcctgtctgccctcttccctaaaatgggcctttctgagagtcacgtctgcccctgaaggttatgcccttcctgccacgccccttctcccgttccccacttttggtgtacagtgggcggtcacctggggtggaaaaatccccaagcagtggggccaggcaagaattctgaatggagaatcccaaggtaacaaagggtagagccttggtaagaaacagtgaagggaggctgggcatggtagctcacgcctgtaatcccagcactttgggaggctgaagcgggaggatcacctgaggtcaagagttcaagaccagcctggccaacatggtaaaacccagtctctactaaaaatacaaaaattagctggatgtggtggcgtgcacctgtagtcccagctcttcgggaggctgaggtgggagaatggcctgaacccgggaggcagaggttgcagtgagctgaaaccgtgtcactgcactccagcctgggcgacagagcaagactctgtctccaaaaaaaaaaaaaaaaaaaaacaaatagtgaaggggacagggtctgattttatccagttgacaactcctggcacaggctctgtgccctacccccctacctcagccacctgcatttgtttcttcctccctcccttcacccatctatgcattttaggattataattcagaagtgagatgatactcacatgggtacatacatatgtgtaagttggaaaaaggcagtgagatttttccccttggcaaagcatcatgtgactggttggtggacagttggcttagccagctaggtaaaatagtattcattttccacaaaaatgaatgagctaaacctgcagcatcaatgttgtgacaaaaatataactcgagctcatgtacaatgcctgttacattcttcgcagctgttaatagggaagaaaagtagttgccaaattaaaagaggattcataggtttccagagttcaacttgatggtagaacctctctcgaatacagtttgggagtgtcacaaaactaaacatgcacttacgcacagtccacaactgcactgttgggcatttatccccaagaaaggaaaatgttcacacaagagcctgttcacatagcagctttattcataatagtcccaaactgaaaacagcccacgtgtccttcaactgatgaatggttctgcttgcgatacagccataccgtggaatatcactcagcggtaaaacggaacaaatgctgagtacatccagcaacttggatcaatctccagggaattatgccgagtgccagaaaccaatcccaaaaaactacatactgcatgatcccctttatgtaaccttttgggaacggagaacagattagtggttgccagtggttagggattgagtcggaggagagggggtcacctaagatcacagctagaagggaacctgaagcttaaactccttattgttgtagataaggaaaccagtgtctctgaagaagtaagtggtttgaccaaggccagatagatacatgataagtgacagaagggaggttgaacctgggtctctgtctcatgtgccataatagtatagtacttaaacatgtggacttcagagtctgacagatcaaggtttgaatcccagctttgctagtcattagctgtttgaccttgggcaagttccttaacgtctctgagcctgtgtttcctcatctgtacaatggacctgatgatacctgcctcatcagattatcatgagggttatatcatgttattttcaagctttaagaaatactactcccgggcctggcatggttgctcatgcttgtaatcccctttgggaggccaaggcagacagatcaacgaggtcaggagattgaaaccatcctggccaacaaggtgaaaccccgcctctattaaaatacaaaaaaattagctgggcatggtggtgcgcgcctttagtcccagctactcgggaggctgaggcaggggaatcacttgaacccaggaggtggagattgcagtgagccgagatcgtgccactgcactccagcctggcgacagagcaagactctgtctcaaacaaaaaaaaaaaaaaagaaagaaataccactcccaatgtgagaaaaactgtttccatcagaactagttagtacagacatattaaaacacatatgtgactgaaatgaaagttttatgaaatacattacccttattatatatggtacattctgttttctatttcatttttattaataaagctggttgtgaccccctatattgatttcatgacactggcgtaaatgaaagtaaagcttagggctatgaatatactatcatagaattctttttcctcttaggctcttgaggagaaggtgcagggcccaacacgtccctggaggctagggtaggccccctcatctgttgccttctgccttccc

SEQ ID NO: 1409 - DNA, 862 bp, Homo sapiens
tttttctgccgtggttcgttcacaaggcgcgactgtaggcagaggctccctgttctgaagctggctgtcagcactcccccaactgccgtctcaagcagagaaagcaagggagggaagcttccaggaccaagccctggtgggcaggtagcagcccacctccagtgagacggagaagttggccggggccagcaatgaaggaccagcctgtctcctccccgagaactgaaaggcaaaaggcacccaaggctgggaagagagcagcagcctcaccaagtaaggaagacaaaatgaagcaatcagtgagggtttcctgggtctacacagggattgaaggagacacttctgggtgatgcgagtgctgcgcagctcagaacccttggaagcatgagaggaggacgagcccggcggcctgccggtgcggtgatggagggctcttcggtagccacactgcgcgcctcccacacacaccttaacagtcttggggccccgggccagcgctgcagcccaaagagaccctgcagccgcattttctcccaggccgtggcaaaccctggcttcgcctcccttcaccatggcttgtgagggcaggaggctcccgggggccgacttccctgacctgaatgagtcaggcacccttctttatttttaagtgggggtgtgacctgaggagataaaggaaggacgacagacctggggagtgggggcctgcaagcctcttgggcccggagcgcactccttctcgctcctccctcaccggcaggatcgggggtcttgaaactggagcggctcaccggcggcggatgagagaataaggagccggggcgccgaaacgctgaccagcagacccggatccggactttcc

SEQ ID NO: 1410 - DNA, 2192 bp, Homo sapiens
gtcctgcaggcggcagccagagctgcgcgccgcggcggcggaagatggctgcggccgaggtggcggacactcagctgatgcttggagtcgggctgatcgaaaaggacacaaatggagaagttctgtgggtgtggtgttatccttccacgacagccacattaaggaacctgctgctgagaaaatgctgccttacagatgaaaacaaacttctccatccctttgtctttggtcagtacagaagaacatggttttatatcacaacaattgaagttccagattcttccattttgaaaaaggtgactcatttttctattgtcctgaccgccaaagattttaacccagagaagtatgctgccttcactaggatattgtgtagaatgtacctgaaacatgggagcccagttaaaatgatggagagttatattgcagttctcacaaaggggatatgccagagtgaagaaaacggctctttccttagtaaggattttgatgcccgaaaggcctacctggctggctccatcaaagacattgtatctcagtttggaatggaaactgttatcttacacacagcactgatgctaaagaaaagaattgtggtgtatcaccccaagatagaagcggtccaggagttcaccaggactctgcctgccctggtgtggcaccgacaggactggaccatccttcactcttacgtgcacctcaacgccgatgagctggaagccctgcagatgtgcacaggttacgtcgctggatttgtagacttggaggtgagcaacagaccagacctctatgatgtgtttgtgaatctggcagagagtgagattaccattgctccccttgcaaaagaggccatggcaatgggcaaactgcacaaagaaatgggtcagctaattgttcagtctgcagaagatccagagaaatcagagagccacgttatacaggatattgctctaaaaacaagagaaatctttaccaacctagcaccattttcagaagtttcggctgatggagaaaagagagtccttaatttggaggcgctaaagcaaaaacgatttccaccagcaacagaaaacttcctttatcatctagcagcagccgaacaaatgctgaaaatctgactgtgtgacagaacgtatcactgatgactgatagaaagccctctttcactctgattacccactcactacatgaagtcctgaaaataacagagaaactgttatatctttttaatgatttatttgcaagtattgagatttgacctgaaaaacaatgaaacacatgaacacacttccgattttctcctcgctgattagcttcctgcctgctgtcagtgctggacgaagtgctataactactttatgtaacattacagaacagctagaggtcctggggtaagagaaaaaaagcacatcacaacaaatgtgaaagccttcattattacacgttccagtttgtctcgctgtgtaggcataagctaatggtttattttcagaaagctgcctgaaacgttgctttgtattcttctaggaagaactttaattcctcctgaggaactctactttctgagccaaactgctaattttctgcggaactgtctagaagatcattcaagagaccctgcagttgcactttctcgtaaaagttaaaaaaaaaaaaaaaaaaaaaaggtttttcccggcctttgaacattttgcctatgagagttttgcatatattttatacttgagtagacaactttaataatccatatttatactatcgcagaagtaagcatttggcaaacgttcagccattagcactcatttaaccctgttagcaatattcttttgaaaaaagtgccagtccttatgtgataaactaagaagcccattgaatataaaagtgtgtaggactgaaacagtgaccttatattattgctaagggaatatgagattaacttcctacaggggccaaaaccagagaaaggcttccagcaacttcgatgaaagtagtttggccacatgtcaagccaattgtttgtactatttatgtacctttttcataactggaattgccaaataagcatggagatctaaatgatgtacttgttagtgtattcattcatattgactgtaaaggattatttttcactcagtactgatgtccttggaaatcttacctggaaacatgtttgcaaaaaacaaaaaaaaaaa

SEQ ID NO: 1411 - DNA, 1782 bp, Homo sapiens
gatatgggaacaagatggtgattctgggcaggcagtatgggtttattttgccaaagaaaacacagcagttgcatcctgttttgcaaaaaccgtcagtgtttgggaatgattctgatgatgatgatgagacctccatgagtgaaagccttcagagggaagctgctaagaagcaggccatgaaacagaccaaactggaatccagaaggcccttgcagaaaatgctactgtgtatgaatatgacagtatttatgatgaaatgcaggaaaaaaaggaggaaaacaatactaaattgcttttggggaaagactgaaagcccaagtatattcacaacttgctaaaagcagttgagatcagaaaaaaggaacaggaaaaaagaatggaaaagaaaatacagagagaacgagaaatggaaaaggaaatacagagagaaagagaaatggaaaagggagagtttgatgataaagaggcatttgtgacatctgcatataagaaaaaactgcaagagagagctgaagaagaaagaaaaaagagggctgctgcgctggaagcgtgtttggatgtaaccaagcagaaagatctcagtggattttatagacacttactaaatcaagcagttggtgaagaggaagtacctaaatgcagctttcgtgaagccagatctggtataaaggaagagaaatcaaggggctactctgatgaagtaagttcaaaaaacggaataccacaagagaaatgcattcttcaaactgatgtgaaagtagaggaaaacccagatgcagacagtgactttgatgctaagagcagcaaggatgatgaaataaagaaactagagtgaactgcagaagggaaaaggtcgtagagacccctgagaatcacccccaagcaccacaggaatcaaaaccactctcagtcacctagtgaagaaagagggcacagtgccagacaccacacgaaaggatcacgaacatcgagaggacacgagaaaagggaagatcagcaccaacagaagcaatccagagacgaggagaaccattacactgaccgtgattaccagaaagaaagggattctcataggcacaggagaccagtcatagagattcccattggaagaggcatgaacaggaagataaactaagggcgagggaccaaagagaaagaagtgacagagtgtggaaaagggagaaagatggggagaaatattcccaaagagaacaagaaagagagacaacaaaatgatcagaaccgacacagtgagaaaggagagaaggaagagaaaagcaaagcaaaggaagagcgtatgaaagtaaggaaagaaagatatgaaaataatgataaatacagagatagagaaaaacaagaagtaagtgtttgatcttcagaaagaaatcttcagaaaggaaagcagcccaagttctagggcaaagaataaatttcttgaccaagaaagatccaacaaaatgagaaacatgacaaaagacaaagaaggaaaccaggagaaaccctctaattctgaatcatcactgggagcaaaacacagactcacagaaaggcaagagaagggtaaagaacaagagagaccacctgaggcagtgagcaagtttgcaaagaggaacaacgaagaaactgtaatgtcagctagagacaggtacttggccaggcagatggtgcaggttaatgcaaagagctatattgacaaacaagatgattgatggctaccccaagagaaagatttaaggaagcacagaaaactgtaattcctggaacctgctgcataaaaccata

SEQ ID NO: 1412 - DNA, 2258 bp, Homo sapiens
gttacacatttgggccaaacagctttcagcaagggcatgtgtccacagctgatgggcagttaagaaccagcctgagctgaaggctagtaataccgtgctgtaggctctttaaaaggaaagcctggcataaacccagcatggaaaggaacattatcagttatctcaaattttgtctgccagggacaagaccctgttcattcttttgcccttttcagaactgtgagcttcaagtattcttgcttctctgtaaagggaagacatctcccttctctgatatccttcaacaaaagaaaaggctcttggcagggtaggggagtcagtagctcaacactagatcatccctagagatggggcaagtttctgtctgaacacgtcttgggtccgagtccttaggtgttcggatgcagtactttgtgaatacttaagctactgcatgcttggtgtagcttgcaatttctctgtatttaaaagcagctgtgtttattttcttcaaaataacctgtatattatttagagcaagcaatgtaaatattactgagaagttactgcagggatttttgtgacagagtttgtatgggtttttaaaaaaatcttagacacccctttttaagatggggagaacagggttgactgcaccgttgaagcccgcccagcattataaggaaatgtttttaatgactgctgcatctttgtaaaacgtttggtcatctaacagatggttttaaagtgtacaatatccaaaataacgatagccctgtatccatacattgtttcattgaaagaattctctattgcctcttcttggtagagccagagtccttaaggaaaatcaggaaaatgaagaaaatgatggtgccatcttgaccagacttctgcacagtaatttaacgctatcctagggagacttggttgaaggcacagttctgggatcagggtctaaatgtgcagtttctgagaaccttcaagaccactcactgggcagggctctgtggagcactggagctgtttggattccccagccctttggtcatatcctggaattccgtggaggctgcagaacttagatgcagctgttttttacagcacctatttttgtcagattggtaaggaaacactgagtcacagaatacttaagaattggagactccagtaatgtaggatggcctgagaggacgtccaagtcccaaggggtggacacggcatgttcctcgggcacagcctcagtgggggccttccccaggcgcagctcggccacctgaggaaagggtgtttcggaggcgcagccacacacacagcgctggcagcctcacggtcacgcccatcactccctgccccccactgcccttgagaagttagtggtgtcacatccttagttttatagacggctaggaatagattgtgaagaacactcagttcactactgtgttacatttatatcacaagcttcaattaaaatggattttaaaggattttaggatttacctttagtattaacaacgtatctactgacatactgttaggattcaaaaccagttaagtataagaattacttcatgtggttttcctagggtacaatttataaaaggtagaaagcatccaagtggctcctcaacaattacaattcttaatgatttttctcacagctgtgcccttctgtcagggtcagtgtcaaaattcgttatcaaaggcaaaacctactgtgccaagctggggcgctatatgtgaacggagtggaaatgcttcagtcacctctgccgcagcttgtgattccagcagttctcacaaaccttctgtcacatgatgaaaagaagcagcttgtataattccaactggtgtttcatttctgttctaatgctaagtggtaacgcttaacaaacagactaaaagctgtgtgcagaagaaagggctgaatgagtaccgcctccctaggttccagcacagcgctcgggtctaagaagtagagccccggggtagggtgggccatccactgtcaggccagtgtctcaagaaagcctgaccagctgagctgctgctttttttttgggggggggggggggaggggcgtcttgaggctttttttttttttacaaagttagtttgtgatcaacgattcactacaattgaagtgttactttgtcagaatatttattcctttgtgtgacatgctagattccctggatgtagctgatcatttttattttgtaaatattacctaactttacataaactatatcataataaactatttttgcatcacc

SEQ ID NO: 1413 - DNA, 4706 bp, Homo sapiens
acctccggtcgctggacgtgctctcgcgtagctccgcctttcgtaagtccccccgcctcgcatgatggctgcggtgccgccgggcctggagccgtggaaccgtgtgagaatccctaaggcggggaaccgcagcgcagtgacagtgcagaaccccggcgcggcccttggttgagcaatgtttaaagcgtttgaaaaacatgaatttggagggctcaattcaagacctgtttgagttgttttcttccaagtaatgaaaatcagcccttaactaccaaagtatgtgttgtccccagtcagccagtggtggagttggtgttgatgaaggttttgggagcctgcaagttgttgctccgcttgttggactgctgctgcaaaacttttcttttgactgtgaaacatctaggtttgcaagagttcattattttaaaccttgtgatggttgggctggtgagcaggttatgggttctctataaaggtgtcttaaaaaggttgattttgttatatgagcctttgtttggattgcttcaagaggtcgctaggattcaaccaatgccttacttcaaagattttacctttccttctgatatcactgaatttttaggacagccatattttgaagcctttaagaaaaaaatgcctatagcttttgcagctaaaggaataaataaattgctaaataaactgtttttaataaatgagcagtcaccaagagccagtgaagaaaccttgcttggaatttcaaaaaaagctaaacaaatgaagatcaatgtacagaataatgtggatcttggacagccagtaaagaataagagagtcttcaaagaagagtcatcagaatttgatgtgagggctttctgcaaccagctgaaacacaaagctactcaggagaccagttttgattttaaatgttctcaatccagactaaagacaaccaagtattcttctcagaaagtgataggaactcctcatgccaaaagttttgtgcaaagattccgagaggctgagtccttcacacaactttctgaagaaatccagatggcagttgtatggtgcaggagcaaaaaactcaaggctcaggccatttttctgggtaacaaacttcttaaaagcaaccggcttaaacatctggaagctcaaggtactagtttgccaaagaaactagagtgcataaaaacgtctatttgcaaccaccttcttcgtggctcaggtatcaaaacttcaaagcatcatctgagacagagaagatcacagaataaatttttacggagacaaaggaaaccacagagaaagttgcagtcgactcttttaagggaaattcagcagttctctcaagggactcggaagagtgctacagataccagtgctaagtggagactctcacactgtactgtgcatagaactgatctctaccctaacagtaagcagctcttgaatagtggagtttcaatgcctgtcatacaaactaaggagaaaatgattcatgaaaatcttagaggcatccatgaaaatgaaactgattcgtggacggtgatgcaaataaataaaaacagtacatcaggaaccattaaggagacagatgacattgatgatatttttgctttaatgggagtttagatgttcgttcatatgtgagacttttaagtgattaacaaggctagttcagtgttctaagtagaactgctaagatctggaagtaccacctggactcacagaggagctgctttagtgcagcattgcacaggagttcatttcagttcagtctacatttaaagtagcattgtgtcatttcatcaacaagtatttcttttttggcttcaactacatgtcaggtgttaatatgaaaaatctgccacagcctacccttgagaagcagatgtaattccttgagtgaggctagtaagtctctgaaaaactgaataattttatgacttactaggcaatttaataatcgtttgcaaaaaccattgtgtcttgaggtaaatgaggagcgggggtgggagatagcaaggaaacacctgaaaggtcaatttggtcttattggctccattatacataggtccgcctctgaatactaaagtttgtagctcctgacatttatgttttcttgtttatatgttggaattgatcaacaaggtttgccactgcttgtattaccagggactggttacaaccattatttctcttcatttgcttggcttatctcatattaaagtgagtttggagttctccaaaacgttttaattttatttatttgggtaccagtgattgattccaaataaacctttttacaaaaaggcaataaggtggtttatggttacatatgaaatataataggataacaggtagatgagaaagtaaaatgaaaaaatgaggttaggagatacaaagtagacccaggaatgaggctagaacatttataatttggtgttgatgctgtcatctgataggggatgttgctcgtactgttgctctgaggggagtacatcttgagtattttcaaataatgatgtgaagtttgaggtaggtatctttccaatgttctaactttactagaattaggttattaagcttctctagtgcccttaacttttgttacatagagatttaaagaaaaagaaagtagtaccttagtatgtaccgcatccttcttttcctcagccaccctatcataacagaagttatttcccttccattctttatttggctttgttctttccctgtctgccttctccattttctcagttatctctaccagtggttctcaaactttagactttttgagaatcacctggtgggttgctaaaagatgcagattagccctttcccagagactgataaacaggggccagaaacctgcatttttaacatggagcccaagtgattttgatccaggtggcccccaaatccagttatataaacactactttagcttctctcctgaagccttaagtaaactggtttaattcttaatctgtagtcagttttcatattccttttggctttctaccaagtggtagtatccatttagtgccttaaaatacagacaataccaaggagatttcattctagacaagtctagaaatggccattaacttctaagtgtccttgtgttcaatgaatatcctttacctattgggaaatagaaggtaaattagtaagagaactggtgtatagctttgtggaccatagggcttatttgctgagagttgtctatattcatgcacccagtcccctaagtagcctcttttaatacttcatttagctgattcagaaaaaaactccctgggaattaggagatttaaggttcagtcttgcttctcctacttgtggcttcactgagctagtcagtttcctcaggcttaggtttctggatttgaagtggaattttttcaagaatgaaacttttatagctgaaataaactttggagcttatctttcattggaaaaaccagggtggttcagtgagttaaggacaatatagcatggactgggctgccagtctagcatttgtttccaaattcattcatgttcttttggagtatcttcatctcctctcattttcccatcttctgccctttactattctgggaaaatggcaaaaaagcttcacatgtgtccacaaaatgacaatttgtatgtttataaggaattcagtattctgtatcagttactttttccaaataaatccaaatatttaacatttaaaaaaatgcaatctaaagtataccaaactgtaacttacctagtaaatgagattagaaactattgtcagggtcatcgtagtgaattattattattattattttttgagacagagtcttgtgctgttgcccaggctggagcacagtggtatgatctcagttcactgcaccctccacctcctgggctcaagctattctcccacctcagccgcctgagtagctgacactataggcaccaccatgccctggctaattttttaaaaactttgtgtagagatagggtttcaccatgttgcttaggctggtctcaaactcctggactcaagggatccacccactttggtctcccaaagtgctgggattacccacatcctagtaccaactttatcacttctgatggcattaggacacacaggccatttataagagcagtgtttgagacctcctgtgtgtcacttccaatcctcttggccttcatactaaagtcactgctgtggcaaccagtttcaagcagggctgaaccttgcctcttgctctggggatgtctcacttcctgcccctgggcttctcaccagctacaggaactgcctagcacttgggtatgtacaacctggaagaggtgtggggccaccccatcccctcctcaaagaaattcacaggcacagtatgaggctaaagtaacttccatcttggatgctaatctaccatgttgacttctgataaccagttcctggaatgccctctaagatttctacttttatctattaaaagaacacacacacacacacacactgtaaatcctggccttaagcaagttataggctaagttgtaaacagcattcttgcctttccctgaggaggtgacttcagtgtctcacatgttccttcatgtacccccttttctctatggcatataagccctgggtcggggggtaactgtggggatcactgcctgagacatggcttctgtgcataagtccctattaaatgtttctttctgacaaa

SEQ ID NO: 1414 - DNA, 1058 bp, Homo sapiens
tggcggggcttccggtcgggagggtccgcccgctctcgcgtcctttgctgggtccagacaccggtacgtccgggcgggtttttagtctcccaagcgagagcgtcgcattcacccgcgtgggtctgcgggcgccccagaccccagaggacccggcccccaacgcttacctgtcccctctcctgtccctcccccattccagccccttctctccccagccgttgcccctccccgcaccccgccgcgtccgcgcgcctctctccgcgcgcacccccaacccgcccccttttctctgggaaccgctccttccgctccgcccgcctggagtccttctggccggattccgcggcatccttccatagaccctcgttgttgcttcctccttgtggttccgttgcaaacatttttaaagggctggttattcttcctgaaatgagtttggtgattagaaatctgcagcgagtcatccccatcaggagagcgccacttcgcagtaagatcgagattgtaaggaggattttaggagtgcagaaatttgacctggggatcatctgtgttgacaacaagaatattcagcacattaatagaatctacagagatagaaatgtcccaaccgatgtgctttcttttccatttcatgagcatctgaaagcaggtgaatttccccagcctgattttccagatgactacaatttgggagacattttcctaggagtggagtatatcttccatcagtgtaaagaaaatgaagattacaatgacgtcctgactgtgacggccacccacggactctgtcacttgctgggattcacacacggcacggaggcagagtggcagcagatgttccagaaggagaaggcggtgctggacgagctgggccgacgcacggggacccggctgcagcccctgacccggggcctcttcggagggagctgagggccgcgttccttctgaaagcgggacgcgggaggggtggaggctgcggggagccggggtcgcacacgaataaataacgaatgaacgtacgaggggaacctcctcttatttccttcaaaaaaaaa

SEQ ID NO: 1415 - DNA, 1574 bp, Homo sapiens
acttccggcgcactgatcccgcctggggccggctgagtggcacttaagcgggccatgccatgcaaccttgggcgctgccaaccgtgggcgagctctgggtgtgcgggcggcctggcgcggcgctccgatggagtctagttctgtcgcccaggctggagcccagtggtgtgatctcagctcactgcaatctccacctcctggcttcaagcgattcttctgcttcagcctcccgactgtgtcagcgtgttatgatgccgtcccgtaccaacctggctactggaatccccagtagtaaagtgaaatattcaaggctctccagcacagacgatggctacattgaccttcagtttaagaaaacccctcctaagatcccttataaggccatcgcacttgccactgtgctgtttttgattggcgcctttctcattattataggctccctcctgctgtcaggctacatcagcaaagggggggcagaccgggccgttccagtgctgatcattggcattctggtgttcctacccggattttaccacctgcgcatcgcttactatgcatccaaaggctaccgtggttactcctatgatgacattccagactttgatgactagcacccaccccatagctgaggaggagtcacagtggaactgtcccagctttaagatatctagcagaaactatagctgaggactaaggaattctgcagcttgcagatgtttaagaaaataatggccagattttttgggtccttcccaaagatgttaagtgaacctacagttagctaattaggacaagctctatttttcatccctgggccctgacaagtttttccacaggaatatgtatcatggaagaatagaggttattctgtaatggaaaagtgttgcctgccaccaccctctgtagagctgagcatttcttttaaatagtcttcattgccaatttgttcttgtagcaaatggaacaatgtggtatggctaatttcttattattaagtaatttattttaaaaatatctgagtatattatcctgtacacttatccctaccttcatgttccagtggaagaccttagtaaaatcaaagatcagtgagttcatctgtaatattttttttacttgctttcttactgacagcaaccaggaatttttttatcctgcagagcaagttttcaaaatgtaaatacttcctctgtttaacagtccttggaccattctgatccagttcaccagtaggttggacagcatataatttgcatcattttgtcccttgtaaatcaagatgttctgcagattattcctttaacggccggacttttggctgtttcctaatgaaacatgtagtggttattatttagagtttatagccgtattgctagcaccttgtagtatgtcatcattctgctcatgattccaaggatcagcctggatgcctagaggactagatcaccttagtttgattctattttttagcttgcaaaaagtgacttatattccaaagaaattaaaatgttgaaatccaaatcctagaaataaaatgagttaacttcaaacatttcagaaaacaaaaaaaaaaa

SEQ ID NO: 1416 - DNA, 547 bp, Homo sapiens
aaggggcggcaggtgccatgtccggccacgaaggtggcaagaagaagccaccgaaacagcccaagaagcaggccaaggagatggacgaggaagacaaggctttcaagcagaaacaaaaagaggagcagaagaaactcgaggagctaaaagcgaaggccgcggggaaggggcccttggccacaggtggaattaagaaatctggcgaaaagcaagctgttccttgtgcctgaggagatggtgaccctttatttcatccgtatttaaacttctctattccctgccataacatcttttgccccgtatagctggaataaagtgttatcttggagctgttgtacatttaagaataaacttttgtaaaaaaaaaaaaaaaatcttacagtggctcatcatctctttagttgttttcactaagtcattcctaccataactgtgaatttaaaagtaaaaccagctcagaatcttgccagagtctgctctttggtccttgttctaccctaaactttgtatcacctgaaattaaatcaactcctttgaaaaaaaaaaa

SEQ ID NO: 1417 - DNA, 878 bp, Homo sapiens
atcccacgtcccttggcccctaatcctcgaaaaaccttaggagctcgcccccaccatctcccttccgcccctcctgcctccgtggtccctaactctcctttagccctgctcagcccccaaatactccctatgcccacggggctccccgactcgtcctccccgtcccgggaaggggtggccctcagtacccgcctggctcgccctgccgccaagctcaagtgtcccttcccttcccctcggggcccccgaggccgctgccagcgctggcactgcggggccggctcaccagttggtcatgtccaggaagaaggcgcaaccggcaggattgagctggaagccgagcagcctctggaactcggagatgagcacgtccttgtcggtggtgcccaggcagctgaacttctgcatcagctccgggtccaggtctacgtccatgccctccatggcggggaccggacacccgcttccccgcctcttcacaaccaagccgccgccgcgccgccgggcccggggacctggaggggggccgctgctagctagcttcgcgaccccgctcctttgaggtgaggaaactgaagtcccgggagagacagtggcaaggtcaagtagcaaagtgcactcagccctcccagcaaggagtctgccactcgcgcttgaaggacgtgtttgaagagctgctttcccagtgggatgctgccttaaagtcttgattccctggcactctttcctattactacattttatcggtgctgtttgtgttatgcaacggtagcatcgtgtctccggaagataaaaaaggtctcgatacaaacatccataaccttccacccactccgtcaggaacaacccaatcaaaataaagtcatgagaatttagca

SEQ ID NO: 1418 - DNA, 860 bp, Homo sapiens
gcggtctgcggcgcggagccgagtgggctgcggggatgcgggggaccagctgcgtgggcggcggcgccgagagccccggaggcgcggggctgagcgagggcccgcgggggcgctggctgcgcttggctccggtatgcgcctacttcctctgcgtctcgctagctgccgtgctgctcgccgtgtactacggtctcatctgggtacccacgcggtctcccgcggcacccgccggcccacagcccagcgcgccgtcccctccgtgtgctgcccgcccgggcgtgccgcctgtcccggcgcccgccgctgcctccctctcctgcctcctgggagtccccggcgggccgcgaccccagctccagctgccgctgagccgccgccgccgctacagcgaccctgaccgccgtccgagccgccagacacccagagagacgccagaggccgcggaggggcgaagacccgggtaactctcccttccaccccaacccggatcgccagccctcgagagctctgtgctccacgccgaggatgcaccgtctctggattggtccggccttcttcctaatgacatcgctcagcgtctctggagccgtcatcccgcggaatgggggcccagggggtgtcagctcggggccttgcctcttgcagctactctgtggtcaggccgggtcctccaccatcaggaagatcccatcctgagctctgtctcctgcccctcctgctgtgggatgctgagcacagagcccacagcccatctgcctcttcacctccctgaatccgtgtccatctgcaataaacgacagcctcggctgcctcgtgctgtgtctgtcctgttgtctgcaaaaaaaaaaaaaaaaaaaaaa

SEQ ID NO: 1419 - DNA, 4158 bp, Homo sapiens
ctggtgggtgggattggagggtgggaatgtgtgagggtgggtgggaggctaggtttttggctaggagttctgaaataggctcaggccacttttttcagacttttaagtgtgtatgtaagtgtgggtatgtgtgtttttaagtgtgtgtgtttaaaaataatgttttatcttccctccctgttccttaccgttttcattttccaacagtctactagagaaaaacatggttggccttgagaacataaaggaagaggcatgtatttgacatggtatttttccctttctttatgttataattgagtagtagccctctaatttgtagtttgggcaagtacagccaacaccctgactcttaaccttattatgagaacttcctttttacccctttttttgtttttgtgcaaaacagagatggggttgaggaaggagggttggcgagcaaggccagcttctgccctacagaattgggtgtgtcttttttttcaagtgaggctttgggaaagtgttcaaatgagagcagtcttaaggtctctaagagatggggaatgtgctatgtatatcctgcctgtgaaagcccaaaccatatgggagaagctagaggatactaaaaacaatgaaattgtgatttggaagtttagaacattgttttaaaaattacattataaatgtaagacatgctttttatgtgtatatccgaagggaaacagctacatcctcaagtttttgcagcctatatgacttgagattggagcttgtgaatttaacagtactggtgccatgagaatgagcaaagcctagccaatggatactattgtgtttagattgttcatctttggtagctttaggttcttgatcgaggttcttaagatttctaagtcctttataaaaataggtcaagagtcctgttgttatggaggcttgattatcccagatattaggagtgaacatttttaataaatctttcagaaaatcttggctagaaagaattctaagttagttgtctaaccactgaaaactacctagccagagatcatttaatgagatattctttgatcttcattgcattttttttgctctggaaaaggtggttcaatttgagtttgttttcatgatttgattgcagcttacttcatgccaaggattttttagggagaggtcgaattatttttcatttggaagtcatagggagacaggagttgtacttatgctgctacttgccaggaacaggttgggaagaaaattgtggctgttggaattgatgatgtactggcctaatatagaaaggaatttgtaggcaggagtaaacgttaactgacggtgggttagtgccctgcatcttgcatatttgaactgtctagagttcctgccattgctgggtataaaacgaggagctctctgttgacctgtaaatcattaatacttcttgacttagagtgtcacttcactttatagatgacattttcctctttccccttgatattttctatgttgtgttagataattggtagatatatagttgtggtttagtacatttagggcttctatttatttagattttgtttgttggagtctgtttccaaaagggaatgtgccatttagtctgcatctgtatctttgtggacttgatgatcactggtttgattttgaaaaatgtcttttccagcttttagttactctcatcaaatgtcacatattttctaatcacatgcgctcctttaccacagaggcacataatcatttggcctcatagcagttatccatggccgtactgtagtaaagttccttagaactttgccaggagtgaactagaaaaaagtgcttactagggcctaagagttgctttgtgccgtgtagtctggcctttgcactagtagatcattgctgacataggtcagtttagagacctttctgtgttaatgcctcctggtactgtcttaagatacgtacagtgtctgtttttagatctatgcatatgtcatgaagctccttgtgggctctgcatgaagctgctgctttgtttttgggttaacagatgtgcctgtcaactagcatgtgtattgtccaaattccataaacttaaggtttttaagggctgtgtggtttctgagctctatgtgtctttcctatccttgtaccttcaaagggtgagaaatgagatttatacatccaaagttagtctgataaatatggctttttgtttctccatgtaacctagactgtcaaaaataagtgatggtgataagtaggcctggagcctcagcttctgtaaatctcattcctaaaattttgctagactcgtgttggcaaaaacaaatacctgtggattgtccttaaggcttttaatcagatacctgtgttgctgttagctgaactgtagtgaagcatcgatccaaatcggtcttctgaagtatcagttatgcttttgagtttagaaaatacttaggtgttagtctagtcttcccattcatgaatcagtgtatgtccatatcagagagcctcaacttcttttttcttcctttttaaaaatgattttagtgttttgatttagtgtatactacatagttcagtattattggctttaccagtgttgacagaaaaattttaaatctccagttgcaaacagcaatggattaggatatggaaataaaatcatggcgacatcactgctgagttatcttaaacctctgctacttaattctccatattgaaatgcatactcctccacatacatggcttccaagtaaaggcaattgtagaggggccctgtctatcccagtatggttggattttaaacatatctgtgtttccgttattttgggaactgattaatatttacaattttttttgtttatgagttattttgatactaagaaaagagagaatctagaacatcttgaagttgaaatacaaattttattcttttggtcttgggagaatttaagcagtctatgcaactcatcaaatggtgagaaatagccctccgaggttccagtaagctttcagtgactttgatacctccccaagtttcttgagttgctgcttgttaacacccagcttttaactgagtgtttgctcctgatggtttaggagattttcatgttgtatcacactgtcaagttttattttgtctttttatccctccgtggatgtgagtttgaaacaagcacggtacagtaatcctgcctgatagagtagtctggaatgagaattactttttgggtgagagagttctccattttaatgtttctaaagtttttcatatgaacttggcattggaaaagggaggtaaagaaaaaggacgtttactaaaagcagtgtctactcttcccctttgtgagtgtttattcatggctaatgaaaaaaagagaaggactcttgggttttgtgttgccatgttaagcatggagagggatgcttgacagcgtgctaattgaagccagagcaagtatgtccttcatcaggtaatcaggaactcttcagttgaagctgaggaactaactgattagttgttgatcataatataattggttacaaagtggaagtgccagctggcttaagtacccaaagaaaagaatgcagcagcctaacttagtgttaccatatgttactgaatttgaaactgaccttttttcccaccctacttcacacacctaaaactcttttcttgtcagaccaaagagcgaaaagaaaaaaaaaaagtaaaacactttaccaatctgtcactcaggtacaattttgtggtgagatttttgtctgttctctttgtattgctcttaagagtcctttctcagcatattattctgccattgcctctgtcttccttggggcacctcagctctggatgctacccctgggatatctactgctgttatgtgaatgataggaggtaagtgaccattatagtaagggctctttgtaaaaaaattcaaaaaatttaaaaaggatgtatacattttatagtctggctatcagtttgatatcttgctgtcaagtatgtttctcaatctgtatttatccatcccatcaataaatgttaatggtaaaaaaaaaaaaaaaaaaaaaaaaaaaaaaaaaaaaaaaaaaaaaaaaaaaaaaaaaaaaaaaaaaaaaaaaaaaaaaaaaaaaaaaaaaaaaaaaaagaaaaaaaaaaaaaaaaaa

SEQ ID NO: 1420 - DNA, 2532 bp, Homo sapiens
atgctgctggaggccgagcggcggcgcggcgggggcgcggcgggggcgcggctgctggagcggtaccgccgcgtgcctggcgtgcgcgccctccgcgccgacagcgtcctcatcatcgagacggtgcccggcttcccgcccgcgccgcccgccccgggggccgcgcagatccgcgccgccgaggtgctggtgtacggggcgccgcccggccgcgtcagccgcctactggagaggttcgacccgcccgccgcgccgcgccgccgcgggagccccgagcgcgcccgccccccgccgccgccgccgccgcccgcgccgccccggcccccgcccgcggcccccagcccgcccgccgcgcccgggccccgcggtggcggggcgagccccggggcccggcgcagcgacttcctccagaagaccggcagcaactccttcaccgtccacccccggggtctgcaccgcggcgcgggcgcccgcctgctctccaacgggcactcggcccctgagccccgggccggccctgccaaccgcctcgcgggctccccgcctgggtcgggacagtggaagccaaaggtggagtcgggggatccctccctccacccgccccccagccccgggaccccgagtgccactccagcctcaccccctgccagtgccactcctagccagcgccagtgcgtctccgcagccaccagcaccaacgactccttcgagatacggccggcccccaagccagttatggagaccatccccttgggggacctccaggcccgggcgctggccagcctccgcgcaaactctcgaaattctttcatggtcatccccaagagcaaggcctccggggctcctcctcctgaggggaggcagtccgtggagctgccaaagggagacctgggcccggcctccccgagccaggagctcggatcccagccggtgcctggaggggatggtgcgcctgccctcgggaagagccccctggaggtcgaggcacagtgggcagtcgaggagggggcctgtcccaggacagccaccgccctcgctgaccgggctattaggtggcagaggccgtcctcaccgccccccttcctgccggctgcttcggaagaagctgagcctgctgagggcctcagggttcctggcttggccaagaatagccgggaatatgtgaggccggggctgcctgtcaccttcatcgatgaggtagactcggaggaggccccccaagcagccaaactaccctacctcccgcaccctgccaggcctctgcaccctgccaggcccgggtgcgtggcagagcttcagccccggggcagcaacaccttcacagtggtgcccaagaggaagccagggactctgcaggaccagcacttcagtcaggccaacagggagcctcggccacgggaggccgaggaggaggaggctagttgcctcctggggcccacgttgaagaagcgctaccccaccgtgcatgagatcgaggtgattggcggctacctggccctgcagaagtcctgcctcaccaaggctggctcctcaagaaagaagatgaagatctccttcaacgacaaaagcctgcagaccacatttgagtacccttccgagagctccctagagcaggaggaagaggtggaccagcaggaggaggaggaggaggaggaggaggaagaggaagaggaggaagagggatccggctcagaggagaagccctttgcactcttcctgccccgggccacgtttgtgagcagcgtgagacccgagagctctcggctgccagagggtagctcaggcctgtccagctacaccccgaagcactctgtggccttcagcaagtggcaggagcaggcgctggagcaggccccgagggaggcagagcccccgcccgtggaggccatggtgagatgcgggggagtggagcgctggggggagtctgacacccgggcgagcccatgtgtccacattctgtcctctcactttcagctcacacccgccagtcagaatgacctctcggacttccgcagcgagccagccctgtatttctgagcccagcactgccaggaccaaggctgagcccagctgtgggagtcccggaagctgggcagtagccagggactactgcacccgcttctgccttgtttggcctcactgtatcccacccacccctcctggccctggaagcagctagggtgcctcctgccatcggggccaggtctgggtctcactccccggccctgatttgggagggtccaagggggaagtggggtggggaactgcctgtgggtgagtgccaggggcctgctgggtggtggccatctgcgacccggcagggggctgtgcagattctgcacctggccattccctgtcctgtctcctcagcctgcctcacagtggccatggggtgtcggggtgaagggctgtcccagctacttgtcctctgcaggaccctaagcccctgcccgcagcccacatgccctctgtgatgagtggcgtctttcctgcctctgatgatggactcaataaacagcactggacaaggct

SEQ ID NO: 1421 - DNA, 6215 bp, Homo sapiens
gcagggagtgcgggtcggttctgcgtgcgctgccggacgaggctcccgccgccgattgacccgcgctccgcccgtagtcgggccgttctgttccaagagataaccattgggaccttggtagctaatgtccgaagaaagtgactctctgagaaccagcccttctgtggcctcactctctgaaaatgagctgccaccaccacctgagcctccgggctatgtgtgctcactgacagaagacctggtcaccaaagcccgggaagagctgcaggaaaagccggaatggagacttcgagatgtgcaggcccttcgtgacatggtgcggaaggagtaccccaacctgagcacatccctcgacgatgccttcctgctgcgcttcctccgagcccgcaagtttgattacgaccgggccctgcagctcctcgtcaactaccacagctgtagaagaagctggcccgaagtcttcaataacttgaagccatcagccttaaaagatgtccttgcttccgggttcctcaccgtgctgccccacactgaccccaggggctgccatgtcgtctgcatccgcccagacagatggataccaagcaactatccaattactgaaaacatccgagccatatacttgaccttagaaaaactcattcagtctgaagaaacccaggtgaatggaattgtaattcttgcagactacaaaggagtgagtttatcaaaagcatctcactttggcccttttatagccaaaaaggtgattggcatcctccaggatggtttccccattcggataaaagcagtccatgtggtgaatgaacctcgaatatttaaaggcatttttgccatcataaaaccatttctaaaggagaaaatagcaaacagattcttcctccatgggtctgacttgaactctctccacacaaaccttccaagaagcatcctccccaaggagtatgggggcacggctggggagctggacactgccacctggaacgcggtactgctggcttcagaagacgattttgtgaaagagttctgccaacctgttcctgcctgtgacagcatcctgggccagacgctgctgcccgagggcctgacctcagatgcacagtgtgacgactccttgcgagctgtgaagtcacagctgtactcctgctactagcccgtcccccagggtcaccatctttaattcttttccttcttttctttggagaggcacaaggagaatttaagggtccatggattcagtcttgctccttgtaattaaactgcaggatggaggaacagcctgagatatgagcatgagcccattttggggtaagcctttggttactttaattactccatggaagacatggaaaatgtccccactgattcttaaacatttggaatcccagtctgcaactattaatctggaggctatatctattttgttttgctttttggttggggggtggtgatctggttcttacacatcttggaagcaagaacaatcaggaccaaagtcactttgatcccacttttccaggagaaaaaccacctgtttggccagtgagaactacttgtatgaaataatttggccaaaccttcagtgtgaccaaatgtgagactgggagtttgtgtttttcacaggaaccctaagtatagacctctgctgctcatcaggaaacttactggagatgaaggccccagctgttgtcaccgggtttggaaagcaccttaactgaatcatgtaagcatcaggacataagcagcactttgtggtcaaatgtggaagccggagacttcaaagcacctctgggacccactggttgaagtttgcaatagaaacttaagttttcccaaatccataaagccttagccctggttctcaatagaatcagggacctagcaggaaatgattttactcaacctaaaatgctggatcccaggcccgtgtagctataagaattctggcctggatcccaggtgtacaactatggacaagatatgggcctctactttctcctctataaaatgaggctggatgaaatgtcagctagggccattttggctgctgaggctctgggatttggtttagttactgaatgttagattttctgcctagaaagataactatctagatacaagtggttggatcctgtttttgtttgtggtacatgtgtctttccaagagagatgtgtcaccaattagccctgcctttaaagaaactattatgtgtattcctgggactcactgacaccaattttctttttatagtgatggttcaattttgaaaagatggcttttgtgaggccaggttaaggtgaccaggatcttgtatgatgaattccttccatccctgagactctggtactatattgtaaacctggctacagtagttaattacttgagattctttaattttggtctctgagctgggcgtggtggttcatgcctgtaatcccagcactttgggaggccaaggtgtgcggatcacaaggtcaggagttcgagacccgcctggccaagatggtgaaaccccatctctactaaaaatacaaaaattagctgggcgtggtggcgggctcctgtagtcccagctactcgggaggctgaggcagaagaatcacgtgaacccaggaggcagaagtggcagtgagccaagatcgcaccactgcactccagcctgggcgacagagcaagactctgcctcaaaaaaaaaaaaaaaaaaaaaaaatttttttttttttggtctctggaaatgaacacaagggcaggttattcctgggtcacttctgggcccccctgccctcccagccccacttgagtttctctctctggtgtgggtgaaccagtcagcctgaatgttctgcatttcagcactttagaacctccctgtgaagattttagccttagcccaaacatcaaattagacggttcacatgatggtttttgacctatttcctttctaatgtattccacatgatcatggtgttaaatagtgaaaagtactgtgttgtgtgtgcaccttctccgtgcatttattagactaaccagtcaagcagacagctcagttagggagaaaacaatactctgaaatttgaaggccaatctgttgttactaagctgtttatctctattgcctttttaaatgtctggataagttgttggtggaaattaagttacttaacctcattaataccaattctagagaaagttcttttcaccatggatagtaaccctggatcctctacggtactggctgagctggaagtgccaaaaagcactcctggctgcttctggttccatctgatgatgatgtgacacacactgctgaaaaggcccaagcagggcaagtgggatggctgaaggagggaaggagggggttcagaacccactggcctggatgggagaactgggtggaggcttccccaagagggaagacagataaacaaaacaaaacaaaaactgggtaaagaggaatgaatcactcagccctgatgtttcaattctacactgcattcctggccagtcgcatttgttttaatgcaggcatggccacagctctcctagagaattatctcaaagaccagaagggacctggagaggcctatttcttaggtttttccagttggacaaggaaggagtggtttcactcagcttctagaaggagttggagcctaagtttatctgcctccgggagctgcttgctttgttttggctccgaagaggtatcagatagttttgacacctcaggaaacttgaaccaagctgtgaaaccaagacctccctgcgtgaaaatcaaggtggtctccttgtggcttcaccaggatgtttgtgtcaggctgtctcagcagggtggggaatgaccagccagggagcacagtgagccttactcagcactggggagcgcactggtgaggcaaacccatgaacctcaagaactgggagtatgttccttcagggagaagttctggcccattgcacaaacacttggaaattaacttttccctaaattcaagatagtgtggtgtcggaaggaaatgggacagtaaattaggagacgcgggctccacctttaccttactacgtggcctttgatgagctggcttaacatccctgagtgattccatgatagagatctatactccaaactttattcctggtatctagttggcttcactgccacagacactgtactctctctttttagaagtttttttccttttttttccccctcaattggcttatttagtaaatttaggtctgaatgaattggtacctaaaagcttccaaatctatacatttcagaatatgggaattttcttcctcttcttcccccatatcccaacatggaattctggaaaactgtgcctcttcccctgttctgccttcatgggggagagactggatgaaatctacaaaaacagccaaaagtgccaccctggcttcatgtcttgaatttctaacttgctcttggcaaaggtcgctttattttttaatttttttccttgcattttcttttttattctattgctgctgcaaaaattaaggcaaaagtagctttcgatctttcatatttcatcctggtttcacaaggagtcacttatcttaggaggtctgtaagtcaggttacaaggccgggagcggtggctcacacctgtaatcccaacactttgagcggctgaggtgggtgtatcacctgaagtccggagtttgagaccagcctggccaacatggtgaaaccccgtctctactaaaaatacaaaaaattggctgggcatggtggtgggtgcctgtaatcccagctacttgggaagctgaagcaggagaatcacttaaacccaggtggcggaggttgcagtgagccgacatcgcgccattgcactccagcctgggtgacgagtgaaactccatctcaaaaataaaaattgaaaaatcaggttacaaaacaccatttttcccgaaataagacaataagaggcttttctctgaattcctttatattgagcctttcagaattctccctgggtgggcaatttctttaaatagtatttgaccctcagatcaatcctgggaatttttttcatttgggtagcaaaagctagagtattgctgtggcgattataatacttttaaaaagttttaccattttaaagttgccaacatttaattaaggttttcctttgaagcctcctttaatttagggagtaaaatgttagctaaaccaattatatactatatactatacactgtatctcctgtggccatgagaggtgtggctataccgaacagaaacatgcctactgttcaggaaagatgtcagttctggtaacacctctctgtattgggatctgttaattttgtaaatctaaattcttctgctcttggccaggtgcagtagttcatgccctgtaatcctagaactttgggaggctgaagggggggcggatcatttgaggtcaggagtttgagaccagcctggccaacatggtgaaaccccatctctactaaaaagtacaaaaattagctgggtgtggtggtgcgtgcctgtaatcccaactacttgggaggctgaggcaggagaatcgcttgaacctgggaggcagcggttgcagtaagccaagactatgccactgcactcccgcctgggtgacaaagcaatattctgtgtcaaataaataaattcattcttctgctctcctgacttagagaaatggtttgcttaaaatgctagtaacaaacatcacagtcaacaggagcttgcttcatgcgaaggatcaatgtgatttgtggatggagatgatagtgatgaaattcctgtttcatggggctgtttttcttttcatctcactgggcagcaggtttagtgaggcagtgagatgctgctgctgtggattcttgtagctatgcctcggcttcttggcatatcaggtaggaacctgttacaagtgaaatacttgaaacctctctgaccaagagcctctgatggagtgggaggtgagctaattctctgaccagcttggggcactgtttcagccactggtcacattccttgcttcaaactgaaattcagtttggctttgagtatagggatacatggtggattcatgtacttcagtgtttgttttgaccaaagtttatttttctagtgcattttctaagtcaaagtggtgaaaatatgtaataattttagtatgcatgactcagtctgaaacaataaaaatctctgaaaaatgtg

SEQ ID NO: 1422 - DNA, 5740 bp, Homo sapiens
cgccgccgccgcacgccgcctgcctcctgcacgccgccgccgcgcctagcgcccgggcccgcgacaccgcccgctaagcgccgggccgagttcacgcagccgcggtctggcggctccgcggcggcggcgggtgcgggcggcctggccggtgccggttaaagggacgagttgcaaacacttcaggaagtgacaagtcgatttcctcctccccgggagtcgctcgtacaaagcgctcggcgccggcaggcgagcgtgcgcgcggcggacgcgcggcgggcaccccggacgacttggcgagcgctggcggtgacggcgcggggtccgcgcccggagcgccccgccgcgcacaggagttgaccacatttggccatttcccagaagggccccaccccaagggtgagtggccaatggggagctgtttctgctgacatcaattccccaggaggtactcaccccaagtctgcccaagtgaagatggctgatacccaccctgggatggagcccagcgcctgaggcccttatcatggtgatggtcctaagtgaaagcctcagcacccggggagctgactccattgcatgtgggaccttcagccgtgaactgcacacgccaaagaagatgagtcaaggacctacacttttctcttgtggaattatggaaaatgacagatggcgagacctggacaggaaatgccctcttcagattgaccaaccgagcaccagcatctgggaatgcctgcctgaaaaggacagctcactatggcaccgggaggcagtgaccgcctgcgctgtgaccagtctgatcaaagacctcagcatcagcgaccacaacgggaacccctcagcaccccctagcaagcgccagtgccgctcactgtccttctccgatgagatgtccagttgccggacatcatggaggcccttgggctccaaagtctggactcccgtggaaaagagacgctgctacagcgggggcagcgtccagcgctattccaacggcttcagcaccatgcagaggagttccagcttcagcctcccttcccgggccaacgtgctctcctcaccctgcgaccaggcaggactccaccaccgatttggagggcagccctgccaaggggtgccaggctcagccccgtgtggacaggcaggtgacacctggagccctgacctgcaccccgtgggaggaggccggctggacctgcagcggtccctctcttgctcacatgagcagttttcctttgtggaatactgtcctccctcagccaacagcacacctgcctcaacaccagagctggcgagacgctccagcggcctttcccgcagccgctcccagccgtgtgtccttaacgacaagaaggtcggtgttaaaaggcggcgccctgaagaagtgcaagagcagaggccttctctagaccttgccaagatggcacagaactgtcagaccttcagcagcctcagctgcctgagcgcagggacagaggactgcggtccccagagccccttcgcccgccacgtcagcaacaccagggcctggaccgccctgctctcagcctccggcccagggggcaggacccccgctgggaccccggtccctgagcctcttcccccttccttcgacgaccacctcgcctgccaggaggacctgtcctgtgaggagtcagacagctgcgccctggacgaggattgtggcaggagagcggagccggctgcagcctggcgggaccgcggggcccctgggaacagcctctgctccctggacggcgagttggacattgagcagatagagaagaactgagggggtgtgggcccaggcagggctggggtgtgctggcatcgacagcccccactctgggcactaggtgggcccttgaaggggagcccaactcgtgggcctgatgaaagcttcctgagtggtgtcgggtcccagagagggagcccacctgctgcctgggggagagcctggcctggccgcgtcatacagcgggtgtgtcagcctctcaccggctccccgagcgtggcagccaccaggtccacagaactactgcagcccagaggacagctttgaagtttgcgtcttttctgcctctttccctgtgggatgttgggcagtctctgttgtccccggcagagctgggcaccgctctgtatccccctggtggtgggggctgtcagggagggcctggggtgggggccaggggccatctgctatgtcagggcccttcttggcctcactcaggttcacttctggggagtcggccccgcagcttctttcactcagttttactccgtgccttctctcccaggtctccctgcttcaggcttgggaaggttcgggagatgcttccttctgtaacaccagaaccatttggccttaattccaatgtgagagacagaatccctggggtgctggactggccctccagagggtaagccatgtccggagtctcgggcccaaggaacgatttggagggtgcttgttagggcctcccgtgttgggtagaaatttggtggatctgttggctgaaaagacggacttgcttgcctctcctacagcatggagaggctgaccccatggctctgccaccgttggggcagggttagcagatggcagcccttctctgtggctgacaggtcactgagtgataagcatggttggttccggtgagtgtagggatggcacgataccagggcagcctcttgaaaacggcctcgggagacgggagctgcgagcaggtgggcagatgagggccctatgcgcactcaggggtgaagggcgtccgctggccactctgcaggggcccctgcaggattccaggcacctcccgtttgtccttgaggactgctggctgtaaccagggcacatcacccacctcaagacaagcccacgcccttgtcagcttagggggagcccagtcctgagggctgcatctctgttgtaggcccagccaccggcacaaagctggattcatgctccctgcccctaccccaccctggctcctcaccctggggcatccgaggagcctagccccctgagggtttgctctcctctcaaggtttgtagctcctctccggctgccttgcagacaccaccacatgggctctgctctatgggaatctggcttttagcgaatgtggcgtcttctgcaaacaatagcaattgggctggcttaggagcaagtggctcattttcccataaggctaaaaataactggtgcgctcccttgtgttggctgacacgcgcgttcaaagcacttttgtagtcactttgcttttgctcgtcttcatggacgagtgaacgcctcgcttctgcaggttgagtccagatgcttctcaccttctttctcctcaagaaagatgctttttgggaaacgttgtttaaatcttatttttttactacatcaaaaggatggtggttcaagttcccaatatgtgggtggcacttcttaaaaatcagctttaaggagctggcagaaagcccccagccccacagccctgagagatggtgttgctagctcaggtggctgacacatggggtatgccgggcactgggcaggtcccagagccggggaaccagctcacctctggttgctgtagctcctgccggaggcatgtctacttgtgatcccggacagccgaacccaagagctggtggctctgagcagacagagacatcttggcctgtccctgcctgggggtcatggagaccatgtcttcttagagcaaatgtggaggcggccagggcagttgttgggtgaatgtggagagcacatggccatgtcttgcccccggagtaccactgggcgtggggggtcctggcaccacatgcccggtgtggccgagggcacacagcctctatagcaggccttcctgtggaaggcagaggcagtgagggaggtggacggtgccagctgaggctgaggcatgcagcagcccccagctacctttgcttagggctggggtgggaggcacatggtgacaggtatatgtcgtgggactggggtgtgggtgacctgccctcaaaccttgcctgccacctccccattcaggcctggtggcaggaagggacaagctgtggagctggctgagtcacagccacctccccacctccccgcaagctggtcccatcgaccagcaagcccagccccagggcgcttagggagaaatgacccagcctcctcagaccccgcctgcctgtcctgtgcccaccacgcagcagtcaggggagaaaatggtggctatcccttctgcttagagaaagaaatggcctttagctggtttcatgtttgtgttttgactggagggagtagaccctatctataaggtgccaccccatcatccaagctgccacactgcccggagcagcctgttcctgcactccaccctgctggccccaggacttctgatctcagtcctctgggagggaggttcgcctaggaggtgccccccacattggtgtccccatgggcagcaggcagacagctcacccccaccagcatgatggccccagctgggggcagtggcaggagccttacttttgtcacagccttgcccacaaaccctgcctctgaggggagactgaggaagggcagagccagaagcaagccgtgccaggccatctgcctgctcatggggtcctaaagcgcgggctaagcctgcaggaaagccggggcggtggggggggcttagtgccacatgcaccccactcattccaaagccaccaaactgccaggggctgccgtccacccgtggggcccaggggctggggccacagccttgccattttcgttgccataccctcttgccttactcgcggtggaggccggatttgcacgggcagacgtgcacctgggcccgtggggagcttgttctgaccagacgtacagattttcattctcagaaagccttacttttcaaccaaatttttgtagccagttttgtgaatttgtacactgaaagaaaatttaaataaaggggaagtccacattaaaaagaaaacaaaacaaaccctaactaacttccaaatgggtctcctggtgcgggggcgtgagtggccgtgccctgggtgtgctgcctgtctgagcaagcttccctagctgtggaaccccgggccccctgctgcgggctctgccttggtgtcatgcctgctgcacccccgtttccactgacgtgccgtctgtggctatgggggtggtcactggaatgacggtcactccagacgtcagccggcagggatgcagcaggctggccgcgcaccggggctcgggcaccctctggccccacactggcaatgatgccacaccttgccatgtccacgctgttggtcaaacccctctgtcatgcctctttaaagagaaaagaagagaaagattttttttttttttaatggcagaccgaagtggagatcttgtagcctagataggatagtctgaccttctagcatagtctttttggcaaatgatttgtgttttcagtgtgtggggaagctgtcctgggggctggggcgacagatagcacataggctgtttctggggctgcaggggcttccctgagctggatgttgtgggtgttgccgtgcttcaggaagtgtggcgaccagaaagcgtagacccggggcccagggtctgcccgcccctgcagcctggcctccccgcacaggctgtggcttgcactccagccgctctagtctctcaggaatttgcttgttacttgtactgtgtaaataaagcttcctggttcaataccc

SEQ ID NO: 1423 - DNA, 2710 bp, Homo sapiens
aagcttgcgcgccatgtaaggtaaagtgactgattctatagcaatccaattgttcctttgtctgcccgtttacatataacaatgttgtcaatgtttgattgaaaatacctagcaggcgacacacacacctagctcctcaggcggagagcacccctttcttggccacccgggtatcccccagggggagtacggggctcaaaacacccttttggagaaacaaaggtggaagcaaatttcaggaagtaaaacttcctgaaataaaataaaatatcgaatgccttgagacccatacattttcaggttttcctaattaaagcaattactttccaccacccctccaacctggaatcaccaacttggttagagaaactgatttttcttttttctttttttttttcccaaaagagtacatctgatcattttagcctgcaactaatgatagagatattagggctagttaaccacagttttacaagactcctctccccgcgtgtgggccattgtcatgctggtgggcgtcccgcccacctgaaaggtctccccgccccgactggggtttgttgttgaagaaggagaatccccggaaaggctgagtctccagctcaaggtcaaaacgtccaaggccgaaagccctccagtttcccctggacaccttgctcctgcttctgctacgaccttctggggaacgcgaatttctcattttcttcttaaattgccattttcgctttaggagatgaatgttttcctttggctgttttggcaatgactctgaattaaagcgatgctaacgcctcttttccccctaattgttaaaagctatggactgcaggaagatggtccgcttctcttacagtgtgatttggatcatggccatttctaaagcctttgaactgggattagttgccgggctgggccatcaggaatttgctcgtccatctcggggagacctggccttcagagatgacagcatttggccccaggaggagcctgcaattcggcctcggtcttcccagcgtgtgctgcccatgggaatacagcacagtaaggagctaaacagaacctgctgcctgaatgggggaacctgcatgctggagtccttttgtgcctgccctccctccttctacggacggaactgtgagcacgatgtgcgcaaagagaactgtgggtctgtgccccatgacacctggctgcccaagaagtgttccctgtgtaaatgctggcacggtcagctccgctgctttcctcaggcatttctacccggctgtgatggccttgtgatggatgagcacctcgtggcttccaggactccagaactaccaccgtctgcacgtactaccacttttatgctagctggcatctgcctttctatacaaagctactattaatcgacattgacctatttccagaaatacaattttagatattatgcaaatttcatgacccgtaaaggctgctgctacaatgtcctaactgaaagatgatcatttgttagttgccttaaaataatgaatacatttccaaaacggtctctaacatttccttacagaactaactacttcttacctctttgccctgccctctcccaaaaaactacttcttttttcaaaagaaagtcagccatatctccattgtgcccaagtccagtgtttcttttttttttttgagacggagtctcactctgtcacccaggctggactgcaatgacgcgatctcggttcactgcaacctccgcatccggggttcaagccattctcctgcctcagcctcccaagtagctgggattacaggcatgtgtcaccatgcccggctaattttttttgtatttttagtagagacgggggtttcaccatattggccagcctggtctcgaactcctgaccttgtgatccactcgcctcggcctctcgaagtgctgagattacacacgtgagcaactgtgcaaggcctggtgtttcttggtacatgtaattctaccaaggtcttcttaatatgttcttttaaatgattgaattacatcttcagattattaaagactaattctaatgtggaccttagaatacagttttgagtagagttgatcaaaatcaattaaaatagtctcttttaaaaggaaagaaaacatctttaaggggaggaaccagagtgctgaaggaatggaagtccatctgcgtgtgtgcagggagactgggtaggaaagaggaagcaaatagaagagagaggttgaaaaacaaaatgggttacttgattggtgattaggtggtggtagagaagcaagtaaaaaggctaaatggaagggcaagtttccatcatctatagaaagctatgtaagacaaggactcccctttttttcccaaaggcattgtaaaaagaatgaagtctccttagaaaaaaaattatacctcaatgtccccaacaagattgcttaataaattgtgtttcctccaagctattcaattcttttaactgttgtagaagagaaaatgttcacaatatatttagttgtaaaccaagtgatcaaactacatattgtaaagcccatttttaaaatacattgtatatacgtgtatgcacagtaaaaatggaaactatattgacctaaaaaaaaaaaaaaaaagaaaacacctagcaggcaaggaacatgctcttcagaactctgctcttcagagttccaaagaagggataaaacatcttttatcaccatcaaaatagc

SEQ ID NO: 1424 - DNA, 754 bp, Homo sapiens
tggggactaataacagtgacctccccgccaggtcctgtgtgttgccggctgaagaagggtagctgaaaaattcagacccagcacagtgtttatgttggtcaaaaatagaaaactatgtctggcgtggccgaggcgggaggacccttcaggccaagagcagcctagcaacatggcgcaaccccatctctgtagtcctacctcagacccccagctacttgaacccaaaggttcaaggctccagtgagctatgatcccaccacagcattccagcctgcgagattgagatgatgattattccccaccttctgagagacaaagaccaacgagccaccacagccaccagtcccagaacccgccaatgctggggaacggaaaatgagggagttcaactctgagaaatggaataatcgtatcgctgatctacgtaaacaaattgaagaattgtctgaaagaaagtatgacatgaacttatgaattcaacaggtgaagatttacaacttgataaatcagcttcgtgagctcgagctgtaaaagccaaaggtccggtgatgatcccatacccttttttccagtctcatgttgaagatttttatgtagaaggccttcccaaaggaattttttttttttttttttttttttttgagatggagttttcgctcttatcgcccaggctggggtgcaatggtgcaaccttgctggtcactgcaacctctgcctcctgggttcaggaaattctcctgccttagcctcccaa

SEQ ID NO: 1425 - DNA, 694 bp, Homo sapiens
ttcagaaaaagcggatggtggttcctgctgccctcaaggttgtgcgtctgaagcctgcaagaaagtttgcctatctggggcgcctggctcacgaggttggctggaagtaccaggcagtgacagccaccctggaggagaagaggaaagagaaagccaagatccactaccggaagaagaaacagttcatgaggctatggaaacaggccgagaagaacgtggagaagaaaattgacaaatacacagaagtcctcaagacccacggactcctggtctgagcccaataaagactgttaattcctcaaaaaaaaaaaaaaaaaaaaaagatcagtggttgagatattctgcagaccctgcacttgatggatcagctggcaccacccagatcaataaactggctcatctgatcttgtggcccccacccagaactgactctgaaagaagacggctccgacttcctacgatttcatctctaaccaatcagcactcctggctcactggcttcccctcatctgccaaattatccttaaaaattctgctccccaaatgctcagggaggctgatttgagtaagaataaaactccagtctcctgcacagctggctctgtgtgatttactctttctctattgcaatttccctgtcttgatgaattggtctgtctatgtagcgggcaaggtgaaccccttgagtggttac

SEQ ID NO: 1426 - DNA, 2638 bp, Homo sapiens
gagtgctgggattacaggtgtgagccaccatgcccagccaaatctagggccggaacatggctgcagcatataaaaagaattgaattccatagttttgtaaaccctgttttttgtttgtttgtagttgttgctgtttttgagacagagtctcgctctgtcgcctaggctggagtgcagtggtgcaatctcggctcactgcagactctgcctcccgggttcaaactattctcctgcctcagcctcccaagtaggtgggactacaggtgcccaccaccacacccggctaatttttatattttattagagacagggtttcaccatattggccaggctggtctggaactcctgaccttgtgatccgcccacctcggcctcccaaagtgctgggattacaggcgtgagccaccacacccagcccctgttttgtttttgttttgcttgtttcttagggttgtttttctatttatggtaaaggcattggctttccatttgtagcatcaatagaatatttcctgttcacaataaccttatgtcatagtaaatggtaaagggatttaaagcagtggttttcagctgccagaggcctgagagagtttgggcatactctgtgtgatcgggcggaaggcctgtgggaagtttagctgaggacagggccaggaaaggtgatagacagtgggggtctgtcctggtcaccagacccctgggtcctgcccacctgcttggagctccccacccatcacacatgatgctgccaagccctctgggtattgtgggcaaataccttaggagagaagctgatgaactttgtttcttgaaatgcacagattccttggacatccctgagaggtcaatcatgaaggtcaacttggttttctccccctcatttgggttcagaatttaaagtccacacacacaggcagtaagatgattatagataaggacatcatcactcggtttcggatgttaaattgtctaggtgggttaggggtgatttgagatcacacaaccttgtgccacaaagaggaattcccaggccagagggagacattttattgccatgttatgatcttatcattgagttgaaaggcaatcttgtttcattttggattctttcttatgtttatgtcttataagggcactttgaatttccaagcaaataataattttgaattagcttttaatcattgacttctagcacagttatatgatcagaaacgtgctgtgtgatttgattgctctcaaatatattgagatttgctggaacaaaataagtcaggttaatttttgtaaatgtaccatgcttgcttaaaatgaatgtatctacatttgttcctgagatacaggttgatggacggatggctacatggatgtgatggagatggtttactatcgggaccttccgcatcctgctgatgttttgttgcttaggatatgaatggctgagcggaggctgtaaaacctggcactctgcttggagacggggtttcaccatgttcgccaggatagtctccatctctgtgtctttcctgaagactatcttctggtctcgaaatggacatgatggatccatggatgtacagcagagagcctggaggtccaaccgcagtagacagaaaggaaataaaattggcctgaaagacgtcattactctacggaggcatgtggaaacaaaagttagagctaaaatccgtaagaggaaggtgacaacgaaaatcaaccgtcatgacaaaatcaatggaaagaggaagaccgccagaaaacatatcaggaaactaagcatgaaagaatgtgagcacgcagaaaaggagaggcaggtatcagaggcagaggaaaatgggaaattggatatgaaagaaatacacacctacaagaaaatgtttcaacgtgcgcaagagttgcggcggcgggcagaggactaccacaaatgcaaaatccccccttctgcaagaaagcctctttgcaactgggtcagaatggcggcagcggagcatcgtcattcttcaggattgccctactggctctacctcacagctgaaactttaaaaaacaggatgggccgccagccacctcctccaactcaacaacattctataactgataactccctgagcctcaagacacctcctgagtgtctgctcactccccttccaccctcagtggatgataatatcaaggagtgtcctcttgctcctcttccaccctctcctcttccaccctcagtggatgataatctgaaggaatgtctctttgtcccgcttccaccctctcctcttccaccctcagtggatgataatctgaaggaatgtctctttgtcccgcttccaccctctcctcttccaccctcagtggatgataatctcaagactcctcccttagctactcaggaggccgaggtggaaaaaccacccaaacccaagaggtggagggtggatgaggtggaacaatcgcccaagcccaagaggcagagggaggccgaggcacaacaattacccaaacccaagaggcggaggttgagtaagctgagaacacgccattgcactcaagcctgggcaataagaataaatccgtaggtcgaaaaaaagaaaaaaatcaaaaaacaaaacaaaacccacgctccaaaaacaaactaacgaagaat

SEQ ID NO: 1427 - DNA, 1449 bp, Homo sapiens
gggatttccagagattgttttaaggagcagtcttatattcagggtagaaagttatgattggatctgctgttaaggagaacaaaggagcttctaaaggtttgggaggtttactggtagtaactattctaggaaatatttatgttttaaggtgatgttcacatgggttctttagaaggaacatagtcaagtgtgatggattaactctatatagtctttctcctcttgtgcgtgtaggaaatctgacctgcagtgtcagttgatgtgacaagagataaagaaagcacagtattttaaaatctaaagcagattcctttcttagaaaacaataggaaaaaattatagatggatgtctttgctgaaatctaacaattagctcatattccatgagaaagagtggcctaagaattatttcatgttacctagccttctgaagctactcacttgatgtgcctagcactttgaaactaaccttttctttctttgttcatgacagtttaattccaaatatttactattttctcttgtaactgttagaacagttccttttgacattaatttttgcctacatatatatttttaagttgagaccaaatcggtgaagtgttgagcaagtaacatttatgatgtgtgtatattggaacaaatgtaaaagggttacaaagattagaaacagagtcataaaaaatggcttgatttataaaggcattacttttggtgctttatataatggcatatattgaactaaaaatttgtatatacagtatgtcagcatttcttagtaacttctcttgaatccatttttaatatctaatattgtacaggttggggagttacattcttcaggccaatactatccagactatataaatttataaaataaattgaaaaattcattcccctgtattcaagaccaaagcacataaatgctaatgtagggctcagaggggaaatacagttctcctgcatatttgagaaaatgtgaagtcctttcaagaaaatctaataaacataataatcatagcctgctgacactaaggaaaaaggacctcattcactctttcttttatgcagtgatttactggtccctactgatttccaaattggatcacgatagtaaattatccatgctggtacctgtgaaagtaagccctgggatccatatttgttttgtgttctgcttaaatcagcaagaatgataaatttgatggtgtgaaattggaagtatcaagggctttctttggtgattgagggaaataatgtctctacttgtaatttattgtgaccctttttcactgtatatgctttgtatgtctaatatttatttcaatgcaaattaaattgttccttcatctgtattgttatatctaagattttattgatgttaaaatctaattgtggaataaaaatctctctggaatccaaaaaaaaaaaaaaaaaaaaaaaaaaaaa

SEQ ID NO: 1428 - DNA, 2854 bp, Homo sapiens
tatctgcctgggacgccgcgaggcagaagtaggcgggcccattgacttagtgtcaaggcggaggccgcgcttcatgccagcggtcacggaggcagcggaaagccgagccaggcgcctgcgcgctgggaagagtaggttcagagtgcattccggaacccggggcgcggcgcactgcgcaggcggccggactccgctcagtttccggtgcggcgaacaccaaagtccgggaacttaagcattttcggtttctagggttgttacgaagctgcaggagcgagatggaggtggacgcaccgggtgttgatggtcgagatggtctccgggagcggcgaggctttagcgagggagggaggcagaacttcgatgtgaggcctcagtctggggcaaatgggcttcccaaacactcctactggttggacctctggcttttcatccttttcgatgtggtggtgtttctctttgtgtattttttgccatgacttgttcgctgatatctaaattaagaagttggttcttgagtgaattctgaaaatggctacaaacttcttgaataaagaagacaggactctcaatagaagaatttcacatctccaagggacccttcctttcattttacactttgttactaatttgcagaactctattaattgggtaggatttcacccattcctagctaagttcttaaaattaaaccctttggttcgtgtttaaaaactttcaaacatctgatggctttacaggggctgaatataaaagcatttgtacttaaaggtcttgtgtattcattaagaaatatagtaatgtcttttaatgttttaagagttgatcagggtttactatgatgcaagtaataggatgattaataagggaaggtttttatgaattcaaaagtcaattattcaaaagcagggaaagattttgagagagggaacaaagtattcttagattgcgtagaagctgctaggttccagttttaatttttaggtttagttggactctgttatgaaaagataggttatgggtgggcgacaggttgatacagtcttagaaaaagcaggtaatatcaaagtattggaaagctagcatgcatgccctcttacctgggtatcttcccccttttttccttttaaactcttgagcctcctataacgaaggattatgtgtttcaaacctattttttttttactgtttcattaagtgtgcttgtgcccaaaatatttacttgtataatatctgtaacttgcttaaatacttcagcaaagtcagcatatttactcattcaacaaatatttgagccaggcattattttagacacagcagtgaacaaaacaaaaaggcattcttgccttcatggagcttacattcttattgttatttaaatctaaatgttataaaacaagaatttatattctagggttgatcagctagtatttaatcaaaaaggccacactcccatagcagctactctaagctgtagtagctaataaaaaatattaatgttggccgggcacagtggctcacgcctataatcccagcactttgggaggccaagggtggtagatcacttgaggtcaagagttgtgacaccagcctggccaacctggtgaaaccctatctctattaaaaaatacaaaaaaatacaaaaaaattagctgggcatgttggcatgcacctgtagtcccagctatttgggaggctgaggcacgagaattgcttgaatccgggaggtggaggttgcagtgagccaagatggggccactgcactctaacgtgggcaacagagaccctgtctcaaaaagaaaatattcctgttagccctaaaggctttacatgaggaatggtagaagtggtcttttgtttaaattagttgcattcagcatatatgaattgtcttaaatattttggggatactcccccgccttttaaacagggcataagatctggtaaactctctgtatatcttcctacctttcaaaatcgttcttagggttagtcaagtctggaatataattgctgactataaagttagcaattatgcttttaaggtgttgtcacatcaacctaaagagaaccatctatggaaggtatggttgaaacatctgtaggaacacagaactgggatttcactgagtttaccaaatcaactgtgtgaactgtttctgcactgcttgctaatggtttcatctaataaatgtttacttatatagctgagtttggttttattctaacaaattacctggtggtgtgattgtgaggtgattaacagttctcacatagtttactgttaggtcacacacagacttccgatcataatccatactgcctttttgagcctaaaatcagcctactaccacaattaccaaatattctgaaaatttctagtatggtgaagatggagagatcttggtgtgaaggttaattttatatgtcatcttgattatgctaggagatgcccagatttctgggtttgtccatgagggtgtttccagaagagattagcatttgaatcagtagactgaataaaaaagagccacccactccactgcgggtgggccaaccccttgagggcctagctggaataaaaaggcagaggaagggcaaattctgtcttctctctgcttgaacagggacatccatgttctatccttggacattggttctcctgattctctggctttcagacatggaccagggcccctggttctcagacctttgggtttggactggaactacaccattggctttcctgggcttactgtctgcggaaagcagattgtgggacttctcagcctccataatcacaagagccaatccctcataataaatttatttctatataaaaaaaaaaaaaaaa

SEQ ID NO: 1429 - DNA, 3601 bp, Homo sapiens
aagatggctgccctaatgtacacttgggaccttgcctggcgcctcttccgggcttggcagcgggcggggtccattgagtaaagccttgcgtgcctgcgcccgcgacggaggcgcgcttcaaagcgcaggcgcggggagggggtgggggaggagggaaagcggcgagtaagatggaagatgaggaggtcgctgagagctgggaagaggcggcagacagcgggcaggaaatccaaatctcctcccaaagtgcccattgtgattcaggacgatagccttcccgcggggccccctccacagatccgcatcctcaagaggcccaccagcaacggtgtggtcagcagccccaactccaccagcaggcccacccttccagtcaagtccctagcacagcgagaggccgagtacgccgaggcccggaagcggatcctgggcagcgccagccccgaggaggagcaggagaaacccatcctcgacaggccaaccaggatctcccaacccgaagacagcaggcagcccaataatgtgatcagacagcctttgggtcctgatgggtctcaaggcttcaaacagcgcagataaatgcaggcaagaaaagatgccgccgttgctgccgtcaccgcctcctgggtcgtccgccacgggttgcactgccgtggcagacagctggacttgagcagagggaacgacctgacttacttgcactgtgatcccccttgctccgcccactgtgaccttgaaccccatgcactgtgacctccccccttctcccccttcccactgtgattggcacatcgacaagggctgtcccaagtcaatggaaagggaaagggtgggggttaggggaaggttggggggacccagcaaggactcagagagtcagacagtgccacttggccacttggggtaaagccagtgccagcaataacagtttatcatgctcattaatttgggatttcaaaacacaaatgaaaactcacacccacccacccccaagtgcatgtctccatcacttaaaaagtaagttccatttgaaaatatcctttcttttttttttcttcctatttttgtttgtttatacaaatatctgatttgcaagaaaaagtgcatgggaggggttttagtggtttaatgaatttttaattaagaaagggtagtttggtagtctacttaaaaatgtttctgggaaattcactagaaacattaaccaataggattttggtgagcttagcttctgtattcctactgccgcccagaaaaggggcagggctctgcagccgccaggacagacgagcaccccatgcctatacctccctccccgagctaagtcccagggcatctgggccttgcctggagactgggctagctctgtaggctcggagagcctggggagggtgccaaccccacctctagtattttgggagatagggaaagtgaaccgacttccccttcccatacccctcagggtggttccctaccagccaggcttactacttctagaagaaagcagagtgccagggagtgagattgcatccctgggcttagaagtgacggagagaagacttgtttagtattttgccatcagcacaaggaaaaccaggagagagtctgcctccaggactctgagccttctgcctcgtatgttcagaaggtggataggtcttcccactccagcatggcttgaactcttaggggtctgcagtgctccatctccattggtggccccagctcagtaactatacctggtacatttcctgtgtgcaatcagtaccttgaaggcagaacattctgaataaagttggaaaaagaacagctttgctttgcaaagattgatgacagactggttcctcagaggcctaggctacccgtcacccctttttccagagcgagggcctggaatgaaggcagtttatcctctgtccctggagcctggggtttgctttggctccttgaggtggaagagactaagagggcagctgcccagagcagctgtgtgtacctggctcctctcaggcttcctgatcccttccgttgcactgcgccttatccctcagccagccagacagcctccctgctcctgaccagcagatacgtttcggagtggttggtgtggtttttgtgatgagggcagcacgtggtggccaaggtggcaagctgagtctcacaggctcactccctcgttggttccctgtgggaatggtaggccaggcccagtaagccatgccccaacacgtcctctcctccggaggaagggccagctgccagctgagtcagcagctagtccatagcacagccttataactgtaaagccaggcattgcccatgagcagagctggaaccagagcttcagtcagtaagagggaggattaccttcaggagaaggcaaggaagaaaactggctgctatctttatagttccactgccctaaccaagtgtccacattctaaatgtgtagtgtccatcccttatgtaatagtggtttcccgcccaaagtgagactttccttttaattggagaagggtatagaggtagtccaggtgggaacgccagaagtgctgattgcccagccattgggaccacctgttcttgccccactaccctctagtgggaggccaaagtaaaggctggctggtgggtgtctgtggattgaggatgtggcagggactggtcctcccacctccctctggccaaagatgggctttgcccgctgtgtgcctgtcaccacccaccagcagtcatgccctgggcttcccaaatggagaggtagcaggcaacgtttttaaaaagaaagaaaacaggaaactgtattgtgtcgggggaggcgggagggagatgaggaaacggtttggattttgtgtgtgggagggtattttttgggggtagttgtctgtaactttcctaagtgctttttttccttttcttttttaaagtaagttgcaggctttggcttggaaaaccccagggggatggggggcagaaacctgaggctgctgcccctttatctgccttcacggtactgtccccttcccccagctcctccctgaccccatgggccaggcctcagaccttccagctaaccgcttcccatgagccactactctgatgtcagcctataaccaaaggagctggggggtccaggcctggtgaccaacctttctcagcccactcaatcagggtgctccccacctgcaggcaggaggcaacaccctatctgctaccatcagccccttccagagcccatctgccccgcccagccctgccctgcccagccataccctgctctgccccatctgggggtgccctgctcagggatgggctggcagggctgtacccagcctccctggtaagcagagactcaagaaacctctggggtcctgttttctggtcgtgtgatcccaggggtgcacatgggccccttgggtgtctgaacagaagggcatgggagggagggctgcacccctgcagtcttactctgctggtgtagcgggcagctgcccactcccaccccaccctgcaccgcgggctcctgagtcggcagattaagcattttataaattgtattttaaatacatgttttaaacttgtcaaaaaaaaaaaaaaaaaa

SEQ ID NO: 1430 - DNA, 5088 bp, Homo sapiens
ggcctttttttttttttttttttttttttttttttactattcccttggatctggcttcccaaagtctttttgctttcacctggtcagacccagatactcacacatctacctaactaacagactgtactcccacaggggttccgggatagccccctcctatttgggcaggctctcaccaaggaactaatcgagcttccccttgctcctagcagcctccttcaatacatcaatgacctccttatgtgtagtccctcctttgatctatccatcaacacatcacccaacttctaaatttcctctatggccagggatatcaggttttacctacaaaggctcaagtagcccaaacccaagtcactaaccttggactcaccctaacccctaattcttgagccatgccagcccgatggaaggagctaatacaggatgtgccccttccccacaccaagaaggacccttcctttttgggccttgttgggtacttccagctgtggatcattaactttggcctgttgaccaaaccactctgcacggcatcacgtgggtccatcctagaacatttggacccagcttgcccattaactcccacttctaaaaactgaaagatgcccttttaatgtcccagcactaggactacccaattccattaaaccctttaccctgtatgttcattgtaatcaaggccttgcccttggatttctctgccaaacccgtggcaacactccagaagccattgcatacttctgaaaactggactctatcatccaaggctggcctccatgcttgaaagttctggatgcagctacattgctggcctcagaggcacaaaaactcaccctctaccagcacattactattgcatcttcccataacttatgggaccccatgagccattgatctcttcttttcctcctgccatccagcttacagcaaccctctaacaccttccagagatgtaaaattctaaatccaaccaccctcctccctataagtacttccaattctgaatcccccactcttgcctagacctcttagcctccctctcctcccctttccaacacatttcagaagcccctttgcggaaggaacccacatggttcattgatggaagctcttttaaggaaccatatctggcagctggctatgccatcattgccgaaaacaaactcctataatccaatgctctctcatcacatatcacctcacaacaagcggaactatttgccctaaccaagaccctcactctagcaaagggaaagagggtcaacatttacaccaattccaaatatgcataccatgtcctacagtctcacactgtaatctggcaggaaaggggtttttctaactacaaaaagaaccgccataataaatggcaaactcatacacaagccgctggaggcagctaaactaccactagaggccgtcattatccattgcaagggacaccaaaaggctacagatgccataaccaagggaaacttcttagcagattcggcagcctggcaggcagcccttagaacactattgttattgcccattttccctagcatacacccaagaagaaaaaggtgccttgctggctccagggctgttcataacgaaagctgaatttacttagactacaaactcatcctacccaagacccaaaaactttctgttctcacccacatccataaccaattccatgcgggttatctcccgttgctccaatttctaaaaacctgtatacattcccttaccatggccatcagcttggaccgcctcactaaaggttgctctgcctgcagtcagacttcccctcaggggcccttagaccacctccttttccctcccttcaggcccaaaggccagttgccgggacaggattggcaaattgacttcactcatacgttcccccataaagaaagtctgatatctcctcacgatggtagataccttttcaggtggatagaagcctttcttactaccactgaaaaggcacacaccattgcctctaccttcctcacacacatcatcctttgattcagcctcccctcatctatacaactggacaattgaccagcatttatctcccaagtcactcaacaggtttctaagtctttaaacatcatatgggtttttcacattctctatcacccccaatcctcgggtaaatttgaacaggcgaatgccctcttaaaacaacagttaaccaaactttccctagagatcaaaatgaaaactgaatatcacttcttcccttggcccttatgtgcctcagggccctcccccgaaaacctctaaatctaagtccttttgaacttttgtatggacgttctttcgtcctacagaactttgctccatcccctcccttacaggacacctggccagcactgcacctcactcaacacttagtccgacagtacactgacactcacctccccaaacctgaggattcttcccaattcactttcttacccttacagccaggagactgggtctgggtagcacacccctcctcccctttccaacaaaatggaagggtccctatcaggttatattcaccatccccgctgctgcaaagttaacatcctttccctattgtatacaccattccaaatttaaaaaggcacccggcccacaccccgaagtctcctcaccccggaaatattcttcctttcccacaggaccaacctcgctgtgcctaacaagaattccagaagtcacccatccgaaaggcactggcccatgacactctccacttccaatcttaaatcttttacttcataccttgtctcagatctctcctggtaccccttccccacgcccttagataatccatctcaattcctcatgctaattgaggagctatggctgcaaggcaccttccaggatttcacacctacacaaatctcctttttctccttttgccttctctgcttatgggatattctgagtccccacccccaatcactgacagctgggcccccttcatcagcctcacacaccacgtattaagtcagtcacaatctcccctctcctctaactgctggatttgtctttctacacacacccaatgattcacggctcttccggctgacctacttacatggacacagtccaacgtgagcttacacatttcttacttggctataccattcttggctgattcattcctgaaaccggttcataacctggaaactcagctaaacacctttccttcaaactcagctctctcagcatggtttcaggtagggctgttgccctccttcacctaatagcttctggactaacatccatacaaaccaacacagcatcatctaaaccaccaatatgggggtaccatttctactcaaacttccttcatatccccaccccccttatgtctcagccgaacctaccctaatccagcccacgccacaatggtgggacaggttccccagtccctatgtggtcttatttttacccttgcactccctgtagaccatcaattctacaccctaattacaaaatcatatccacctctgcctggcagaaggtgttatgcttttctggctcgcctaccatccacacatccctacacctcaccaccggatcctcttttctttccttccatccaattcctggcttccccgctgccaactctgctctctatgtctccagtttaaaggtgccccctggaaaaaatgtaacaattccctcacctgtgactggtacctgacagccaccacaccggggcagcaatggctaacggttgacaaagacaatttctttctctctccaaaaccaaacagccttcatcaactccctagccaagactccctatcaggcccttacaggtgccgctctggctggcagttacccaatttgggaaaacgaaaataccctatcatggctacctaccttcacctacaacttctgcctgtccacccccagtctcttctttttgtgtgatacaaactgatatctttgcctaccagccaactggtcaggaacttgcaccctggtctttcaggctccaaccatcaacatcctaccccctaaccaaactattctaatttctgtagaagcctctatctcctcttcacccataagaaataaatgggctctacatctcatcaccctgctaacaggattaggcatcactgctgcacttggcactggaatagcaggcataaccacctcaatcacctcataccaaacactattcacaaccctttctaacaccgtagaagatatgcacacttccattaccagtctccaacgacaattagacttcctcgtgggagtcatccttcaaaactggagagtcctggacctcctaaccactgagaaagggggtacctgcatatacctccaggaagaatgctgtttctgtgttaatgaatctggcattgttcatatcgcagttcgtaggcttcatgacagggctgcagagctttgacatcaagtcgctgactcctggtggcaaggatcatcccttctaagatggataccctgggttgcccccttcctaggacccctgatcttcctcttcctgttactaatgattgggccatgcatatttaaccttgtatcccgcttcatttcccaaaggctgaattgttttatccaggcaagcatgcaaaaacacattgataatatatttcacctttgccacgtctaataccagagcctacgaggaaaccattcggaagctccagaacccaggccctaatcacaacgcccctatccagcaggaagcagccagatgatcaacgacgccctttttcctttttatactaaagtaagaaataagaatgttagcccaaactgcactattttgcagacccctaccattttacaaactggtcagagtggaaaattccaccagggcctgagctgtgagaaacatcctgtcaggcaggtcccaggcctaacccctggctgcactaaattccttcattatcagcagccaaacacaccgcccccaccccattttcacaacaatcccagacctctcctgcccgggactgtaactggtccagcctgtaagcgggaagggggctctggcactagctggtaccccctctccgcaggtctttctcccaataaatctgtgttgccatt

SEQ ID NO: 1431 - DNA, 1161 bp, Homo sapiens
ggcccttcgcgcgcagtcccttagggggcgcctggaagcccggcgcatgcgccctgagggctcgctgacctaccgggtgccagagaggctgcggcagggtttctgtggcgtgggtcgggcagcacaggccttggtgtgtgcgagtgccaaggagggcaccgccttcaggatggaggctgtacaggagggggcggccggggtggagagtgagcaggcggctttgggggaggaggcggtgctgctgttggatgacataatggcggaggtggaggtggtggcggaggaggagggcctcgtggagcggcgggaggaggcccagcgggcacagcaggctgtgcctggccctgggcccatgaccccagagtctgcactggaggagctgctggccgttcaggtggagctggagccggttaatgcccaagccaggaaggccttttctcggcagcgggaaaagatggagcggaggcgcaagccccacctagaccgcagaggcgccgtcatccagagcgtccctggcttctgggccaatgttattgcaaaccacccccagatgtcagccctgatcactgacgaagatgaagacatgctgagctacatggtcagcctggaggtggaagaagagaagcatcctgttcatctctgcaagatcatgttgttctttcggagtaacccctacttccagaataaagtgattaccaaggaatatctggtgaacatcacagaatacagggcttctcattccactccaattgagtggtatccggattatgaagtggaggcgtatcgccgcagacaccacaacagcagccttaacttcttcaactggttctctgaccacaacttcgcaggatctaacaagattgctgagatcctatgtaaggacctgtggcgcaatcccctgcaatactacaagaggatgaagccacctgaagagggaacagagacgtcaggggactcccagttgttgagttgaatatgatggagcatcagattttacctaatacagcagaactcctaaaaagttacagccatatgcaggacggcagtactcagcatggtcttatgcacaggaactaaaggaaaaagagatcgagtcacaaaaattcaggaagagggggtaaatgtggattgtatggaatgaaaaataaacattctcaagga

SEQ ID NO: 1432 - DNA, 3222 bp, Homo sapiens
ccgggtgagacaaatcgggcgccatcttgtcttgttcccgaagaagtagaagcatcgaaagcgttggagaggtgttaccggaacggcggcgacaagggtgttcccgaactagagtggggcatacataatcttgctgctatgcttcgaagctgtagtctgaatcaacctaagttttaaacagaaggtgaacctctgagatagaaaatcaagtatattttaaaagaagggatgtgggatcaaggaggacagccttggcagcagtggcccttgaaccagcaacaatggatgcagtcattccagcaccaacaggatccaagccagattgattgggctgcattggcccaagcttggattgcccaaagagaagcttcaggacagcaaagcatggtagaacaaccaccaggaatgatgccaaatggacaagatatgtctacaatggaatctggtccaaacaatcatgggaatttccaaggggattcaaacttcaacagaatgtggcaaccagaatggggaatgcatcagcaacccccacacccccctccagatcagccatggatgccaccaacaccaggcccaatggacattgttcctccttctgaagacagcaacagtcaggacagtggggaatttgcccctgacaacaggcatatatttaaccagaacaatcacaactttggtggaccacccgataattttgcagtggggccagtgaaccagtttgactatcagcatggggctgcttttggtccaccgcaaggtggatttcatcctccttattggcaaccaggacctccaggacctccagcacctccccagaatcgaagagaaaggccatcatcattcagggatcgtcagcgttcacctattgcacttcctgtgaagcaggagcctccacaaattgacgcagtaaaacgcaggactcttcccgcttggattcgcgaaggtcttgaaaaaatggaacgtgaaaagcagaagaaattggagaaagaaagaatggaacaacaacgttcacaattgtccaaaaaagaaaaaaaggccacagaagatgctgaaggaggggatggccctcgtttacctcagagaagtaaatttgatagtgatgaggaagaagaagacactgaaaatgttgaggctgcaagtagtgggaaagtcaccagaagtccatccccagttcctcaagaagagcacagtgaccctgagatgactgaagaggagaaagagtatcaaatgatgttgctgacaaaaatgcttctaacagaaattctgctggatgtcacagatgaagaaatttattacgtagccaaagatgcacaccgcaaagcaacgaaagctcctgcaaaacagctggcacagtccagtgcactggcttccctcactggactcggtggactgggtggttatggatcaggagacagtgaagatgagaggagtgacagaggatctgagtcatctgacactgatgatgaagaattacggcatcgaatccggcaaaaacaggaagctttttggagaaaagaaaaagaacagcagctattacatgataaacagatggaagaagaaaagcagcaaacagaaagggttacaaaagagatgaatgaatttatccataaagagcaaaatagtttatcactactagaagcaagagaagcagacggtgatgtggttaatgaaaagaagagaactccaaatgaaaccacatcagttttagaaccaaaaaaagagcataaagaaaaagaaaaacaaggaaggagtaggtcgggaagttctagtagtggtagttccagtagcaatagcagaactagtagtactagtagtactgtctctagctcttcatacagttctagctcaggtagtagtcgtacttcttctcggtcttcttctcctaaaaggaaaaagagacacagtaggagtagatctccaacaatcaaagctagacgtagcaggagtagaagctattctcgcagaattaaaatagagagcaatagggctagggtaaagattagagatagaaggagatctaatagaaatagcattgaaagagaaagacgacgaaatcggagtccttcccgagagagacgtagaagtagaagtcgctcaagggatagacgaaccaatcgtgccagtcgcagtaggagtcgagataggcgtaaaattgatgatcaacgtggaaatcttagtgggaacagtcataagcataaaggtgaggctaaagaacaagagaggaaaaaggagaggagtcgaagtatagataaagataggaaaaagaaagacaaagaaagggaacgtgaacaggataaaagaaaagagaaacaaaaaagggaagaaaaagattttaagttcagtagtcaggatgatagattaaaaaggaaacgagaaagtgaaagaacattttctaggagtggttctatatctgttaaaatcataagacatgattctagacaggatagtaagaaaagtactaccaaagatagtaaaaaacattcaggctctgattctagtggaaggagcagttctgagtctccaggaagtagcaaagaaaagaaggctaagaagcctaaacatagtcgatcgcgatccgtggagaaatctcaaaggtctggtaagaaggcaagccgcaaacacaagtctaagtcccgatcaaggtagtatactttttaaagtattttgtctgatttttaaaaaaaattgactgaatttattcaaagttgaaagtgtcctttctctctctctttaataaactcagtttggtacttgataaataatcatagtcttaaatgttagaaatcctatataatattatttatttaaaattgcagatttttaatttaaaatacatttttatttttaaattttgtcttttcccttttttttcagatcaacaacccctccccgtcgtaaacgctgaggaatgatgtggcaagaatgccatgatgttctttaaaaaaattccatgagttttaagggcttgtctcattatagaggcacattgtggctgtgtaggtgaaaccagaatcttttttttttttaatctgtaaataggtgtactttttccaatgctgctccaagttacttaataggatttctttgtattacgtttttttcaaaaaatatagtgcataataagactataaacatgccattctctttcagctgtaatgttcttaaaattattcttgaatgtactgtgatgtcaataaagctctttagttcatttttgttaaa

SEQ ID NO: 1433 - DNA, 1773 bp, Homo sapiens
gggtcacatggcggtggcgcggtagcgcgcgatgcagcacaggctagaggctgcgcaagcgcggggcccgcccctgggaccctccgggccgggcggtttggccccttagcgcccgggcgtcggggcggtaaaaggccggcagaagggaggcacttgagaaatgtctttcctccaggacccaagtttcttcaccatggggatgtggtccattggtgcaggagccctgggggctgctgccttggcattgctgcttgccaacacagacgtgtttctgtccaagccccagaaagcggccctggagtacctggaggatatagacctgaaaacactggagaaggaaccaaggactttcaaagcaaaggagctatgggaaaaaaatggagctgtgattatggccgtgcggaggccaggctgtttcctctgtcgagaggaagctgcggatctgtcctccctgaaaagcatgttggaccagctgggcgtccccctctatgcagtggtaaaggagcacatcaggactgaagtgaaggatttccagccttatttcaaaggagaaatcttcctggatgaaaagaaaaagttctatggtccacaaaggcggaagatgatgtttatgggatttatccgtctgggagtgtggtacaacttcttccgagcctggaacggaggcttctctggaaacctggaaggagaaggcttcatccttgggggagttttcgtggtgggatcaggaaagcagggcattcttcttgagcaccgagaaaaagaatttggagacaaagtaaacctactttctgttctggaagctgctaagatgatcaaaccacagactttggcctcagagaaaaaatgattgtgtgaaactgcccagctcagggataaccagggacattcacctgtgttcatgggatgtattgtttccactcgtgtccctaaggagtgagaaacccatttatactctactctcagtatggattattaatgtattttaatattctgtttaggcccactaaggcaaaatagccccaaaacaagactgacaaaaatctgaaaaactaatgaggattattaagctaaaacctgggaaataggaggcttaaaattgactgccaggctgggtgcagtggctcacacctgtaatcccagcactttgggaggccaaggtgagcaagtcacttgaggtcgggagttcgagaccagcctgagcaacatggcgaaaccccgtctctactaaaaatacaaaaatcacccgggtgtggtggcaggcacctgtagtcccagctacccgggaggctgaggcaggagaatcacttgaacctgggaggtggaggttgcggtgagctgagatcacaccactgtattccagcctgggtgactgagactctaactaaaaaaaaaaaaaaaaaaaaattgattgctgtgcctcattacaaatgcatatgatgtttgagtgctgttgtttgaaattatttttcttttcgggtcttcaaaaattcaagaaaagttgatgattgacttgaagattacaaaatttaaggttttttggcatgtgtgttttctattaataattggttatatgatgtcaaagtaatactttcataatagaattgacatgctctgggatagtttgacaaaggtaaattataaagtgaaatctcttgtttcattatcttccattctaacctcagagatctgtttctctagaaaaaatgtccatctctggctttaataaaattatgcatcagaaatcaaaaaaaaaaaaaaaaaaaaaaaaaa

SEQ ID NO: 1434 - DNA, 1412 bp, Homo sapiens
gtatcggccattatggccggggcccactggaaatggtgacctcacaggaagatgcatcttgtaggaggcagctgtgaggtctggttccccgacgtgctgcagcaagtgcctttgccctgcctgtgggctccctccatggccaactctgctatggacaccagagtactctgctgtgcggtcatctgtcttctgggggcaggtctctcaaatgccggcgtcatgcagaacccaagacacctggtcaggaggaggggacaggaggcaagactgagatgcagcccaatgaaaggacacagtcatgtttactggtatcggcagctcccagaggaaggtctgaaattcatggtttatctccagaaagaaaatatcatagatgagtcaggaatgccaaaggaacgattttctgctgaatttcccaaagagggccccagcatcctgaggatccagcaggtagtgcgaggagattcggcagcttatttctgtgccagctcctcgatttctggggccaacgtcctgactttcggggccggcagcaggctgaccgtgctggaggacctgaaaaacgtgttcccacccgaggtcgctgtgtttgagccatcagaagcagagatctcccacacccaaaaggccacactggtgtgcctggccacaggcttctaccccgaccacgtggagctgagctggtgggtgaatgggaaggaggtgcgtatcggccattatggccggggcccactggaaatggtgacctcacaggaagatgcatcttgtaggaggcagctgtgaggtctggttccccgacgtgctgcagcaagtgcctttgccctgcctgtgggctccctccatggccaactctgctatggacaccagagtactctgctgtgcggtcatctgtcttctgggggcaggtctctcaaatgccggcgtcatgcagaacccaagacacctggtcaggaggaggggacaggaggcaagactgagatgcagcccaatgaaaggacacagtcatgtttactggtatcggcagctcccagaggaaggtctgaaattcatggtttatctccagaaagaaaatatcatagatgagtcaggaatgccaaaggaacgattttctgctgaatttcccaaagagggccccagcatcctgaggatccagcaggtagtgcgaggagattcggcagcttatttctgtgccagctcctcgatttctggggccaacgtcctgactttcggggccggcagcaggctgaccgtgctggaggacctgaaaaacgtgttcccacccgaggtcgctgtgtttgagccatcagaagcagagatctcccacacccaaaaggccacactggtgtgcctggccacaggcttctaccccgaccacgtggagctgagctggtgggtgaatgggaaggaggtgc

SEQ ID NO: 1435 - DNA, 510 bp, Homo sapiens
ttcaatgcaaatagaagtttattattgcaagggcaactgttaaaaaaaacttcttattcacaacaggctgtgtgacataggcctttaacatggggccaatgtcgctaagaagttgaaaatacagtattacaaaatcagtagaaaacaagcaacaaaacaaaagtgtctatcttcttttctttgtccaacatgtttgggtagtagtattgaaggagctctgtgacaagtgcaaatgattgtaaaatgaatcagctctgctcagcatatacacagagactataaagttacttatacaaatatagctctactgtgttaattgccacaggacttagataggtatggcagaaagatggccagatttagatgacctagacactgatgtcacactaaactcttggaattggcttcttggctttcctctctgacaagtgactgaaatgggggtagggttgaattttatgaagatgtgacacttaacccaccacacacacgcacaaattattgtatttc

SEQ ID NO: 1436 - DNA, 3020 bp, Homo sapiens
gcttctggtacttttgacgcgtctgctaacgtagtccctcagtgcgcatccggacgtaggaggtggaggttgtggaattcgccgttcgaaagcagggactaaaagccccacttcgtcttacgttccgaaaggaaggcgtctgttgagcctttctctcagtcgtgagggaggcgtcgacggcgtgcggaagtcctgagttgaggcttgcgggatcctttccggagaaagcgcaggctaaagccgcaggtgaagatgtccaactacgtgaacgacatgtggccgggctcgccgcaggagaaggattcgccctcgacctcgcggtcgggcgggtccagccggctgtcgtcgcggtctaggagccgctctttttccagaagctctcggtcccattcccgcgtctcgagccggttttcgtccaggagtcggaggagcaagtccaggtcccgttcccgaaggcgccaccagcggaagtacaggcgctactcgcggtcatactcgcggagccggtcgcgatcccgcagccgccgttaccgagagaggcgctacgggttcaccaggagatactaccggtctccttcgcggtaccggtcccggtcccgtagcaggtcgcgctctcggggaaggtcgtactgcggaagggcgtacgcgatcgcgcggggacagcgctactacggctttggtcgcacagtgtacccggaggagcacagcagatggagggacagatccaggacgaggtcgcggagcagaaccccctttcgcttaagtgaaaaagatcgaatggagctgttagaaatagcaaaaaccaatgcagcgaaagctctaggaacaaccaacattgacttgccagctagtctcagaactgttccttcagccaaagaaacaagccgtggaataggtgtatcaagtaatggtgcaaagcctgaagtaagtattctaggtttgtcggaacaaaactttcagaaagccaactgtcaaatctgattagccacttatatcttagactatactttttgggaagtctagagatgtatataatgtgctaaattcaaagtagcaaatctgaagataggcaatgtcaaacccatgaaaatgggagattaatgagctttatttggccgtgcatggtgcctcatgcctgtaatgaggcagatggcttgagtccaggagttcaagactagcctgggcaatgtggcaaaaccgcgtgtttacaaaaaatacaaaaattagccaggcatggtggtgcatgcctgtagtcccagctgtttgggaggctgaggcaggaggatctttgagcctaggatgctaaggttgcagtgagccaagatggcaccattgcactctagcctgggcagcagagcgagaccctgtctcaaaaaatacatttatttttttcattttcagttaacagtgtactcttataacaccgttattagctggtactttggtgatttctattactagtttttctaagctatttacagagtgtttgtagctttcatttgcagcattatgttcccacaaattctgtactcagcatatacagtatagtttatctgctctatttctgtcttatagaaatcatgaatgtggtctgcagacattgatgaagaaaatctgttggtaattgatacatgggctaaagcatcagaggtttaatttgaagtttatgttcacacactgaaaacttagtttttttgttggtagatccatgtgcatgctagaatttgggacaggcactatttgcataaagtattaaagtcaatttttaaactaagcaaaggtacacgttgtaacggtggggcatctgtgaaaaagatgtccctttcataatatatgcaatatattccagatgttttgagagattacagaagaggaggcctgcttcacttgcagataagtttattataattctccagaaatgtgcaggatgtgcattagcaaattgcactgtacttttcactccagcctgggtgacagagcaagactcccgtctcgggggcttaaaaaaaaaaaaatgctgtatctaaatgaatctgtgtaattgggcccagatgtgggtttgctcagtattagtagacaaggtctttgttcagacgattaggtgcctaactggcaaatgccttagtttcttaaaacgtattttctgatgtggctttacatttcaaaagtgaacttgattcaacctgagaaaactgattaaaaaattagtttaaatttgccagcagggaagtaaaataattatgggaagagtgtcttaagcctaatattaaatcagttttgttaaggggaaaactcaatagttctgttacttaggctgttagatccaagttgatttttgtgtctacagctaaattttgtttacaattaggctattttttaatataggatttagaaaccaagggtatgtgttttaaaattacactttttcttaacctgtctagctgtcggaaaaggtaacagaagatggaactcgaaatcccaatgaaaaacctacccagcaaagaagcatagcttttagctctaataattctgtagcaaagccaatacaaaaatcagctaaagctgccacagaagaggcatcttcaagatcaccaaaaatagatcagaaaaaaagtccatatggactgtggatacctatctaaaagaagaaaactgatggctaagtttgcatgaaaactgcactttattgcaagttagtgtttctagcattatcccatccctttgagccattcaggggtacttgtgcatttaaaaaccaacacaaaaagatgtaaatacttaacactcaaatattaacattttaggtttctcttgcagatatgagagatagcacagatggaccaaaggttatgcacaggtgggagtcttttgtatatagttgtaaatattgtcttggttatgtaaaaatgaaattttttagacacagtaattgaactgtattcctgttttgtatatttaataaatttcttgttttcattcttaaaaaaaaaaaaaaaaaaaaaaaaaaaaaaaaaaaaaaa

SEQ ID NO: 1437 - DNA, 1924 bp, Homo sapiens
cgcgcaatgcgagggagacgagattatgtaaatgagtggattctggctgagctatcctattggctatcgggacaaaatttgcttgagccaatcaaagtgctccgtggacaatcgccgttctgtctataaaaaggtgaagcagcggcgttttcggcgactttcccgatcgccaggcaggagtttctctcggtgactactatcgctgtcatgtctggtcgtggcaagcaaggaggcaaggcccgcgccaaggccaagtcgcgctcgtcccgcgctggccttcagttcccggtagggcgagtgcatcgcttgctgcgcaaaggcaactacgcggagcgagtgggggccggcgcgcccgtctacatggctgcggtcctcgagtatctgaccgccgagatcctggagctggcgggcaacgcggctcgggacaacaagaagacgcgcatcatccctcgtcacctccagctggccatccgcaacgacgaggaactgaacaagctgctgggcaaagtcaccatcgcccagggcggcgtcttgcctaacatccaggccgtactgctccctaagaagacggagagtcaccacaaggcaaagggcaagtgaggctgacgtccggcccaagtgggcccagcccggcccgcgtctcgaaggggcacctgtgaactcaaaaggctcttttcagagccacccacgttttcaaataaaagagttgttaatgctggccactctcagtccagcgttcctcagtagtgaatagcgaacctggagctgacgggacgggacgggacgggacgggacggggcggggcggggcggggtgtgtgtgtgtgcgcgccgtcttccatctggagcacgtaactgccttggctcttcgatgagtgggtccccagtcctaggacttcccagggcaggtgcaggcaccaaacgtcctgggcgccgccacggtccgctccacacagtcacaaacgcgcaatgcgagggagacgagattatgtaaatgagtggattctggctgagctatcctattggctatcgggacaaaatttgcttgagccaatcaaagtgctccgtggacaatcgccgttctgtctataaaaaggtgaagcagcggcgttttcggcgactttcccgatcgccaggcaggagtttctctcggtgactactatcgctgtcatgtctggtcgtggcaagcaaggaggcaaggcccgcgccaaggccaagtcgcgctcgtcccgcgctggccttcagttcccggtagggcgagtgcatcgcttgctgcgcaaaggcaactacgcggagcgagtgggggccggcgcgcccgtctacatggctgcggtcctcgagtatctgaccgccgagatcctggagctggcgggcaacgcggctcgggacaacaagaagacgcgcatcatccctcgtcacctccagctggccatccgcaacgacgaggaactgaacaagctgctgggcaaagtcaccatcgcccagggcggcgtcttgcctaacatccaggccgtactgctccctaagaagacggagagtcaccacaaggcaaagggcaagtgaggctgacgtccggcccaagtgggcccagcccggcccgcgtctcgaaggggcacctgtgaactcaaaaggctcttttcagagccacccacgttttcaaataaaagagttgttaatgctggccactctcagtccagcgttcctcagtagtgaatagcgaacctggagctgacgggacgggacgggacgggacgggacggggcggggcggggcggggtgtgtgtgtgtgcgcgccgtcttccatctggagcacgtaactgccttggctcttcgatgagtgggtccccagtcctaggacttcccagggcaggtgcaggcaccaaacgtcctgggcgccgccacggtccgctccacacagtcacaaa

SEQ ID NO: 1438 - DNA, 5369 bp, Homo sapiens
actgaaagtgtctagaccagcagcagcaggatcacccgggagcttattagaactgcacaaccttgggtcctctggggcctattgcattagcatctgcctgtaacaaggccttcagtgatttgtttgcacactgaagtgtgagaagcactggtgtgaactcaccaggtagggatggaaccagagatggaggtcttattaacttcatgctggtaactccctgagctaatgggcccatgaggaataaatttggtctaaagcctggtcatttggaaatgaactaaatatactttactcagtcagcttgtgtaacagagctctccagtggcatgtgggtctttttcagcagtgacaatagtttattttttaaatatactccacaaatgttgttctggtgtggatcttaatgtggagaaaatcagacaccttttcagtaagcatttcttttgtttctgtgatcatgttcatgttagtttattgtatttgtattagtttatctgtgggactatcccttaatatttcccaaaacaagaagacatttgcgaatgttttcatgatgcattgtacaagatactgttttgaactggatcaatgaaggagatgtttggtggccttggaaagccctggagagtaatagtgtggttctaagaagagttggcctgaatcagttcattcttgggttgtttgctaagattgtctgctgaaggtgggtacgtggaaaacaagatggtaagccaaggaggatgaagggaggcatgctgctggaccacttccagctcccaaatgactggatcttggccatcttgcttttcctgctaacttagaactgaactgcttattctagaaaatgagaggcactggggccatataggaaagggatagcattggacccaagtcctagactttcagtagtttgtttgcaggaccagggtcccaccccttttccaattgaaatgtaggcaaggtggtggcaagcccatggcctaggctgtgggaactcatagaacaactatagtgatgatcgctgccttggattgcagcctactctgaatgtgtgcacctgtgctaactactttcaggtgtgttgtcttgtttcatagactcattacatttttatgatgaagtgaaacccgtgaattggctcctccagacttctcattttaatgacaaaaaagtgggtctccagagaggagctgggattttccaagatctcatagtttgttcctcactttttgtccgtaggagaatcatagaagaaccagataatcttgtctcttatagaaggaatacccttacccttccacattcccgtggtggtggtgtgtttgcttttttatcagtcttaacccatgggaggctgcacaacttacataagaggctacctgttctgtttgccaaacggcagcccagacccatcactgagcatgtccttggcaagaggcacaacctcaggctgacactgtttccatgtccgtgagaaatgatgtgtataaacgatggccagtaagatgctcatctgttgggaagacaacagagggcagggctgagagcatggcttccctgctgattgcctgtgttcagatcccagctcagccgtgtgtaagctcttggttcttggggtaactacttgtttacctctctgaaaaatgggagtagaaataatgaatacttttaataggattattttgaggataaatgtatttatttatgtagagaacttggcacggcacctggcacagagtgagcacttaatgaattttgactgtaaatagttattactgttccactagattcaaatttcttatctttgcctttagctggatgagtgaggagatttgtaccaacgtcatgtattctcctcttccctgcaaattcctccacctgagtcctattgaggtgctccccattataaggagtcctgtgaatcaaagtggtatgtttactgtaaagaatgtggaggatgctgttcactgcattgtattgttatcttcatgaggaagccaggagacatttattttggctctctgttttagaaaggtgttctcctcatgacgacctgtttgcctctgatcttaaggacactttgaagcataccgagcaggggtctgcaaacttctttgataacaggcaagatagtaaatattttcagctttgcagggcagagtctctgtcacagctactcaactcttctgtggtagcagccacagacagtgtgtaagtgattggacgtggctgtgttccagtacaacttcatttacaaaaacagggctcaggccaacccctgatagagatattcatggtttttgtgtttctctctcaaatgctaactaccagaaaagcttagagtcaaatctgaatcatgcttctagcaaatatgtacctacacatttagcatactaacatcactcttgcttaccagtttttaccctgttttctcacatttatattccatttgtcataattatagctcctgtcttgactgtatcttctttcactgtgttttttgttgttgtcgttgttgttgtttttgggaatgggataggactgtaagtaaataaatcaattatatcttgctagcttagaaaccaggacttgagtaaccacttctgactcaaagttcaatctatgtggttaaatagggaagcagaccataagatgtatgcccagtggtgcacgttgctgactcgcaagctatgtgcaggctttagcatttagtgtggtgatgtgtgccctctaacctgagatgttgagagaggggcagagaagaagacttcttgtagccacaaagtttcattccttcctctctcattgttgtagcatttcttttaagtgaaaacagcctttttggtttgctagcctatctctggcaggaagacaaattatttttttacagtatcagacacgcggtttcctgtctatgtttaacttgctagcagaacatctcagccagctggttccctctggacccattgtgtccttaatgtcgttgctttacaccatccagcaaacccactctgtgtactgatcgcatgcattgagcattttgttgacttccgttgctttccgagtaagggaagtcttagaaatgctgccctctttctcccaaatctcattttgtgtttgttcagctccaacaccagggagctggcttcttggggaaatgattagttcttgcatgtaagaaatgaaaagagtaaatggtgttttggtagctctgggggattttaggtatgctgccttggaactgtgcactcacgcctcaaaatagctggctttccagctgtgcatttttgtttcaaaagaaacaaaccagatttactttctggtctaaatgcagaagaaaaaataagtgtggaaatatggttgagaaaagttgttagaagaggaagaaaattatggattgaagttgctagtctcattcctgagaagagaaatcagttatttgaggtgatgactcagagctgaagcagccttttgttgtgaaccagccttggttagaaagcacacttggaattcatcaatatggccctatgtctggccgaggaaataataaagattttgcatgatagaggacactgtgactcagttgaaggaagcttagaatgtatttgaactgaattaaggcaaaagcaacccgcttttcaagattttttttttcctaagtagcaaagtaaacaaagctgcactgaggccagatgtgctttctggttgtgaatatttgtactctagaacctcattctggtatgaatcagcagagtggaatctagtatggacacaggctgtctcaaattccatccactggatatgagtggccaagaaagcagtcggacccatactgctggtgctgtagcaaggttcgggtggttcctctgcagcctcaggtctctcccactgcggcctccatgtgttccataaactccacacccatgagtaatggcaagaagggtccactgagaccttttgctgctttgcgagtgtctcagtgtcccaccaggggaaaaaaaaggctcagggaggtggctaaccactgtgaaattgacttttatttccacccacgtatactccagaggctgtattcaccaccatttggacatctggatgacttgcctttggaaagtccttttgtattctaaatcgctcctgcatgttacctgttgtggaaaatatcaattttgccattacaaattatgcttttttttaaaaacatgttaacttttagagaaataatttatatttgcttatctacttttaaaaatatacatatatatgccttttgttgcctaattagaggatatagttggttccaatgtcaagaacaatttctctgaaatgtagtcattaaaattattcccatgtctttcattttccaggccccatcctattcgaaatacctgtttcttccaccaggctgatgtagtcatgcttaggcttggctgcacattggaaacacctgagtagctttaaaaactactcattaactgggtcttactcctgcagtttctgacttaattggtctggggcctggtatcaggaattattttttaattcttcaagatattttaatatgcagcccacattgggaaccactggactcaagacagtttgttctgccaaatctttttatatttttcgtcacgttccccctgtagcctggaaagggacggtaacaattaaagaatggcagctaccacaggaaggagccaaaattatgccttcgaaggttagaggaggagaaaaaccaacacctgttttaccccgtccttggaggaatagcaagacactttaagaggggatattattttgttttctacaacaatttacaagcaattgctttggaacaaggtcaacggcctcattgggaataggcatcttagcttttaaaactgattaaattatacgttaaaggaaagcacattttaaaccttaatgtgtccaaaaggttggatggcaaggtttgggtgctactgccttggcagagacaaggcagggaccagggaggctgtgtgcatgattttaggaggtgagaaactcaggtgggaaggaattgcagaagcctgtggttcacctggaaagccggggagagagagaggatgtattctggtgacctaacaggtattgtgaataatgaatatgcttttccaaagcgatctggtctccctgttggagagcatcctgaaataacttaagaaatgtaccttgctttcaggtttcctgagagcatgagggcccctagacagagtacaaggtgtaattcagacagccagccagaaaaagaattaaagaatcagggcaggtgtggggatcctaacaaaacctaagcttttagtagtcagaaaactgcaataacacagaaaaaaaaaaaaaaaaaaaca

SEQ ID NO: 1439 - DNA, 1046 bp, Homo sapiens
  misc_feature (326)..(749): n is a, c, g, or t
  misc_feature (751)..(787): n is a, c, g, or t
  misc_feature (789)..(815): n is a, c, g, or t
  misc_feature (817)..(849): n is a, c, g, or t
  misc_feature (851)..(851): n is a, c, g, or t
  misc_feature (853)..(877): n is a, c, g, or t
  misc_feature (879)..(898): n is a, c, g, or t
  misc_feature (900)..(903): n is a, c, g, or t
  misc_feature (905)..(906): n is a, c, g, or t
  misc_feature (909)..(910): n is a, c, g, or t
  misc_feature (987)..(987): n is a, c, g, or t
  misc_feature (1028)..(1029): n is a, c, g, or t
  misc_feature (1043)..(1043): n is a, c, g, or t
  misc_feature (1046)..(1046): n is a, c, g, or t
ctggaacgtggaatttctctgggagattccatgcagaggccactggggaggtggcaggcatgcatgtgactgtaggtggctgcagtgttggaaggctcccagcagagcagagagggtgtcagtctcatcagggaacccacctgatggcttctcagccagcagtctcagaggaacatagacgactgctgagaaaggagggaggcagcagtggtcccagcacctgaggcatcctgctgtcatgggaaggtctccgcccaaatgtcagatgcatcagcctgtcacccgctggtccagagctttcagctgtactggtagggggtgggtgnnnnnnnnnnnnnnnnnnnnnnnnnnnnnnnnnnnnnnnnnnnnnnnnnnnnnnnnnnnnnnnnnnnnnnnnnnnnnnnnnnnnnnnnnnnnnnnnnnnnnnnnnnnnnnnnnnnnnnnnnnnnnnnnnnnnnnnnnnnnnnnnnnnnnnnnnnnnnnnnnnnnnnnnnnnnnnnnnnnnnnnnnnnnnnnnnnnnnnnnnnnnnnnnnnnnnnnnnnnnnnnnnnnnnnnnnnnnnnnnnnnnnnnnnnnnnnnnnnnnnnnnnnnnnnnnnnnnnnnnnnnnnnnnnnnnnnnnnnnnnnnnnnnnnnnnnnnnnnnnnnnnnnnnnnnnnnnnnnnnnnnnnnnnnnnnnnnnnnnnnnnnnnnnnnnnnnnnnnnnnnnnnnnnnnnnnnnnnnnnnnnnnnnnnnnnnnnnnnnnnnnngnnnnnnnnnnnnnnnnnnnnnnnnnnnnnnnnnnnnngnnnnnnnnnnnnnnnnnnnnnnnnnnncnnnnnnnnnnnnnnnnnnnnnnnnnnnnnnnnncncnnnnnnnnnnnnnnnnnnnnnnnnngnnnnnnnnnnnnnnnnnnnncnnnngnnggnngccgcccgcgccggccgcccgccgccgcccggccgcgcgcgcgccgccgcggcgcccccggggcgccgcgcgcgcgnccggccccccgggcgggccgccggccgccgcgcggccgccnncccccgccgccccngcn

SEQ ID NO: 1440 - DNA, 471 bp, Homo sapiens
tcctgttctacagctatggccgggccagctgcagctttccgccgcttgggcgccttgtccggagctgcggccttaggcttcgcttcctacggggcgcacggcgcccaattcccagatgcctacgggaaggagctgtttgacaaggccaacaaacaccacttcttacacagcctggccctgttaggggtgccccattgcagaaagccactctgggctgggttattgctagcttccggaacgaccttattctgcaccagcttttactaccaggctctgagtggagaccccagcatccagactttggcccctgcgggagggaccctgctactcttgggctggcttgccttggctctttgagctcccttttgcttaattactgggttttctgggcagttttttttttaaagagttggagtaagaagaggattaaaaaggaaaggcaaataaaaaaaaaaaaaaaaaaaaaaaaaa

SEQ ID NO: 1441 - DNA, 1792 bp, Homo sapiens
acttccggcgcactgatcccgcctggggccggctgagtggcacttaagcgggccatgccatgcaaccttgggcgctgccaaccgtgggcgagctctgggtgtgcgggcggcctggcgcggcgctccggtaaggcgtgtgtgcggcagggcggggacagaaccgtcctctcgggctctgggcgtgtccgagaccgcgctccccgccgaaatcaagctccgagtcatccgtgtggggcattcgtcccccctggcacagttggcctctttccagaagcccgttttgtttgttttacgtctaaattcgcgtcggttcttatttctctccctggcaaggtctgaagacggatggagtctagttctgtcgcccaggctggagcccagtggtgtgatctcagctcactgcaatctccacctcctggcttcaagcgattcttctgcttcagcctcccgactgtgtcagcgtgttatgatgccgtcccgtaccaacctggctactggaatccccagtagtaaagtgaaatattcaaggctctccagcacagacgatggctacattgaccttcagtttaagaaaacccctcctaagatcccttataaggccatcgcacttgccactgtgctgtttttgattggcgcctttctcattattataggctccctcctgctgtcaggctacatcagcaaagggggggcagaccgggccgttccagtgctgatcattggcattctggtgttcctacccggattttaccacctgcgcatcgcttactatgcatccaaaggctaccgtggttactcctatgatgacattccagactttgatgactagcacccaccccatagctgaggaggagtcacagtggaactgtcccagctttaagatatctagcagaaactatagctgaggactaaggaattctgcagcttgcagatgtttaagaaaataatggccagattttttgggtccttcccaaagatgttaagtgaacctacagttagctaattaggacaagctctatttttcatccctgggccctgacaagtttttccacaggaatatgtatcatggaagaatagaggttattctgtaatggaaaagtgttgcctgccaccaccctctgtagagctgagcatttcttttaaatagtcttcattgccaatttgttcttgtagcaaatggaacaatgtggtatggctaatttcttattattaagtaatttattttaaaaatatctgagtatattatcctgtacacttatccctaccttcatgttccagtggaagaccttagtaaaatcaaagatcagtgagttcatctgtaatattttttttacttgctttcttactgacagcaaccaggaatttttttatcctgcagagcaagttttcaaaatgtaaatacttcctctgtttaacagtccttggaccattctgatccagttcaccagtaggttggacagcatataatttgcatcattttgtcccttgtaaatcaagatgttctgcagattattcctttaacggccggacttttggctgtttcctaatgaaacatgtagtggttattatttagagtttatagccgtattgctagcaccttgtagtatgtcatcattctgctcatgattccaaggatcagcctggatgcctagaggactagatcaccttagtttgattctattttttagcttgcaaaaagtgacttatattccaaagaaattaaaatgttgaaatccaaatcctagaaataaaatgagttaacttcaaacatttcagaaaacaaaaaaaaaaa

SEQ ID NO: 1442 - DNA, 601 bp, Homo sapiens
gcacgaggcgccagcggccttgaaggggtggtggtcgacgggcaagtagagaccgagaggttctggaggggcgaccggcctggcacagaggggaaggaagagagcgggatgctaagtgccgtctggggagccggagggcccggggcgggcggggctgctcgaggacagccgagcagaaaagagttgctgctgaggtaccacctttggagccgccctcgctgcctgtccttcccgctgggctcactccccgcgtctctcctggggcttcctggagccacttcccacaggagctgcttgtccccaaatcttgcctcaggacttgctgccaggggaacgcagactcagagcgtcctctttggagaagtaaggctgcctctggacggaggagtgaggggggcgaggaaacgcagaaaatgaaagcacaaccagtaccttctcaggagcgtggggaggccaaccacccgggcagagcaaggagagaatgaggagtgacatgggtgttgccgtgagtggcgaaggggatggaagatttcagcacgatgctatttctaacaagtttcagcattccagtatctcttttcacaaataaaacatttactaa

SEQ ID NO: 1443 - DNA, 6260 bp, Homo sapiens
atgaattgtctgaagggacctcccattccccaaaaccaaaacggcaccttttccacaagggacaagaaacttttaaagagtcgcaaggttagatttcaggagcccttctatgggccatatcttttcctgtcgtccccaaatagctcttattgttcacacagcccaggagagacgttttggagtagcgtgtccgggccttttgggctgtttcacagccttaggaggctgaactcccagaggggtgacgaggacaaagctgatgagatccagaacctggataatatggaagaagaaaaatgggtctccggggcgggccggagcctgaggaagaggaaggggacgaggacaacgagcgactgggcggcggaggacgaggaggaggaagaggaggccgagcaacaagatggcccctgctgcaggagcagcctcagcagcagcaggtgggaggccggaggcggtgctggcggtggcggcggcagccgtggcccggcggcctgggacagaatcagagtcaacggtggcctcggcggcggcggcggctgccgcggcggtggcgacggccgcggggactcggagctgagaggagctgctgctcggaccagcgcggtgagcgagcggcgggcggcgacttggggagcggggctgccgcggccggggcctcagtcgggaacaataggcagctgtggtcgggaagggtttgtcctcgcccgccctctgctcctccgcggcagcggcagcccggccggccccaggctcctcagggcccccgccggctgttctggggcttgtcagtggccggcgtcctttaggcctcaggcctctgcatgccgcctgtagggcctgtcggggtaggtaggccgagaggaggacgaagggaggctcggacgagagggagggggcgaaagggctacctggctcctgtggtactcccagggcctgggccaggcggggaatgcgcacgggaactgctttttggacccctagtctgtgggggtgggggagggcgaaggcgtctgtaaacaggcgccgcctcggcctcccagcacctcagggctgcttcctcccccagcccctgaagcgctccccttctttggccaagtggatttcacggtgtctgtttccctgaagtccctggagatctagcctggtagtcttctccctgctggcgatgggaaaattgtgtgtgtgcaggtgtctttaaaaaaaaaaaacaaaaaacttaaatgcaacaaaaacatataaaatgtggttatcggtaaaggatggagtggtaagggatgcgcctctctaaacatctctaagtatcagttctataaacatcagttatgcccgcatcccaggtgagagtggattgaaacaagggctcttttggaacagtaataacacaactcttgacataccagaatagcctatgaaactggaaacaaacactggcaacgcggagacaaactgtaatgtttaaagaggacttttattccagctaggcgttttgaattactaacatgcagtataagaagcaacattaactagcataaagtggacctcaggaagcacttcgaaaggagacaggtggttcatctccggccatagagcttcttgtgccttgtctcgtgtttcagtaatttttcctgaaattgttcaagaccagtcttttctctgagtttgaaatttgatttcgtttttgttttgttttgcgacggagtcttgctctgtcacccaggctggattgcagtggcacaatctcggctcactacagcctccacctcccggattcaagcgattctcctgcctcaccatccggagtagctgggattacaggcgcccgccaccatgcccggctgatttttgtatttttagtagagacggggtttcaccatgttggccaggctggtctggaactcctgacctcaagtcatctgccctcctccgcctcccaaagtgcttggattacaggcgtgagccacctcgctcagccttaaacttaatttttcaaggcttctaccacattttcttacaagtgagggaaaaggtagatttatttctaaagtactttctacctaggtatgcagaaatttatattaaaatcgcttggatacatccaaggagattgcttttcacttgttaacattcaactgcaaggcctaagggttataggttgtgttcttttcagcactgacctgtgctgaaaagatgccagttaatatctttcacctcttctaagggtaaatttctaagtagaattggtccaagtctgttctaattaaaaacattataagcagcactagtctagttcttagttcttccacaacaattgacactgaatagattagcaattgaataaacataaaggttgaattttcttgtttaggatttgaagtatagtgaatgaatatcaatactgaccttcattttatgcttagcataaataatgttggagatgttttgattttttgaatgatggagaaataacaactttctatggctcctgatgttgtgacttttttgcagatatttcagaaaggacaccgtttttcaggtgctcaaatctgtgatttttttttttttttctgtgctaattttgttaggtcagcacagattccaagtaaagtctgtgttataatgatacttaaatttatgtatggccctaaacctattagaacaattgtagtaatttataggttgtaagttttaagtggttcatgtgctgtgttatgaaaacaatctcaccgtgttatgtcaagggcagatttacctcatatttaatatcattttcctgaaaataaatatttttaagtggtaaggttttgtatttcagattggttattgacccagcaatttatgggcttagtctgggtccgtatttctgttcaataggaaaaaaatttagggaattgtttttatttattttgtgtcaaaacagttttaagttttgacacaaactcaactgtcccttcttcagtatcaatacttattacttaagttcacattttctcaggtaataaaaatttacttctaagaagttttggaaccagagcttaagaattagatttatattttcttggtaatattaaaagttaatatatgcttgatttatttgaagaaataaaaaagggtaatttgtacacaacgcctttcagaacatatttgttgaatgaataaaaatatttaagcttcctcattatgctgcagtattagttctgttgtcctcattttttcatatgaagaatgtgaagctaagagtagctatgtaaccagcaaaaagatcacataattaataggtaaaagagcttactcagactcagatcttgtgacacaaattagattctttgccactaccacatgtgtcacagttaaactttgaagcatcttctgtgttgacagattcctttttttgcctgtgaacttaccctattatcattatttgtatcctgtcagatatctacttgtaagaccaagaaagtatttgttcatgtgaatcacaaaagaaacacttaaatttttgtttttagcatatctgaatgctataaaatataaaaactcatactgtttacataggacagatttatcatactgctgtaattgttttcatggttaatttgttacataggcaattactaaattgtgcctttgaaatactttataaatttttttaaataattaaagatattcaatgatgttaaagttgggtcagctaatatttgaagttcttaatttataattttttttctttaagccatagataatttagaattctgcagtatttttcatctccagatcttagggcttgaaatggattctgatgggtctaatcagtccactcttgcatatatcttgaaaatggtcagcatccaacaaagtgaagaataaactgataaatgatccctgtttggtgaacacctcagatcaggatgttccttggcagggtattctgacctggtttagctttggccccgtctgtgctcagggttcaggtattctgcaggattgggttcagagggattaaaattctcagattggcctgtatcaaaacagtcacagattttggtcagccttttcccagaaccgtctccaagattttttcttttgtgtaattctggaatctaggctggatttggactagctttagaggttatgataaaagattaattttgtcaggcatttatacaaaggaggttttcttactacagagtttcttaaggtagattccttctatttttgaagtgtgacatttaccaatctgaagtaatgttgccctacatcccccagacacttaactttagcatatttatttctgtccatttttggtcaggattgtgcctgtttacttatataatattcttgtttactttttgtttattagatacttcttattagtttatattgttttcctgattgaggcttggggaaagaattttcctcaaatttaaagtcaccttacttatttgcagatgtatgtcagagcaatattcttttgacagttatcaagcattttagcaatgctgtatgtatatattatgaatgaatgacagagtcactcatggtctgtcacccaggctggagtgcagtggcattatcatagctcacttcagcctcaaactccttggtttaagtgttattcccgccttacctggctactttttttaatttttattatttttatagagatagcattttgctgtgttgcccagggtggtctcaaactcctgggagcaaggtgatcctcccacttctgcctcccaaagtgctgagattacaggcataacaatgttttaagctgacactggtataccttcactgattattactgtgcacatgtggtaataatttaacttataagtgcattttatctaaaaaatttccaagatctaaatagcatttgaacatggtagcagtttttttttttttttttttttttttttgagcaagaaaagagttctaaaggggtcagttttatctacagattaacataattttttttattgaggttaagtcacataacattaaccattttaaagtaaacagtttaggtggcactttatacattcacaatgttgttcaaccaccagctctaattccagaatgtgttcattaccccaaaaggaaacactgtacccattaagcagttactctgtattcccctcttccctaatccctagcaaacgccattctgctttctgtctctaatttgagccaacatcgaggaagagtactctgtacaattgaaattgcagaaaaaactttgggatgtgattgttaggaataaaaaaccacctaattctttgcatgcttctctaagtacagtagacatgctgccagggactctttatggaagaaaagttgagactcatagaagtttgcagttttgttttgatcaccccagagggttttgctcaaactcttagactcatttgtatttcttcattgggttataagaactaaaatttaatgttctatacaaatgtgaacaactaatacttggtctcctatctagaacttgtttgccttttaggttttcttaatgtatagaagaaactaggaatattcacaaaggatttatttgaagttacactgggaaacgatttttagaatttgaagctctttgatccctgtgaatctaactttatgactattttattcagctaatctttgagaatatttagagttttgatttgcgtggcactctgcttttaatcccttgttgaataagtgttagaaaccttgatcttggccctatacctgatcacctctaaaaacatgaacagtgttacaaaggcagttgtttagtaagcttttttggattgttttaattggctgactgagggagacaaaattagtttttttttttctttctagaataaagggtaataaacttggactttagagttactgctaagattgacatttccatttggggctttagaaatatattgttatcttaaattcaaaatggtactttatctaattgaattgaaatcttaaaatttatgagaaacaaaagtcactttatgttcttagtaaatatttctaatggggttataggagatctaagtacaaaaaaaatttaaaattttgttattaatctcccctccttaaggaaaattttattaatatacataattataatttagttataagaacaacttaagttgagtacagtggctcaagcctgtaatcctagcactttaggaggccaaggcaggaggatctcatgaagccaggagttccagaccagcctgggcaatagagtgaaaccccacctc

SEQ ID NO: 1444 - DNA, 4702 bp, Homo sapiens
gaggccgtctcgcaggctgcggcggccgcgggagaggcgtactcggcggcggcggagcgggcggcagagcagggcggcggcgactcgcagggtaccaccatcttaaggacagaaaagctacaggactctaggaggccaccgtcctgatttgggaagtccaacttactttggccagacagcagctaagctggttcatcccatcagcctggattggtgaaactgaatcacaggagatatttccaggtttgctgggatgggaaacctgctcaaagtccttaccagggaaattgaaaactatccacactttttcctggattttgaaaatgctcagcctacagaaggagagagagaaatctggaaccagatcagcgccgtccttcaggattctgagagcatccttgcagacctgcaggcttacaaaggcgcaggcccagagatccgagatgcaattcaaaatcccaatgacattcagcttcaagaaaaagcttggaatgcggtgtgccctcttgttgtgaggctaaagagattttacgagttttccattagactagaaaaagctcttcagagtttattggaatctctgacttgtccaccctacacaccaacccaacacctggaaagggaacaggccctggcaaaggagtttgccgaaattttacattttacccttcgattcgatgagctgaagatgaggaacccggctattcagaatgacttcagctactacagaagaacaatcagtcgcaaccgcatcaacaacatgcacctagacattgagaatgaagtcaataatgagatggccaatcgaatgtccctcttctatgcagaagccacgccaatgctgaaaacccttagcaatgccacaatgcactttgtctctgaaaacaaaactctgccaatagagaacaccacagactgcctcagcacaatgacaagtgtctgtaaagtcatgctggaaactccggagtacagaagtaggtttacgagtgaagagaccctgatgttctgcatgagggtgatggtgggagtcatcatcctctatgaccatgtccaccctgtgggagctttctgcaagacatccaagatcgatatgaaaggctgcataaaagttttgaaggagcaggccccagacagtgtggaggggctgctaaatgccctcaggttcactacaaagcacttgaacgatgaatcaacttccaaacagattcgagcaatgcttcagtagagctctgctcaaagaagaggatctatgtgctgacctcagaagatgtatatgtttacataatttaatacagattgatgttaatacttgtgtatttacataaccgtttccttcttgtcactgaaatatatggaccttaatttgtatcctgactgactcaacccagcagagcataaattgacttgagagccttacctttgatgtctgaaatgaaacccccttctccaaaggcaaaattcggagactttgatctttgctactggagtcctttaacaacatctataacgataaaaaattcctaattgtttgtggtagtattttaattctagatgtgttatctctctgggaagtatagtttatagaaacacaaaatatttgatttcctgtgtcggctcagctacaagaaacacaactgttatcttgacagaggaagagaggaatccaagaaaaatgcatgtggagaattaaacccaagtgtttcgaattcagcacaccccctctctgtcctcagactgcagtccacacgtgcaacttttctgtttgcacgtgttttattaatcagcatactccttttctgtttggatttatatccctctaatgttctcctttaatttcacatgaaaaaaaaatctcctgtatttttttcagttagtgggagagcagcagaaatagatagatgtgctgttgccactggactgatgaaggtggctgtcttggaactgggagacaggtcctcagaggtgcactcaggcaacaggacagccatctctctgcttcagccctctgcctacagggattagggaaatggagctctggctttgaagttatttgtgagtttagcaaccttccagttacctgcagagttctgggtgcacagccacccctcataagagccctgttctctgaagaccattcatatgagaacaaaggtctaggatactgcattagttaccagaaaactaggggaatttagagggaaaaaaaatccatgttttctatttcccaggtttttaaaaagtagctcttccccaaccccgttgctagcttgttgcaatataaaagccctggtgcacctgaatttactcctggccttactaatgattcataatgtgatcttgagaaatgtgtttaagctttctgagtcttaacctccttgtctctaaaatgggcaattaaaacaatcttcaagagccctgtaaggttaatgccgataaaatgactgactccgcccttcttccttagtacgtagtatccagcaagcatttgccccaccttgtcttgttgatgaacaatattatgaagcctgcagtcattctctctgtacatcagagcttagttcgaatggaatcatgaaaatctctgattctgacctcctaaggaaaaatgaaacccagaggatgtggtcatacaggatggctcccatgtgggcctagaacccaggatgcttcactcttgactccatgctcttccttttataccatgtggctgtgaatacatactatgggatgggattcaacccttctaagtaaatcctcagtctggtctatattgttacttgcctgtttccactagaaggagtcacccaggcatttagtgaatgataatcctagaagttgagtctgagtacatcagagtttggcattatttgcaacatcccaggaatgagctataagactccattgctttctggactttagtgaccagctgatcttcccttggatcctccaataaaggggaaaaaatacttgtcttatgttgttttagcaagggagttcagccaagtgacaggaaagattccctggtctgcatctaaacattagtcaacagaaggaaaaggctcttttccttggagattttcaagttgaaaaagtacagctgcttggatggagtttctctcatcagaatagaaatatgctaggtggtcttcaagacctttttgaacctacagattctaaaccttagaggaagccagaatatgtgatcataccaggtgaggaaagttaggagatattcatcttaagagatatcctatttggcagtcacatgttacacttgagcaacaattgtctaggctagaaatatagaaccacacaatatttatcatcattgggtcaatttctccccctctatcaagtgaggagattaaggcttaaagaaaggaaaggacttgccagccaccacagggctcatgaggggcttgaacccatgtcgtgtgtctctaccacagctgactctcagctggctaatggagaaaatgtgaggaattacctgtcaaattagattgagctcagagtaaatagatgagcacatttataactctaaattagactttctatcaaatgggaccaaacatatggaaggggctgctgtcctgcctcaatttagccaagacttgtcttgtctcaaagccaagactcagcagtacatggattctgagaagtccagggtctgaattgttgtctctgattactggaaggacaggttaactgaatgtctgtgatcactaacaggtgatgggctttgtgcccactccagagatattgtgggagacaaattcttttaacagcctgtcctcccggcatcaggagtcattgaacaatcatggattgttgtgtttgggatttttttttttttggctttgtttttggtttttgtgtgtgtgtgtgtgtgctgcatgcacatgcgtccaagacttacgggtggtttaggggaaagtgctagcaacagtgtcaatgtcattgttaactatatttcatatttgaggtctcattgttttcaaataaacagtgttttccatgactgagatatttatttttgggaaagcaacgaggtaaaaattatgtttctcagatgcactgctactttggcgttattactgtgttctcagaaactcgttgtgcaccactaggaattagtagtagaaaaaaaaaaacaataacaaaaaaaaaaaacaactggaaatggatgtcttcacattaggggtggagtattaacaaccagaaagaaagtttggatattaccttttaactactagttaacatcatgcttgatcaacatttgctcctagttatcaccattaaattaagaccttaatggtaaactgaggttactgatgcatcatcacatttaagtaaaaataatttcatgttttccccaaagaaaaattaagcctcccaatcttaggatccaattgtgcagtagaattcagagacttctcattcaatcttgtatcctatgcagctacaaatattttttaaatgttagtaataaacattggaattttgtcttaaagagttcaaaaccttggaacccagttttctcactacgtctataaaggccattacagacccaaggctgttttgcagttttcatatgttgtttgctgaagtcattgtaattttttttgcctgctttgcctttttttctacaggagttttgagtgtgaaatgaaaattaaagtttggtacatatatttaaaaa

SEQ ID NO: 1445 - DNA, 553 bp, Homo sapiens
atggggtgcaggctaacgcggggagccggccaggcctcgccgcggcgtccatcttggatactggcagtccgccaggcctgcaacggctgccgagggtcgtgggatgcgctcgccgcgtccctgctcaggcggagggagcccggcccgccgccagggtctcgagtccgggtccaggcaggcgtggaggtggcgggaacggcgcaccgcccgggtgggcgttgttttaaggccgcagggcttgggaggcttgtgttgagttacaggagtatgacaacttttcaacttgagtgcacacactgtccccggaatcccgcgttccagggaggaagcgcctttgacagcgcgcgccggttcgtggggcccgacggcgtgggcctgtggttgcggacctggcggagatgcgcgttcgcttcgattgtaggccattccttttaggagctgagaaaggatccgtttttacagcattctcgacctgtgattcttggtgggggaaactagttatgtggataaaaatacagttagcaaaataaaaatgccaattttacatttcctt

SEQ ID NO: 1446 - DNA, 2183 bp, Homo sapiens
gtacatttatgaattattttacccgattggaaaatggctactatatgtggaaagtagaggggaagagaaatgaacttgtgaattatctactctattctaccaaagaaagatacatatatcatttcagggttttccaaagttgggatgcaaaggatcatgtttcattttaatttatgtatttatttttgagattgtcttctatgtattgcaagtgatactggttttaccatgcactgtaccactacgagggttcctttcaaaacacattcatataaattaaaaaatcagtttaaataaaaacatcaagtcaatagtagtacatagatatgataaaagtttgcaaaagtggcacaggaatagtcattgggtggtgatgttccctgatttttttagtccctgaagcacccagcgccaagggtactgttcttcctgcttaacacaggagcaaacagatgctcacaccctgcccaagaacacagaggctcagggactgaaccagaagaaatgatccattaaccatgtaaatgaacagagagcctggatgtcagagtgaggaggccagctcgggtcgctgtggagaaagagatgggctctccctggaatccctgcagctgcccttagaggctgtgagccatcgtggctagggcatctttagagaactgaaagtcaggccgattcctggagagtgaagaatagcacacgtgccttcaaaacagtgtcagtatcctgtcccttacggacgtcatattgttggtgggttttcctgggtgggagatcacccagtatctggttggcattactgatgggttcccagagctgtcttttggttcaaagtcctgccctcggtcccagctgcccccagcacaggtgtcaccttggagtcaggggcgggtttgtcatagcccatgggtcctggccctgccctttatcatgtttgacatgattttcagtctacttttccttcaggatgtaatttagaaaatatgatttcagaattgtgaaatttaaaaaccctagaaaacctctttgctttgcttgtaaatagcagttgatgcagccctgtggacaggcgggaacagccatgtgacgtgggcactgagatgatttgggagattgaatgctcctcagtggggctagaggccacaggagtgataggttactgtaaagaaagcaaaaaagatgcaaaagcctacatgacaaaccaggcacgacacaaaggagaggcttgagaagaggaagtgaaggagggagaggattccacaagaccgaagtgcccaaggagacatggagggaagagagggctcttcacagagctgagtttagagaccaccctccatggttctggaaggaaaccagccagctttcatatgtggtgacaggctgttcattaatttgtagtgtacagcattaaataaatgaagtatgtagagaacattaggaaacaatataaaaaggtaggggaattcgtggataaagggaataacctgggtaccatatttcatcacattattccatgggaataagtcatcagtgcaaaggactgtaaggagtgcacagcaggaaatgaaaagacagaagcagtggggccgagaggaggaaatggagttgctgaaatgcagggtgagcagcaggggcggagagtgccctgtgggtaaggcacatctcagaagggacaggtccaggccctctcctccctggcctggagcttctggcaaggcttttcttctctgagcctcactttcctcttttgaaggtggcaatagtaactgaacctgcatcacagaatggccttgagggttagatggaacatatatagacataatttgttgaagacagagtagcaaagacacaaagtaaaaaggacagaaaaaagaaatgcaacttgtgcaaaatagaactttcaaagatttacaagaagggtaaatgaagctatcgtagcttcacttgggaaaagggagagaacagatgaccagcaccaaggatagaagagggatttcttactttaaaaaaaatggtccaaagaataaacaaactgaaaacagccaaaagaggaaggaagaatttgttagaatagggcaagactaaaggacagagtaagggtgctggccgccacctgactcaagttcaagtcgagctgccactgttgaaatttcaaggagaaatggtgagaagctaaaagatgc

SEQ ID NO: 1447 - DNA, 2753 bp, Homo sapiens
ccaccacccctgtcctcctcaggccccctccgcctccacccctgccctcctcaggccccctccgcctccacccctgccctactcaggccccctccgcctccacccctgccctcctcaggccccctccgcctccacccctgccctcctcaggccccctccgcctccacccctgccctcctcaggccccctccgcctccacccctgccctcctcaggccccctgcgtccccgcctcgtcctcctcaggccccctccgcctccggctccgtcctcctcaggccccctccgcctccggctccgtcctcctctggccccctccgcccccggccccggccccacggcgggatgcgggacaacaccagccccatcagcgtgattctggtgagctcggggagcaggggcaataagctgctgttcaggtaccccttccagagaagccaggagcacccggcgtcccagacaagtaagccgcgtagcagatacgctgccagcaacacgggcgaccatgctgatgagcaggacggcgattccaggccaacgcagacccgtcagtgataaactgtctgcataacctgtcccgtcgtatcgccaccgtgctgcagcacgaggagcgccgctgccagtacctcacccgggaggccaagctgatcctggcgctccaggatgaggtgtccgccatggctgatggaaatgaaggtcctcagtccccattccatcacatcctgcccaagtgcaagctggccagggacctcaaggaagcttatgacagcctgtgcacgtcgggcgtagttcggcttcacatcaacagctggctggaggtgagcttctgcctgccccacaagatccactatgcggcctccagtctgatccccccagaggccatcgaacggagcctgaaagccatccgcccctaccatgccctgctgctgctcagtgatgagaagtccttgctgggtgagcttcctattgactgctcccctgccctagtgcgggtgatcaagaccacatctgctgtgaagaacctgcagcagctagcccaagatgcggacctggccttgctgcaggttttccagcttgcagctcatctggtgtactggggcaaggccatcatcatctacccgctgtgtgagaacaacgtctacatgctgtctcccaatgccagcgtatgtctgtactccccgctggccgagcagttctcccaccagttcccatctcatgacctgccgtccgttcttgccaagttctccttgccggtctccttgtcagaatttaggaatcccctggcccccgctgtgcaggagacccagctcatccagatggtggtgtggatgctgcagcgccggcttctcatccagctgcacacctatgtctgcctgatggcctcacccagcgaggaggagccccgtccgcgagaggacgacgtccccttcactgcccgggtcggcggtcgcagcctcagcacgcccaacgccctcagctttggctccccaaccagcagcgatgacatgaccctcaccagccccagcatggacaactccagcgcagagctacttcccagcggggactcgccactgaaccagaggatgacggagaacctgctggccagcctgtcggagcatgaacgcgcagccatcctcagtgtacccgcagcccagaaccctgaggacctccgcatgtttgccaggctccttcactacttccgcggccgccaccacctggaggagattatgtacaacgagaacacgcggcgctcccagctgctcatgctgtttgacaagttccgcagcgtgctggtggtgaccacccacgaggaccctgtcattgccgtcttccaggctctgctcccctgagcccaggcggagggcggaaggctgctggggtgcgcaggtgggcgctcgcgtctccccaccccagggctccccccgtgctgaggctgagccctcttggccctgaggcctggcattgggtggatgcgggctggccgtggcccagtgaagcctgcagagccccgctgtccttgcccctggtggttccgctgtggggctgctgccctctgtgttcctacgcttccctccagtccttgccgcacgcgtaggcatctccacgctggaggggggcctgccaggactcctgtctctgggtgaggccgcatccttcaaggcccatgtgggctgtgcgtttctcagaccctccttctgtccctacacctgctccttggaccccccagtctgtggccaccctgaagaatgtgcagaaacacttgtgtggcctgtccctgtctctctgacagccttctatttgtgaagtgccctgtggccccctccccagcacctctgtctgccatgcgcttcttcctcccaggctaccctgagcctttcctggcccagtcctcaccacagtccacagaagccgcaaacaggctcatagccaagctgtgacctggtcctgaccatctggggcacgagggcctgggctggccctgctaggctggagaagccctgtcacctgtgcacatcttgctggtggaggcatggcccactgtgcaggaccccaccctcgggggctttcggctcccacactgatgattctccccagcatccacaccgggcctggcgctacgtactcaggcccccagctctcgtgtcctggaggaagagctagctccagacatgggttgatcacctagaggagctctggctaaggcacagttttctagaaataaaacatttattcggtttttaaacaattaaaaaa

SEQ ID NO: 1448 - DNA, 4394 bp, Homo sapiens
actttctgcgatattttggagggggtgactcgttagtgaggaaaccacccccatccctaaatcaaagcgccaggctcgttcccaacagcgctgtccgagagacactttgagagagacacgacacggagctgcgccctccatgggtggcttggggggattctgcgagccggagctgtccccctactctcctcagggactcgttggttcgcgccagcgccttttaagggcaccgtggggcgaaccgagcgctcagagctgctccggccgcggccctgggagctggaggaaccgcgactcagcaggcatgactggagagggaagtcccaatggtgctagaatggtgctgcagtggcagaagacggctcacaagtgaggtctggaagaacaacagggaagacatccatcatttgctccaaagtgtgcaagtcaaatcctggggagaatcatgataaccctgatcactgagcagctacagaagcagactctggatgagctgaaatgcacacgcttcagcatcagtctgcctttgcctgatcatgcagacatctccaactgtgggaactctttccagcttgtgtctgaaggtgcttcctggaggggcctgccccactgttcctgtgctgagttccaggacagcctcaacttcagctaccatccctcaggcctgagcctgcacctcagaccacccagtcggggaaactcccccaaggagcagcccttctcccaagtcctaagacctgagcccccagatccagagaagcttcctgtgccccctgcccctccatccaagaggcactgccgctcactctcagtgcccgtggacctgtctcgctggcagccggtgtggcggcccgccccctccaagctgtggactcccataaagcaccggggcagtggtggagggggtgggccgcaggtgcctcaccagagccccccaaagcgggtctccagcctcaggttcctccaagctcccagtgcctcttctcaatgtgccccagctcacagaccctacagccctcctttcttcagcctggccctggcccaagattcctctcgaccctgcgccgcctcccctcaaagtggctcctgggagagtgatgctgagtccttgtcaccttgcccacctcagcgccgcttctccctgtcacccagtctgggcccgcaggcaagccgcttcttgccctctgcccggagctctcccgcatcctccccagagctgccctggcgacctcgaggtctccgcaaccttccccgaagccgctcacagccttgtgatctggatgcccgcaaaactggggtcaagcggcgccacgaggaagacccccggcgtctgcggccttcgttggactttgacaagatgaatcagaaaccatactcaggaggtctttgtctccaagaaacagcccgggaaggcagcagcatctctccaccatggttcatggcctgtagccccccacccctctctgcttcctgcagccccactgggggttcctcccaggtgctgagtgaaagcgaagaggaggaggagggggctgtgcggtggggtcggcaggcgctgagcaagcggacactgtgccagcgggactttggggacctggacttgaatttgattgaggaaaactaaaactgagaggctacttcctggggccacacagactgactctctcatggctactaacaagtgtcgagtccccaaggctgggggccgagcctgggaatgggggtgagtggagggctccgactcagggcagctggaaatcttctcgctccagcaagctcgaccatgccaagagactggccgggacaagataaacggagctggtggcgggagggacagccccagagcagacccttcctatggcggccctgagtgtgagtatccctgccaccaagagagcaatgggcagggaaggaaggggtctgccgaccccagctcggggaatttcactagcccctttgcttcaaagggcacttgtgtcttagaatttggccagggtggggggttgagtcagcctcctcagagaaactgcgtgagagtgtgtgcgtgcatgggagtgtacttgtggaaaggtgtgtttgcgtagccttagggaaggaaggcaattgctccttaacagcagagtatcatgatacccccaggatcttgagttttttacaggatgttgggtttgctcaaggagtcaagaggagggcaccaagttttccttttttctaaatagctctggaaccaggcttgtaatccatagcatcaccgactctgcaaaggatttcattttggggtacagcagggtgttttaagtgctgtgacttcagctaatgatcttttcttcagccccaccccctccccactagctcgatctagtatattggggaatgcaggtggggggtgtcaccatattttttctgagctggcctttttttctcatcagattgtccaggctatattccacctgcctcttttgccctcttgagtagagttgcacacagcacatgggcaactgaagcagggttgaggggctctctctctctctcctctgctgatgggacccttttcccctcaccctctgcccttctaagtcatagactaggtaggaaggccctatattggtccccagcatctactgaggcagacctgcaacagaagtggcattcagtccccagcagacatgggtgagctcaccccagcactgctgttgggaaggtgactgcaggaaaccaattcttacaagatccaggcccagcctttttgacctgcttgagagggaagaaggggtgtttagcatttaatagtttgcttgtcttccactcctgccaggaagtgtttatttgcctctaattgggcctgagagaccatagggaggttggggctcactgagggattggctgaggatgtataaagcaaaggctgtgagaagcagttgggagtttggttgtcattggattgaatttacttttttgtttctcacccgcaacttgagccaggacagctggtccaagtggccacagtgatgggtttaagtaccttggtagggctggcaccagtggaaacacatactgaagctgccaccacaatagcttgtgaggttttatccagctgtggttagaccctgcatgaccaaatttgacctgcccttgtttatggcaagaagggcatttttctcttcaatttccagggtttcctaggacccagttcctcatgtaagggaggaagaccaaggtctttgtgttttcttcctcatggaattgaacctgacattttctggatctcctgcatgtcaggagcatcagtgaggcttcagcctcctcgtctccactccagagaggaggtggctatgtcttcttaagcctctggccctcagaggctcctccctatctcctggctagttaccactaggctaccaggtctctaggggcctgagagaggccctctagagaatccagggaaactgtgagcccaggagttgcccatctatggtttcattcctcccctggctcttctccctcttcaggccataatttccctggtgccaatttcttttcctcctggggcatcctcatcccagggctctctgctgtagattggctgtgccagcttccaacaggttactggcaatgccagtgagtttctgtaggccctaagctgaagaagtgaggcagtgattctgcctccatcctggtttccccaaagccccagggcaccatccttaggggagaaggtctacagttatcattattttaattccattactttcagtctggaaaactaagctagtcagaactgtcatcttgcttcccaatctaagaacctgtggccctggaacacttttcaagaattggttcattttgctttacacagtagatctgttccaacagttctgtgtaaaccaaatgctatttttcaatgcatttggactgctgaccatttaaaagcagcctatgattgcttctttttgtaaagcaagcaacctccctccactttagctgttttgactatttgaattttcacatattgggcttacccagagtggagcacacctccagggcatgtggctgacactgggtcaatgtctgcatctgtgctgtgtgtgtagtgtggttggccagtaggtgagtatccctgtgtgtgtgagtgaagccactccccaggctggtgctctcctcctgtgcccagtgactgcccagtggcagctcagctgcccttcactcccacctgctgccaaagtccctgtgctaatgggattacaaatacaaaaagtggaaaaaaattttcgtaaactttgttttatattaaaagaaaaatccataagtctgtgtgtgttaaacatgaggttctgcctctgtggctgtgtttgaaaaaataaagttttattagaataatccattttcccaagcaa

SEQ ID NO: 1449 - DNA, 2287 bp, Homo sapiens
gcggtgccagcccaggccccgcccctgggagggcgcttccggcacagcggaactccgggtgccggttgaggttgctggtggacctgctctggtggtcttggatgaggccccatgagcgcggcgcccctggtgggctacagcagcagcggctccgaggatgagtccgaggacgggatgcggaccaggccgggggatgggagccaccgtcgtggccagagcccccttcccaggcagagatttccagtacctgacagtgtgctgaacatgttcccgggcaccgaggaggggcctgaagatgacagcacaaaacacgggggacgggtgcgcaccttcccccacgagcgaggcaactgggccacccacgtctatgtaccatatgaagccaaggaggagttcctggatctgcttgatgtgttgctgccccatgcccagacatatgtcccccggctggtaaggatgaaggtgttccacctcagcctgtcccagagtgtggttctgcgccaccactggatcctccccttcgtgcaggctctgaaagcccgtatgacctccttccacagattcttctttactgccaaccaggtaaagatttacaccaatcaagagaaaaccaggacctttattgggcttgaggtcacttcagggcatgcccagttcctggacctggtttcagaggtggacagagtcatggaggaattcaacctcaccactttctaccaggatccttctttccacctcagcctggcctggtgtgtgggtgatgcacgtctccagctggaggggcagtgcctgcaggaactacaggcaatcgtggatgggtttgaagatgctgaggtgctgctgcgcgtgcacactgagcaagtccgctgcaagtctgggaacaagttcttctcgatgcctttgaagtgagcaccagaggccttcctcctccagggccctctgcagaccaggctgagatggaggaacctgctaaaatcgatggagatgcttctagcctcccagtaggaggccccagccatgccttcaacctggcaggaggtgtagccactcctcatcctccctgagtgctgatattctctctctctctttctcttcctcttctttctctctcttctcctctctttctctcctctgtctctcttcctctcctctcttcctctcttctctcttcctctcctctctctcttcctcttctctctcttcccctcctgtctctcctcccctcctctcttcctctcctctctcttcctctcctctctctacccctcctgtctctcctcccctcctctctcttcctctcctctctctcttcctctcctctctcttcccttcctgtctctcttcccctcctctctctcttcctgtcctctatctcttcccctcctctatctcttcctctcctctctctcttcctctcctctctctctcttgctttcttctctctctcctgtctcggctgttgtgggttgcaggttgggtgctgctgttgtggtccttcccagaaactgccagtagagggcagcctgggcatcctaatgcttactctggttgttacacaaagaaaatattggggtcactggcgagcccacccacactcaccagaatctccactgtagtccccctaacaaacagcccttcacttcctctcccacttcagcaatttgtattttgatgccattggcctcagatcagagtgttttaaatcatcacgccctggcttatccctggtcgagccaggacacggggtgcttcagtgggtctgtcaccctctctccttgaagcatgttgcttttatttatttacttttactctcaccctgctcctgtaccagcaggggccacttcaaagccaaggtacagggtgataacttgtggtccagcatcagttttctccacttctttctcccactcacccccagcaaggtgcctggggagacttgagcagatgtttcattttggcctggccagtggctgaaagccaggcctccaatgcactgtgacctctggcttccccagcagctttcccagagaggcagaggggccttccacagcccgggttctcctgctgcctcctgcctgctgcagctgcaggcattctgaggggcaacgtggaggaagggccagggatgcatgggattttaattgtttcatcacaccttccccgtggcaaagaaacagtcagtcctcttcaggtgtcttctggatttctggtgatggacagagaaatctttttacagtttcaaattatgttcaacaaataaaaattgcattttttattttggatcttt

SEQ ID NO: 1450 - skipped

SEQ ID NO: 1451 - DNA, 1529 bp, Homo sapiens
aaatggggtttcccaaacaggcgtgtgtattggacgcctcgggcggagcgcgggctggcgccgaggaccggccttgcgagcggcgcgcactataaaatggcgcgtgctgcaacccgcgcccgcttcggagagagaaatgctggggtgcagcttcaagcttaggaccacccaccatgcctatccaggtgctgaagggcctgaccatcactcattaagaacagaggaggctgcctgttactcctggtgttgcatccctccagacactctgctgtttcctgcctaggcgtggctgcagccatggctaggaaagcgctgccacccacccacctgggccagagctggttctgctcctgctgcagggacactgagctggctatctcggcgcttcgggcaagaactgcaacaggctctcctgggtcctgcaggtgtacagccgggcccctgccttgtgcctcagctctcgagagctgctgctgccgggtgacctgatccaacctgataaggtgccatcttcagctaccactgcaaggccctgagggcaacagcagcacggcactgcccacccggctgctgatggcctggtgccagctgggagtcctcccggcacttcgaggccactgagccacccttccagccccagcccaccatggacaggggtatccagcttcctcctcaacctcgtcctctgcccctgagccagtgacgcccaaggacatgcctgttacccaggtcctgtaccagcactagctggtcaagggcatgacagtgctggaggccgtcttggagatccaggccatcactggcagcaggctgctctccatggtgccagggcccgccaggccaccaggctcatgctgggacccaacccagtgcacaaggacttggctgctgagccacacacccaggagaaggtggataagtgggctaccaagggcttcctgcaggctaggggaggagccacccccgcttccctattgtgaccaggcctatggggaggagctgtccatacgccaccgtgagacctgggcctggctctcaaggacagacaccgcctggcctggtgctccaggggtgaagcaggccagaatcctgggggagctgctcctggtttgagctgcattcaggaagtgcgggacatggtaggggaggcaaaaagccttgggcactaccctccctgtggagctgttcggtgtccgtcgagctagccacaccctgacaccatgttcaagggtaccggaagagaagggtgtctgcccccaacctcccctgtgggtgtcactggccagatgtcatgagggaagcaggccttgtgagtggacactgaccatgagtccctggggggagtgatcccccaggcatcgtgtgccatgttgcacttctgcccaggcagcagggtgggtgggtaccatgggtgcccacccctccaccacatggggccccaaagcactgcaggccaagcagggcaaccccacacccttgacataaaagcatcttgaagcttttaaaaaaaaaaaaaaaaaaaaaaaaaa

SEQ ID NO: 1452 - DNA, 2375 bp, Homo sapiens
aagtggcaccagcacttccggtacggaaaactcgctgctgccccaacctggcttgacaggcttggtctctgcaagtggctctcagccccttcttctttcctgcctcaccttccaattcgtttgccgccgccgtcccgcagctgctgtttccggagttgccccttccccatgttccggggcaggagtccgcaaagcgaagatccgcccgccggttcctcatcatgtccgaactgactaaagagctgatggagctggtgtggggcaccaagagcagccccggtctctcggacaccattttctgccgctggacgcaagggtttgtgtttagtgaatcagagggatctgcattagaacagtttgaaggtggcccctgtgctgttattgcacctgttcaggcatttcttttgaagaagctcctgttttcttcggagaagtcttcttggcgggattgttcagaggaagagcagaaggaactcctttgtcataccttgtgtgatattttagaaagtgcttgttgtgaccactctggatcatactgcttggtttcatggttaagaggaaagacaactgaggaaactgctagtatttctgggagtcctgcagagtctagttgccaagtggaacattcttctgccttggctgtcgaagagcttggctttgagcgatttcatgcattaattcaaaaaagatcgttcagaagtttaccagaattaaaagatgctgtcttggaccagtattcaatgtggggaaataaatttggagtattgctttttctgtattctgtattactgacaaagggcattgaaaacataaaaaacgaaattgaagatgcaagtgaacccttgatagatcctgtatatggacatggcagccaaagtttaattaatctcctgctgacgggacatgctgtttctaatgtatgggatggtgatagagagtgctcaggaatgaaacttcttggtatacatgaacaagcagcagtaggatttttaacactaatggaagctttaagatactgtaaggttggttcttacttgaaatctccaaaattccctatttggattgttggcagtgagactcacctcaccgtattttttgccaaggatatggctttagttgcccctgaagctccttcagaacaagccagaagagtttttcaaacctacgacccagaagataatggattcatacccgattcacttctggaagatgtgatgaaagcattggaccttgtttcagatcctgaatatataaatctcatgaagaataaattagatccagaaggattaggaatcatattattgggcccatttcttcaagaattttttcctgatcagggctccagtggtccagaatcttttactgtctaccactacaatggattgaagcagtcaaattataatgaaaaggtcatgtacgtagaagggactgcagttgtgatgggttttgaagatcccatgctacagacagatgacactcctattaaacgctgtctgcaaaccaaatggccatacattgagttactctggaccacagatcgctctccttcactaaattaatttgtctaagtatttataaggaagatcttaataacagatgttgaaagaaggagtcaagactggcaattggctggattaagctaaacactggtatcactgattaactgtaaataacaattaaaaacacattttcagtgtttatgatatgtttaaattatttgtcctaaagctttatgttaaagattatcctattttaccccttcgtgtgaaatttactagcaaaattaagctttcatcaaagttcatcacttttgcattcagatacttggtcatttacttaccaaattacaaacgcaatactacagcatttgtatattaagtatcacagttactattgataaactacttttgggttttatttcattgaggcactttttttattgtttgaatgattccggcttgtaatatatcagcctctacaatgaaatgcagaagagttcatttttctaagatctgtttttcattagaaatattgacaaataacacattgtcaacctggatcctttgacaatttacttaactctggcatgttcacaaaaagtagaaactctaagagaccattaccatttattcacagatgtataggggatgtattctaaaaactgacagaaaagagaatctgatagtcaacactgttaacttttactgtgtaattgccaaatacacttttccaaatttgtcccaacagccctgtaagccagctttcttctatatttataaacacgataaatgcatgagaagatctgttattacattagtatattacgttatttattatgatcctagttgatggcctaaataaacacctttttcttt

SEQ ID NO: 1453 - DNA, 1284 bp, Homo sapiens
atacgcagtattttggcccaggcacccggctgacagtgctcgaggacctgaaaaacgtgttcccacccgaggtcgctgtgtttgagccatcagaagcagagatctcccacacccaaaaggccacactggtatgcctggccacaggcttctaccccgaccacgtggagctgagctggtgggtgaatgggaaggaggtgcacagtggggtcagcacagacccgcagcccctcaaggagcagcccgccctcaatgactccagatactgcctgagcagccgcctgagggtctcggccaccttctggcagaacccccgcaaccacttccgctgtcaagtccagttctacgggctctcggagaatgacgagtggacccaggatagggccaaacccgtcacccagatcgtcagcgccgaggcctggggtagagcaggtgagtggggcctggggagatgcctggaggagattaggtgagaccagctaccagggaaaatggaaagatccaggtagcggacaagactagatccagaagaaagccagagtggacaaggtgggatgatcaaggttcacagggtcagcaaagcacggtgtgcacttcccccaccaagaagcatagaggctgaatggagcacctcaagctcattcttccttcagatcctgacaccttagagctaagctttcaagtctccctgaggaccagccatacagctcagcatctgagtggtgtgcatcccattctcttctggggtcctggtttcctaagatcatagtgaccacttcgctggcactggagcagcatgagggagacagaaccagggctatcaaaggaggctgactttgtactatctgatatgcatgtgtttgtggcctgtgagtctgtgatgtaaggctcaatgtccttacaaagcagcattctctcatccatttttcttcccctgttttctttcagactgtggcttcacctccgagtcttaccagcaaggggtcctgtctgccaccatcctctatgagatcttgctagggaaggccaccttgtatgccgtgctggtcagtgccctcgtgctgatggccatggtcaagagaaaggattccagaggctagctccaaaaccatcccaggtcattcttcatcctcacccaggattctcctgtacctgctcccaatctgtgttcctaaaagtgattctcactctgcttctcatctcctacttacatgaatacttctctcttttttctgtttccctgaagattgagctcccaacccccaagtacgaaataggctaaaccaa

SEQ ID NO: 1454 - DNA, 693 bp, Homo sapiens
gcacgagggcgaagtattctcattacctcatataatagtacatattattaacatgttttatcactgatgtttaccttgatcacctacccaacattgtacttgccaggtttctttgttgtgaagttacatttttttccctttccatactactcttttctttgaaagtaggtctttaagcactgggggtctcctgtgaccctggaaaactacctcaatagtcctcgtagctttttgtagattctttgagattttctacatagacagtcatgtcatttgcaagaaagaggcagttttatttcttccttttcaaatatttacctttaatttctttttcttgatttcccctggcctgagtttatactggttatctgcaggagaatttgttaggagctactcttccatcattggaaaccagaaatacctaaagagatacttttaaaataaagaaatagtaatgggactttaaattgaatttaaaaatgtgagtttactttgggttttcattttgactggctgaatctttaaatgttcggtgtattatttatactttgtagctttgctataacataactgatctataatagagaatttggtatatgttctatctatgactacattcaaagggttacgtaactataatatctttctaatatttctaccatttttcttacacatttacccaagaattttctc

SEQ ID NO: 1455 - DNA, 1122 bp, Homo sapiens
atgccaacacatgacatcttggagaagacagtgtaccgtgtcggggagcagggcagtggtttcgaggggctacgggtggaggggcgaatggaggagctctctggggcgatggcgcgcagtctgcgcagggactggcgggactgcgcggcggcgactacagacgtgtcgggggtccggggcctgtcgcggttgccaagcgctcggcgcctggcgctggcgctggccaaggcgtggccaacagtgttgcaaacaggaacccgaggtgttcacttcactgttgaaggaacgagagggcatctgctaaagtttcagattccatttctgctcagtatccagtagtggatcatgaatttgatgcagtggtggtaggcgctggaggggccggctttgcgagctgcatttggcctttccgaggcagagtttgatacagcatgtgttaccaagctgtttcctaccaggtcacacactgttgcagcgcaggtagaaaattatggcatgccgtttagcagaactgaagatgggaagatttatcagcgtgcatttggcggacacagcctcaagtttggaaagggcgggcaggcccatgggtgctgctgtgtggctgatcggaccggccactcaatattgcacaccttatacgggagggttggcttaacacttcttgccctttttttttctttcttttagtctctgcgatatgataccagctgttttgtggagtattttgccttggatctcctgatggagaatggggagtgccgtggtgtcttcgcactgtgcatacaggacgggtccatccatcgcataagagcaaagaatactattgttgccacagggctactggcgcaactacttgagctgcacgtctgcccacaccagcaccagcgacggcacggccatgatcaccagggcaggccttccttgccaggacctcgagtttgttcagttccaccccacaggcacatatggtgctggttgtctcattacggaaggatgtcgtggagagggaggcattctcattaacagtcaaggcgaaaggtttatggagcgatacgcccccatcgcgaaggacctggcgtctagagatgtggtgtctcggtggatgactctggagatccgcga

SEQ ID NO: 1456 - DNA, 1925 bp, Homo sapiens
acgcgctgtgcgccggaagagcacgcccagtccgggctgcgcggaggaagcgctggggtcccggagggcgggggtggcggcgccggaggtcgccatggctaccgagcccgaagccgcggagccggtggtgccttcgctcgtggatcgatacttcactcgctggtacaaaccggatgtcaaaggaaaattttgtgaggaccactgtatactacagcactctaaccgaatatgtgtcatcacattggcagaatctcatccagttcttcaaagtggaaaaacaattaaaagcatttcctatcagatcagtaccaactgtagcagacttcagaacaaggtctctgggaaatttaagcggggggcacagtttctaacagagcttgcacctctctgtaagatttactgctcagatggtgaagaatatactgtgtctagttgtgttagaggacgtttgatggaagtgaatgaaaacatcctccataagccatctattcttcaagaaaagccatctactgaaggctacattgcagttgtgttacccaaatttgaagaaagtaaaagcataacagaagggttactgacacaaaaacaatatgaagaagtcatggtgaaacgcattaatgccacaacagctacgtcatgaggattgacatggaacaaaaagcaaagtgggattcttgttacctggcctaaaccatcagggtactaaaggagaagaaccagtatatgtaaagcatacctaacagccagccatatgcaggggaggcctagtgcttcacttagttttccctctctgtcttcataatgagccttggttcccatttgtctacagcctgccagatctggcctgcccatgtactcacactgttctcttgcatctctctaacaactggcatgcaaggcatgtttttctgattaaaaacaaacaaagctctttgaagaagatttagaaaatacagaagagttttaagtagccaagtaaaaataatttacccatcatcccataatccagaagtaaatacatttgacccttgagcaacataggtttgaactgcaagggtccacttatgcatggactattttcaactataaacgagtcaaaaatatatcattaaccaaacacgaaacccacttatagagcaggttcatatactcaggttccaaagggccaactgcaggacttgagttctcacgtatggatttgggtatatgtggaagttcctggaaccaatcccctatgtaaaccaagggataactactacattttaacctacttctgtttgaacatatggtatggttattgcttttgcctcgttttcctaacagtttgaagtttaaaaaaacctaacccacctttcttacccagtcttctataatgtgcctaccaaaaagcctagtcctagcccatctgcctcaactcctctcccttttaggttgtagggaagaggccggagtgtagagtatattatatcttctgtcccccttatgccaacaagatggccttcccctctgaaacaaagtaaaactgcaacactgtgacttcttaaatgagggatatgtgaaaaggctatgaaaaatacaaaggctttcctaggaaatgtgttataatgcagcgggaagctaattcttgaaatatgcacattatagttactcagtctcacatactctagttactggcaaagaagttactgagaatatgtcattcaaaggcataggggcctttgaatggaacaaatgctttcacatcatttaaagtaaaaaaaaacctccaacaactgtgaatttatagtttaagagtgatttacactgaatttcaaataaaaggactataaaacgtgttatttttctgtaagggctataacatacatgtcaatatcactgtttttaaataaaatatacttttatacagaagaaaaaaaaaaaaaaaa

SEQ ID NO: 1457 - DNA, 206 bp, Homo sapiens
catgctaatgcggggaaactcccagtaggcgctgctgtccagggaaaatgatgggctttttcctctctccagttttggttaatgagaaaagaaagattagaaacttcaagtaggactgtgaacaggcttagggatcctggacagagcctagaaatctcaggagaactgagagctcttgaaatatgaagtgatgcttaaaaaaaaaa

SEQ ID NO: 1458 - DNA, 4007 bp, Homo sapiens
gccaaggcggccggctggagggacggggcccgaccgggagcggagccggagcggaagccgcagccgggcggcgggagcggcgggagcggcgggagcgggggaagcagggcgggccgggctccatggcgccagcggcgtccgcctgagcagcgcgggcaacagcggcggcgtcggccggatcgggccgcgacacctcctggccatgggggacgtgctgtccacgcacctggacgacgcccggcgccagcacatcgcagaaaaaaccgggaagatcctgacggagttcctccagttctatgaagaccagtatggcgtggctctcttcaacagcatgcgccatgagattgagggcacggggctgccgcaggcccagctgctctggcgcaaggtgccactggacgagcgcatcgtcttctcggggaacctcttccagcaccaggaggacagcaagaagtggagaaaccgcttcagcctcgtgccccacaactacgggctggtgctctacgaaaacaaagcggcctatgagcggcaggtcccaccacgagccgtcatcaacagtgcaggctacaaaatcctcacgtccgtggaccaatacctggagctcattggcaactccttaccagggaccacggcaaagtcgggcagtgcccccatcctcaagtgccccacacagttcccgctcatcctctggcatccttatgcgcgtcactactacttctgcatgatgacagaagccgagcaggacaagtggcaggctgtgctgcaggactgcatccggcactgcaacaatggaatccctgaggactccaaggtagagggccctgcgttcacagatgccatccgcatgtaccgacagtccaaggagctgtacggcacctgggagatgctgtgtgggaacgaggtgcagatcctgagcaacctggtgatggaggagctgggccctgagctgaaggcagagctcggcccgcggctgaaggggaaaccgcaggagcggcagcggcagtggatccagatctcggacgccgtgtaccacatggtgtacgagcaggccaaggcgcgcttcgaggaggtgctgtccaaggtgcagcaggtgcagccggccatgcaggccgtcatccgaactgacatggaccaaattatcacctccaaggagcaccttgccagcaagatccgagccttcatcctccccaaggcagaggtgtgcgtgcggaaccatgtccagccctacatcccatccatcctggaggccctgatggtccccaccagccagggcttcactgaggtgcgagatgtcttcttcaaggaggtcacggacatgaacctgaacgtcatcaacgagggcggcattgacaagctgggcgagtacatggagaagctgtcccggctggcgtaccaccccctgaagatgcagagctgctatgagaagatggagtcgctgcgactggacgggctgcagcagcgatttgatgtgtccagcacgtccgtgttcaagcagcgagcccagatccacatgcgggagcaaatggacaatgccgtgtatacgttcgagaccctcctgcaccaggagctggggaaggggcccaccaaggaggagctgtgcaagtccatccagcgggtcctggagcgggtgctgaagaaatacgactacgacagcagctctgtgcggaagaggttcttccgggaggcgctgctgcagatcagcatcccgttcctgctcaagaagctggcccctacctgcaagtcggagctgccccggttccaggagctgatcttcgaggactttgccaggttcatcctggtggaaaacacgtacgaggaggtggtgctgcagaccgtcatgaaggacatcctgcaggctgtgaaggaggccgcggtgcagaggaagcacaacctctaccgggacagcatggtcatgcacaacagcgaccccaacctgcacctgctggccgagggcgcccccatcgactggggcgaggagtacagcaacagcggcgggggcggcagccccagccccagcaccccggagtcagccaccctctcggaaaagcgacggcgcgccaagcaggtggtctctgtggtccaggatgaggaggtggggctgccctttgaggctagccctgagtcaccaccacctgcgtccccggacggtgtcactgagatccgaggcctgctggcccaaggtctgcggcctgagagccccccaccagccggccccctgctcaacggggcccccgctggggagagtccccagcctaaggccgcccccgaggcctcctcgccgcctgcctcacccctccagcatctcctgcctggaaaggctgtggaccttgggccccccaagcccagcgaccaggagactggagagcaggtgtccagccccagcagccaccccgccctccacaccaccaccgaggacagtgcaggggtgcagactgagttctaggccagtgggtccctgactgctgcacatggcacaggccgttcccttccggacccaggcaggctcagctctggggagggcaccctggtctgtgccttgtgggtggaggcggggcagggctgtgtggcaccgccagggagcgggcccacctgagtcactttattgggttcagtcaacactttcttgctccctgttttctcttctgtgggatgatctcagatgcaggggctggttttggggttttcctgcttgtgccaagggctggacactgctggggggctggaaagcccctcccttcctgtccttctgtggcctccatcccctcatgggtgctgccatccttcctggagagagggaggtgaaagctggtgtgagcccagtgggttcccgcccactcacccaggagctggctgggccaggaccgggagagggagcactgctgccctcctggccctgctccttccgcagttaggggtggaccgagcctcgctttccccactgttctggagggaaggggaaggagggggtcttcaggctggagccaggctgggggtgctgggtggagagatgagatttagggggtgcctcatggggtgggcaggcctggggtgaaatgagaaaggcccagaacgtgcaggtctgcggaggggaagtgtcctgagtgaaggaggggacccccatcctgggggatgctgggagtgagtgagtgagatggctgagtgagggttatggggagcctgaggttttatgggcctgtgtatccccttctcccggccccagcctgcctccctcctgcccgcctggcccacaggtctccctctggtccctgtccctctggtggttggggatggagcggcagcaaggggtgtaatggggctgggttctgtcttctacaggccaccccgaggtcctcagtggttgcctggggagccggacggggctcctgaggggtacaggttgggtgggccctccctgagggtctggggtcaggctttggcctctgctgcctctcagtcaccaagtcacctccctctgaaaatccagtcccttctttggatgtccttgtgagtcactctgggcctggctgtcgtccctcctcagcttcttgttcctgggacaagggtcaagccaggatgggcccaggcctgggatcccccaccccaggacccccaggccccctcccctgctgctttgcggggggcagggcagaaatggactccttttgggtccccgaggtggggtcccctcccagccctgcatcctccgtgccctagacctgctccccagaggaggggccttgacccacaggacgtgtggtggcgcctggcactcagggacccccagctgccgcagccctggtctctggcgcatctcttccctcttgtcccgaagatctgcgcctctagtgccttttgaggggttcccatcatccctccctgatattgtattgaaaatattatgcacactgttcatgcttctactaatcaataaacgctttatttaaagccaaaaaaaaaaaaaaaaaaaaaaaaaaaaaaaaaaaaaaaaaaaaaaaaaaaaaaaaaaa

SEQ ID NO: 1459 - DNA, 1071 bp, Homo sapiens
ggctcttcctcgggcagcggaagcagcgcggaggtcggagaagtggcctaaaacttcggcgttgggtgaaagaaaatggcccgaaccaagcagactgctcgtaaatccaccggtgggaaagccccccgcaaacagctggccacgaaagctgccaggaaaagcaccccctctacctgcggggtgaagcctcatcgctacaggcctgggaccgtggcgcttcgagagattcgtcgttatcagaagtcgaccgagctgctcatccggaagctgcccttccagaggttggtgagggagatcgcgcaggatttcaacactgacctgaggtttcagagcgcagccgtcggtgcgctgcaggaggctagcgaagcgtacctggtgggtctgttggaagatactaacctgtgtgccatccacgctaagagagtcaccatcatgcccaaagacatccagttggctcgccggatacggggagagagagcttaagtgaaggcagtttttatggcattttgtagtaaattctgtaaaatactttggtttaattggtgactttttttgtaagaaattgtttatatgttgcatttgtacttaagtcattccatctttcactcaggatgaatgcgaaaagtgactgtttacagacctcagtgatgtcagcactgttgctcaggagtgacaagttgttaatatgcaaaacggatgcgtgatatttcttgcttctcatgatgcatgtttctgtatgttaatgacttgttgggtagctattaaggtactagaattgataaatgtgtacaacagggtccttttgcaataaaactggttatgacttgatccaagtgtttaacaattggggctgttaagtctgaccatacatcactgtgatagaatgtaggctttttcaagggtgaagatacaaaccttaaccacagtgtaacttatagtttcctttaaaaaaaaaaaattaaacctggcagctatagaatacaatatgtgcatttataatagctattttatatattgtagtgtcaacattttcaaattaaatgttttacattcacaaaaaaaaaaaaaaaa

SEQ ID NO: 1460 - DNA, 3417 bp, Homo sapiens
acgggcggccggatttgcccggaggccgcacccgcctccggcggggctctcagtgaaaaatgtactctgacctgaatcctgaattttccttgatggtcaaaagattaagaaatcatgagtggaggatctcaagtccacattttttggggtgctccaattgctccactgaaaatcacagtatcagaagacacagcttctttaatgtctgttgctgacccctggaaaaaaattcagcttttatacagtcaacattctttatatctgaaggatgaaaaacagcacaaaaatcttgaaaactataaagtcccagaatctattggttctccagatcttagtggtcatttcttagcaaactgtatgaatagacatgttcatgtgaaagatgactttgtacgttctgtttctgaaacacagaatatagaatcccagaagattcactcctctagactgagtgatataactagctctaatatgcaaatatgtggatttaaaagcacagttccgcatttcaccgaagaagaaaagtatcaaaagcttctcagtgaaaataaaattagagatgaacagcctaaacatcagccagatatatgtggtaagaactttaacacaaatttgtttcagttgggccataaatgtgcagctgtgttggatttggtttgtagtactgaaaaaattaatatagggcctgaagtggtacaaagagagtgtgtgccaacagaatatcatgaaatacaaaaccagtgtttgggattattttcctcgaacgcagtagataagtcaaggtctgaagcagcagttaggaaggtctcagaccttaaaatatcaactgatacagaatttctcagtataattacctccagccaggttgcttttttagctcaaaagaaagataaaaggcggagtcctgtaaataaagggaatgtaaacatggagactgaaccaaaggcaagttacggggagataagaatacctgaagagaattcgattcagcttgatggttttacagaagcatatgaaagtggacaaaaccaagcatattcccttgaactttttagtcctgtttgtcctaaaacagaaaatagccgcattcacataaactctgataaaggtcttgaagaacatacaggatctcaagaacttttcagttctgaagatgaactgccaccaaatgagatacgtattgagttgtgtagctcaggaatactgtgttcccaactaaataccttccacaaaagtgctattaaaagaagctgtacctctgaagataaagtgggccagtctgaagctctatctagagtccttcaagtagctaagaaaatgaagttgatttctaatggaggagattctgctgtagaaatggatcggagaaatgtgtctgaatttaagagtattaaaaaaacatcattaataaaaaactgtgattctaaaagccagaagtataattgtttagtcatggtgctatctccatgccatgtgaaggaaataaacataaaattcggaccaaattctggctctaaagtgcctttagcaacagttacagtaattgatcaatcagaaactaagaagaaggtttttctgtggaggactgcagcattttgggcatttacagtgtttcttggagatataattttactcacagatgttgttattcatgaggaccaatggattggcgagacagtactacaatcaacatttagcagtcagttattaaatcttgggagttattcatctattcagcctgaagaatattccagtgtagttagtgaagttgtacttcaagacttactggcatatgtgtcctcaaaacattcctacctcagagatcttcctccgaggcagcctcagagggtgaacagtatagactttgtagaattggagcaccttcaacctgatgtattagtccacgcagtactaagagttgttgatttcactatactgacagaggcagtatacagttatagaggacagaagcagaaaaaagttatgttaacagtggaacaggcccaagatcaacattatgcgcttgtattatggggtcctggagcagcctggtaccctcaacttcaaaggaaaaaaggagtggttctgattaaagcccagatttcagagctggcatttcctattacagcatctcagaagatagcgctaaatgctcacagttctctgaagagtattttttcttctcttcccaacatcgtatatactggttgtgcaaaatgtggattggaactagaaacagatgagaacaggatctacaaacaatgttttagctgcttgccatttactatgaagaaaatatattataggccagcgttaatgactgccattgatggaagacatgatgtttgtatccgtgtagaatcaaagctgatagagaagattcttctcaacatttctgcagactgcctcaacagagtgatagttccttcctcagagatcacctatgggatggtcgtggcagacctgttccactccttgttggcagtcagcgcagaaccttgtgtattaaagattcagagcctttttgtgttagatgaaaacagctatccattacaacaagatttctccctcctggatttttatcctgacattgtaaagcatggagccaatgcccgtctctgaggccagaggaagaaattgcaggcatttcaaggaagaagtactgaaatgatttgtcttttgaaataaatgaatgacagggcttttgctttggattttttatgaaatatattttacaaagagaattgcactagatatataaattaaaacttttttctaagaaaatcctgtgaggtttaaaaagattgtttttgtcttttggtttcttactttctcctggagaaatgatctaccagtcaaggcaatatgtagcagatccctgggaattaaaggtttgcccatttgttcactgtatttagtccctgctacattccaggcattgtactaagtatggggaaccacagagaagacattccctcagaaactgctgcagtgctttcgcttatccctacctaaaaaaccgtcaatgtgaaatcatttccttgattataactataatgataatggattagtttatataaacctatgtttagacaagttcaagacaagcgtgtctttctataaaaagtattgaaaatgaaggaaatgagatcatgtttcaatttattaaagcagggaagagcgttctgtgcttagttcgtgtctaggatttgagtgccttactgaatgcatttaccagcaaacatgtagcaatctgttctctcattgtgattgtggaagaagctcatgtaaaatgatagtcattaatgaggaagtatggcgtggtacttattctgtaagttcagagtatgctgagtgttaatagattatcatattgcctgaaaataaattcatgatgacatgaaaaaaaaaaaaaaa

SEQ ID NO: 1461 - DNA, 345 bp, Homo sapiens
  misc_feature (162)..(162): n is a, c, g, or t
  misc_feature (334)..(334): n is a, c, g, or t
ttttttttttattttacaaattgacttcatttacaaattgagtcattttacaaattgacttcaattttacaaattgactacattttcttcacagagctaaagcaataccttagaattaacccagtcctgtgtggggaatttctagaagtcccatctatgggnacggtgatgtttatctgctctgatcaggggaaggacaaacagtggggagagtcagggccctcgttcccgaattcttgggcctcgaggggccaaattccctataggtgaggtcgtatttaaattcgggaatcatgtcataggctgtttccccgtggtggaaattgttatcccnctcaccaattc

SEQ ID NO: 1462 - DNA, 1650 bp, Homo sapiens
ttctgagccaaccatgtgcctcagacttctctgctgtgtggccatttctttctggggagccagaatgaagaacttattcagaaagcagaaataatcaatgagcgatttttagcccaatgctccaaaaactcatcctgtaccttggagatccagtccacggagtcaggggacacagcactgtatttctgtgccagcagcaattgggccatcatgagctacaggaacaagagacccagtacttcgggccaggcacgcggctcctggtgctcgaggacctgaaaaacgtgttcccacccgaggtcgctgtgtttgagccatcagaagcagagatctcccacacccaaaaggccacactggtgtgcctggccacaggcttctaccccgaccacgtggagctgagctggtgggtgaatgggaaggaggtgcacagtggggtcagcacagacccgcagcccctcaaggagcagcccgccctcaatgactccagatactgcctgagcagccgcctgagggtctcggccaccttctggcagaacccccgcaaccacttccgctgtcaagtccagttctacgggctctcggagaatgacgagtggacccaggatagggccaaacctgtcacccagatcgtcagcgccgaggcctggggtagagcaggtgagtggggcctggggagatgcctggaggagattaggtgagaccagctaccagggaaaatggaaagatccaggtagcggacaagactagatccagaagaaagccagagtggacaaggtgggatgatcaaggttcacagggtcagcaaagcacggtgtgcacttcccccaccaagaagcatagaggctgaatggagcacctcaagctcattcttccttcagatcctgacaccttagagctaagctttcaagtctccctgaggaccagccatacagctcagcatctgagtggtgtgcatcccattctcttctggggtcctggtttcctaagatcatagtgaccacttcgctggcactggagcagcatgagggagacagaaccagggctatcaaaggaggctgactttgtactatctgatatgcatgtgtttgtggcctgtgagtctgtgatgtaaggctcaatgtccttacaaagcagcattctctcatccatttttcttcccctgttttctttcagactgtggcttcacctccgagtcttaccagcaaggggtcctgtctgccaccatcctctatgagatcttgctagggaaggccaccttgtatgccgtgctggtcagtgccctcgtgctgatggccatggtcaagagaaaggattccagaggctagctccaaaaccatcccaggtcattcttcatcctcacccaggattctcctgtacctgctcccaatctgtgttcctaaaagtgattctcactctgcttctcatctcctacttacatgaatacttctctcttttttctgtttccctgaagattgagctcccaacccccaagtacgaaataggctaaaccaataaaaaattgtgtgttgggaaaaaaaaaaaaaaaaaaaaaaaaaaaaaaaaaaaaaaaaaaaaaaaaaaaaaaaaaaaaaaaaaaaaaaaaaaaaaaaaaaaaaaaaaaaaaaaaaaaaaaaaaaaaaaaaaaaaaaa

SEQ ID NO: 1463 - DNA, 309 bp, Homo sapiens
atgcatcatgaagcttcgagtgaagctcttcctggggacaatgtgggactcaacgccaagaacatatctgtcaaaaatgtctgtcatggcaacgttgctggtgacagcaaaaatgacccatcagtgggagcaactagcttcactggtcaggttattatcctccaccatccagaccaaatcaatggtggctatgccgctattctggattgtcacacagttcacattgcttgcagttttgctgagttgaggggaaagattgatcaccattctggtaagaagctggaagatggccctacattcttgaaatag

SEQ ID NO: 1464 - DNA, 1230 bp, Homo sapiens
gacgtcatcgccgcggggcggaggcgacagtgtctagcgggagctccgcgtgtagctacgccggccgcctggctttgagacaacgtgattctccgcagctggtcgcctacccgtgatgttctgcccacgtcgagacctgagctgaaatggcagacgatctcggagacgagtggtgggagaaccagccgactggagcaggcagcagcccagaagcatcagatggtgaaggagaaggagacacagaagtgatgcagcaggagacagttccagttcctgtaccttcagagaaaaccaaacagcctaaagaatgttttttgatacaaccaaaggaaagaaaagagaataccaccaagaccaggaaaagaagaaagaagaaaattactgatgttcttgcaaaatcagaaccaaaaccagggttacctgaagacctacagaagctgatgaaggactattatagcagcagacgcttggtgattgaattagaagaactgaacctgccagactcctgtttcctcaaggccaatgatttgactcacagtctttcctcatacctaaaagaaatttgtcctaagtgggtaaaacttaggaagaaccacagtgagaagaaatcggtcctgatgctgatcatctgcagctcggccgtccgagccctggagctcattaggtcgatgacagcattcagaggagacggcaaagttataaaattatttgcaaagcacataaaggtccaggcgcaggtaaagttgctggagaagcgtgtggtgcacctgggtgtaggaactccggggagaattaaagaacttgttaaacaaggtggccttaatttgagccccttaaaatttctggtttttgactggaactggagagatcagaagttgaggagaatgatggacattcccgagataagaaaggaggtattcgaacttctggaaatgggagtgctcagtctgtgcaagtcagaatccttgaaactgggccttttctaagtctgtgtcctaatgaagattccagttttcacagtagaagttgcatcttatttaatgactctgatacattgcaagcactcagtaaatatcagcaaatagtttatgttaattgtgtcaacagatggatcactggaatgtggggattctgaaacagaaatgaaactgtccttttgacaactctcttatataataaagtatcaccggcttgtgtatgatccttgttgagcggaccgtgtttttctgt

SEQ ID NO: 1465 - DNA, 527 bp, Homo sapiens
ccttctctgtcagtcaatctccattccctccctgccagcctatttttctgccctccctcttctctgtctgctcagttcttgcatctctccttctgtgtttccaggtttctctatatttcttttgcctgtgtagtctctctgtcgttaggccttttatctatgcctgtgtgtctcactgtctagctgcttgtctccctgcctgtcactttcattgtggggcatcagtctctgccttcttctgtctttcagtacttcaaaaaataaaaattaaataaaaaatttaaattccttatgattaatgggtacaggagaatattttttttgttttaatgagaagactattaaggtgagaacaaagaactcaaatattcagctgtgaaatgcaaatgaagaaaaatttttaagggactctcaagccaagaataagattatttaacgcaaaagcaagaaacatatctaaagcaataatttctaaccttttaggatcgtagaaagttagaaactttctccagaaaaaaaaaaaaaaa

SEQ ID NO: 1466 - DNA, 165 bp, Homo sapiens
atgccgaaggcgcccaagcagcagctgccggagcccgagtggatcggggacggagagaacacgagcccatcaggtgaggctggtaggcaaggaagacacgagaggaaggggaagagagaggagactgcgcgtgttttaggagagggtcatggggcgcgagactga

SEQ ID NO: 1467 - DNA, 4450 bp, Homo sapiens
cccatccaggtttccctgctggccctgagcatggagtaccctgcgcagctgtggcccgacgcctctgcggccgaagtggccgccacctccctgttggacaccttggtcctcctacccccgcggccctcagctctccgtcggccactgctgctggcggccaccactgccctggcggcgggcggcgcgctgggccccacctcgggcgcctcctgccggctcctgcccctactgctcggcctggccgcgggtagcgatctggggcgaggctttgtccccgcctcggaacagcgccccttgcaggccacggcctgcgagtgcctgcgagagctagagagctgcaagcccgggctgctggggggctccctggggttgctgcggggcctgctggggcaggaaggccctgtccagccactcagcctgttgctggccctcgctttgcgcaacaccttggtgctccagtcccgggttggggctggcctggggggactgctcacggataaggtctccccaactgggggtggtccctgggattggacactagtggaggagggcgatggacgccttcagccccaggcacccagctggccggcagctgaggagggagagggggagcgtagccttacagcacgagagcacagccctgaggaggcgcgggagctgcgggctgcggtgatccagcttctggacacctcctatctgctcactcctgtggcccaggcccagctcctgtggctgctgggctgggccctgcggggtctgcagggacagccaccggcactcttcaagccgcagctggtacggctgctaggcacagcacagctgacactgttgcacgccatgcttgcgctcaaggcggcctttggtgaggccttgttcacagcccaggatgaagcgttgctgctccgccggctcaccttggctgcccagcaccctgctctgcctccgcccacccatctcttttaccttcactgcgtcctgagcttccctgagaactggccgctgggccctgaaggtgaggaggctgccccactgctgctagggccccagctatgccgtggtctcctgcccagtctcctgcatgacccaatggccctcctggcccgcctgcatttactgtgcctgctctgtgccgaggaggaagaagaggagaaaggccagcttccaagcccacggcactacctggaagagctgctggctggcttgcggcagcgggcagccctggatgggggcccccgggccttggccactctctgcttccaggcctcgtatctggtggcctgctgcctggctgggcaacctacggtgctgacccccttgatccacggactggcccagctgtaccaagcccggcccatgctggctccccactttgtggacctcttggatcaggtggactctgagctgagggagcccctgaaggtggtgttgcggcaggtggtggtgtccaggccgggcagggatgaagctctttgctggcacctgcaaatgctggcaaaggtggcagatggagatgcccagagtgctaccctcaactttctacaggccgcggctgcccactgcacgaactgggacctacagcagggcctgctgcgggtctgccgggcgctgctgcgggcaggggtgaggggcggcctggtcgacttgctgcaggtgctggccaggcagctggaggaccctgatgggcgtgaccacgcccgcctctactacatcctgctggcacacctggcagcacccaagttgggggtggccctgggcccctcgcttgccgcacctgcactggcctcttcactggtggccgagaaccagggctttgtggcagcactgatggtgcaggaggcaccggccctggtacggctgagcctggggtcccatcgggtcaagggcccactcccagtgttgaagctccagccggaggcgctggagcccatctactctctggagctgcgcttccgtgtggaaggacagctgtatgcacccctggaggctgtccatgtgccctgcctgtgtcctggccgccctgcccgccctctgctcctgcctctgcagccccgatgcccggcccccgcacggctggatgtccatgccctttacaccacatccactggtctcacgtgccatgcccacttgccacccctgttcgtgaactttgccgacctctttctgcctttcccgcagcctccagagggggccgggctgggcttctttgaggagctctgggattcctgcctgccagagggtgctgagagtcgtgtgtggtgtccacttgggccacagggcctggagggcttggtgtcccgccacctggagccttttgtggtggtggcccagcctcctaccagctactgtgtagcaatccacctgcccccggactcaaagctgctgctgcggctggaggcggccctggcagatggagtgcctgtggccctgcggaccgatgactgggccgtgctgcccctggcgggggactacctccgtgggctggcggctgctgtctgagccccgggagaccaggtgggggcaggactgtggcccttgtgggggccaaggcacactcctgtagctctgtcgccaaaaccctgcattccgcagtgccctcgctggcttgttttcttttgggccccggttgggagcaggctcctgggggtgagggtctgtctgagtctgtttttgctgctctagcaagatccctgagacggggtaagttataataaacagaaatgtattggctcagagctctggaggctgggaagtccatagtggagggcccagagcccagtgaggacccttctgcatcttcccatgacagaggacagagtgacaggagtgaggggagagagcgaacccactcccaagataacggcctgagtccacgcaggagggcagagccctcgtggcctgaccacctcttagggtctaatcttatactgttacagtggcaatcgcatttcaacgtgagcgtgggaggggacaaacattcaaaccatagcagggtcataggccccaagaaggcttccagacagaacccggcactgtagagctacagagttccttctcacccagacacactagtgctctccagaatctctgcccaggaggcaggggaaaaatctcctttctgcttcccagagagggtctggccttgcccaaggccactcagtgatttaggaagaaggctgaagctagagtgtggacctgacctgttggacagtacttttctttctttttttttcggggaggggttaaagacaggatctcactctggcgctctggagtgcagtggtgtgattagggatcattgcagactctgcctctcaggctcaggtgatcctcccatctcagcctgcctccgagtagctgggactacaggtgtgagtcaccactgtattttttgcagacaggatctccctgtttcctaggctggtctcgaactcctgggcttaaatgactcttctgcctcagcctcaccaaagtgttgggattactggtgtgagcccccacacctggccgagccagcgcttctcaactcccaaggtttgcaagctccctgccccagggagctcacgccaggcaggccagtgggcctaagccagaaacagaaagacagcagtggccaggtggagagcttcccaagctgtgccgattagagccagctctaggaagggcctgctaataaggtctagggtctgagaccaagttttttctaatctcagcccctaagaaacctaatttgtgcttaggaatcttcccaggtaagaagaactagttcctctagttgttgtttttttttcccaaacatgcaaacactgaggattgagctgtgtggggtcagctgtgctgccaggcacatgtacgttgcctcatttcatccttgcaacagctctgcagggccccgcagatgaggaaatccgtaggcaggagcggttgagtgattttcctaaggtcacccagctgtttggtaatagtgttttgtcatctggtagcaggtttccattaccatgccatcagagcagacctcagccagggccacagaggtcccaaccgtctctgccctcttctgctgcccctgcctcatgggctcccagccacaggttccccatgggccagctttacgcctcctgatccttccgattggggcagactaggagaggaaagacgggcctgggctgggtgcggtggctcatgcctgtaatcccagcactttgagaggctgcggcgggtggatcacctgaggccaggtgtttgagatcagcctggccagcatggcgaaaccctgtgtctaataaaaatacaaaaattagccgggcgtggtggcgggcgcctgtaatcccagctacttgggaggctgaggcaggagaattacttgaacctgggaggcagaagttgcagtgagccgagatcacgccactgcactccagcctgggcgacagagcaaggctctgtctcaaaaaaa

SEQ ID NO: 1468 - DNA, 3860 bp, Homo sapiens
agagctgccagggattggccagaacttggctttgagtcacaaagctgctgcggcaccagggctccaagactggccgttcagactgctaggtttagcttcaggggcagcccagggcagtgttgctgcatattgcatggatgaaaggctgaaggctgcctcctcttgcaggctggcttctgagattgcaccttcttctcctgctactcctccaaatctatgacccttcaaggcagagctgacctgtccggtaatcaaggcaatgcagccggccgcctagctacagttcacgagccagttgtcacccagtgggcggtgcatcctccagcccccgctcaccccagtctcctggacaaaatggagaaagcgcctccacagccccagcacgagggcctcaagtccaaggagcatcttccgcaacagcctgccgaaggcaagacggcgtcccgccgcgtcccacgcctccgggctgtggtcgagagccaggccttcaagaacatcctggtagacgagatggacatgatgcacgcccgtgcagccacgctcatccaagccaactggaggggctattggctccggcagaagctgatttcccagatgatggcggccaaggccatccaggaggcctggcggcgcttcaacaagagacacatccttcactccagcaagtcgttggtaaagaaaacgagggcggaggagggggacataccttatcacgccccacagcaggtgcgcttccagcatccggaagagaaccgccttctgtccccgcccatcatggtgaacaaggagacccagttcccttcctgtgacaatctggtcctctgcagaccccagtcgtcccccctcctgcagcccccagcagctcagggtaccccagagccctgtgtgcagggtcctcatgctgccagagtccgggggctggccttcctgccacaccagacggtcaccatcagatttccctgcccagtgagtctggacgcaaaatgccagccatgcctgctgaccagaaccatcagaagcacctgcctcgtccacatagagggtgactcagtgaagaccaaacgtgtaagtgcccggaccaacaaagccagggctccggagacaccattgtccagaaggtatgaccaggcagttacgagaccatccagagcccaaacccagggccctgtgaaagcagagacccccaaagcccccttccagatatgtccagggcccatgatcaccaagactctactccagacatatccagtggtctccgtgaccctgccacagacatatccagcgtccacgatgaccaccaccccacccaagactagcccagttcccaaagtaacaataatcaagaccccagcccagatgtatccggggcccacagtgaccaaaactgcacctcacacatgccccatgcccacaatgaccaagatccaggtacaccccacagcctccagaactggcaccccacggcagacatgccctgcgaccatcacggcaaagaaccgacctcaggtttcccttctggcttccatcatgaagagcctgccccaggtatgcccggggcctgcgatggcaaagaccccaccccagatgcacccggtcaccaccccagccaaaaacccattgcaaacatgtctgtcagccacaatgtccaagacttcatcccagaggagcccagttggggtgaccaagccctcaccccagacccgcctgccagccatgataaccaagaccccagcccagttacgctcggtggccaccatcctcaagactctgtgtctggcctctccaacagtggcaaatgtcaaggctccaccccaagtggcggtagcagccggaactcccaacacctcaggctccatccatgagaacccacccaaggccaaggccaccgtgaatgtgaagcaggctgcaaaggtggtgaaagcctcatccccctcctatttggctgaggggaagatcaggtgcctggctcaaccacatccgggaactggggtccccagggctgcagctgagcttcctttggaagccgagaaaatcaagactggcacccagaaacaggcgaaaacagacatggcatttaagaccagtgtggcagtggaaatggctggggctccatcctggacaaaagttgctgaggaaggggacaagccacctcacgtgtatgtgcctgtagacatggctgtcaccctgccccggggacagctggctgccccactgaccaatgcctcatcccagagacatccaccctgcctgtcccagagaccactggccgccccgctgaccaaggcctcatctcagggacatctgcccactgagctgaccaagaccccatccctggcccatctggacacctgtctgagcaagatgcattcccagacacatctggccacaggtgccgtgaaggtccagtcccaagcgcctctagccacctgtctgaccaagacgcagtcccgggggcagccgatcacagacataaccacgtgcctcatcccagcgcaccaggctgctgatctcagcagcaacacccactcccaggtgctcctaacagggtccaaggtgtccaaccacgcctgccagcgcctcggtggcctcagcgccccaccctgggccaagccagaggacagacagacccagccacagccccacggacacgtgccggggaagaccactcaggggggaccatgcccggcagcctgtgaggtccagggtatgctggtgccgccgatggcacccaccggccattccacatgcaacgttgagtcctggggagacaacggagccacacgtgcccagccatcaatgcccggccaggcggtgccctgccaggaggacacgggccccgcggacgctggtgtggttggtggccaatcgtggaaccgcgcatgggagccagccaggggtgctgcgtcctgggacacctggcgcaacaaggcggtggtgcctcccaggcggtccggggagccaatggtgtccatgcaggctgcagaggagatccgcatcctcgcagtgatcactatccaggcgggcgtccgtggctacctggcgcgtcgcaggatccggctgtggcaccggggggccatggtcatccaagctacttggcgcggctaccgtgtgcggcggaacctggcacacctctgcagagccaccacgaccatccagtctgcctggcgcggctacagcacccgccgggaccaagcccggcactggcagatgctccaccccgtcacgtgggtggagctgggcagccgggccggggtcatgtctgaccgaagctggttccaggatggcagagccaggacagtatctgaccatcgctgcttccagtcctgccaggcacacgcttgcagcgtctgccactccctgagctccaggatcgggagcccgcccagcgtggtgatgctagtgggctccagccctcgcacctgtcatacctgtggacgcacacagcccacccgtgtggtgcagggcatgggccagggcactgagggccccggggcagtgtcttgggcctccgcctaccagctggctgccctgagtcccaggcagccgcatcgccaggacaaagcggccacagccatccagtccgcctggaggggctttaagatccgccagcagatgaggcagcagcaaatggcagcgaagatagttcaagccacctggcgaggccaccatacccggagctgtctgaagaacacagaggcgctcttgggaccagcagacccctcggccagctcacggcacatgcattggcctggcatctaggaccctggctccctgcagtggggacttcgtgggaggcactcatggctctctgggtctaatgaataaagtcctccacagcctagaaaaaaaaaaaaaaaaaa

SEQ ID NO: 1469 - DNA, 509 bp, Homo sapiens
ttcctgccatgggtcctgggcttctccactggatggccctttgtctccttggaacaggtcatggggatgccatggtcatccagaacccaagataccaggttacccagtttggaaagccagtgaccctgagttgttctcagactttgaaccataacgtcatgtactggtaccagcagaagtcaagtcaggccccaaagctgctgttccactactatgacaaagattttaacaatgaagcagacacccctgataacttccaatccaggaggccgaacacttctttctgctttcttgacatccgctcaccaggcctgggggacgcagccatgtacctgtgtgccaccagcaggggacagggggggcgcgagcagtacttcgggccgggcaccaggctcacggtcacagaggacctgaaaaacgtgttcccacccgaggtcgctgtgtttgagccatcagaagcagagatctcccacacccaaaaggccacactggtgtgcctggccacaggc

SEQ ID NO: 1470 - DNA, 2061 bp, Homo sapiens
aaagttctcagttggcccgtgtgaggagaaggccggggcagcggaggcttccggcggaaaatccaagaggaagaaggatctacggatatcctgcatgtccaagccacccgcacccaaccccacacccccccggaacctggactcccggaccttcatcaccattggagacagaaactttgaggtggaggctgatgacttggtgaccatctcagaactgggccgtggagcctatggggtggtagagaaggtgcggcacgcccagagcggcaccatcatggccgtgaagcggatccgggccaccgtgaactcacaggagcagaagcggctgctcatggacctggacatcaacatgcgcacggtcgactgtttctacactgtcaccttctacggggcactattcagagagggagacgtgtggatctgcatggagctcatggacacatccttggacaagttctaccggaaggtgctggataaaaacatgacaattccagaggacatccttggggagattgctgtgtctatcgtgcgggccctggagcatctgcacagcaagctgtcggtgatccacagagatgtgaagccctccaatgtccttatcaacaaggagggccatgtgaagatgtgtgactttggcatcagtggctacttggtggactctgtggccaagacgatggatgccggctgcaagccctacatggcccctgagaggatcaacccagagctgaaccagaagggctacaatgtcaagtccgacgtctggagcctgggcatcaccatgattgagatggccatcctgcggttcccttacgagtcctgggggaccccgttccagcagctgaagcaggtggtggaggagccgtccccccagctcccagccgaccgtttctcccccgagtttgtggacttcactgctcagtgcctgaggaagaaccccgcagagcgtatgagctacctggagctgatggagcaccccttcttcaccttgcacaaaaccaagaagacggacattgctgccttcgtgaaggagatcctgggagaagactcataggggctgggcctcggaccccactccggccctccagagccccacagccccatctgcgggggcagtgctcacccacaccataagctactgccatcctggcccagggcatctgggaggaaccgagggggctgctcccacctggctctgtggcgagccatttgtcccaagtgccaaagaagcagaccattggggctcccagccaggcccttgtcggccccaccagtgcctctccctgctgctcctaggacccgtctccagctgctgagatcctggactgagggggcctggatgccccctgtggatgctgctgcccctgcacagcaggctgccagtgcctgggtggatgggccaccgccttgcccagcctggatgccatccaagttgtatatttttttaatctctcgactgaatggactttgcacactttggcccagggtggccacacctctatcccggctttggtgcggggtacacaagaggggatgagttgtgtgaataccccaagactcccatgagggagatgccatgagccgcccaaggccttcccctggcactggcaaacagggcctctgcggagcacactggctcacccagtcctgcccgccaccgttatcggtgtcattcacctttcgtgttttttttaatttatcctctgttgattttttcttttgctttatgggtttggcttgtttttcttgcatggtttggagctgatcgcttctcccccaccccctagggtaccagcaggcagagccttgccctctgctcaggctggggtccagtgggaggggcccaagatctctgctcagagaagtgcagggggagccttccagctcactctccctgaggactggcttgacaggggctatgggtttgctttggtgttgtttttaaaaaaagaaaatatatttttttgaaaaaacgactgcccatcccgggtcctttccctgatgggttggggcagttacctggttgctgttttaattaaaaaaaaaaaaaaaaaaaggactaaa

SEQ ID NO: 1471 - DNA, 486 bp, Homo sapiens
atgtcttcacatctacctttctatgtcacatgtgcaagatggttgctctgccttcagacatcacatttacattccaggcagaaaggagaaggaaagagcaaaagatgtgttccgaacaaatccatcttaaaaacaaacaaggggaggggtagcaggagaaaatttaaaaagaagaagaagaaaaacaaaaacaggaaagccgttgtttccctaaaagccccatcaagccgacttctaccggtgactcattacccagtcatgtggccacgcctggattcaaggcagtctgaggaggtgagtgtttcaaagaggcacatggatgccacagacaaaatcaagtttccatggttgaaggagaagaggacgatagagtttggggaggcagcaggctacgtctgccacagaagatataaagatatggagccacacgagaagatgggggaggctgccaaaaaagtccactgggtacagatgaggagcaggtga

SEQ ID NO: 1472 - DNA, 2854 bp, Homo sapiens
cattttagatacaacatactgcacacgctcccttaacgtgtgtttacgcgtgggtggtgtatccttccagacgtcttcctcacatctatacataatatgcatagataaaacatttaccaccaaaacccatagtgttatgtacatatttgtctggctgtgtaactttaaataacatacaaatgtatagaacagaagcttgccctctttctgaaatatctaacgtgggatttcaggctttctgatgagacctctgtagaggtcagtgttttgccaccagaggtccttcagcctccatctgttctcccacctacccacattctggcccctggcaattcacagggagtttaggaagtagacaccagggccctatttcctggagaccagcctggtggccgatgtcatagagtgcggtgggcctgggccggccctgctctgggcccgtgacctgcgtgtctgactcgggtccagctgttcttcctgccagagcctcttcctgtgaggcgggggtaacacaaccttctgtggtggctgtgggattaatccgtatggctgcattgtgagtaaagcctggtggaaatctctgtctccactgctatccttttcctgctgttcaccttggctccctcgacacttaatccccctccacatgtgtctggagcgggcagagcgggggcagttgatagaaagggggccgggtagtgccaaggctgttactttcccccactgcctcccttggctaacttgaagtctgaccctttataccagaactgtaagacagtgtgtcagaatggattcagttgcagagcaggaagcctggatcccagcgccggacggaaatgagaggtcgatggtgcaggctggtgtgggggttcctccaccgtcagggcccaggctccttctcaggtctcagtctcactcttcttagcacgaggtcaggtctcattccttggctgcgggagctccagccagcacacgttttaggaagaaggaggaaggaagaaggtaaagggtggatggcagctgcctcctcctctcttggaagctcacagagcgctgggtcacaattccctgggtagaactggatcacacaggcacccctgtcagcaaaagaggctggaaaaagtatttctgaagctgaatcaaattaagattcctgttactaagaagggagtgattgtatgggcgactacagggaccacggccatacacggtgcctggaagaccaagcttgtgacagtgacgaggatttggagagggcagggtgatggggagctttggggggagtgcattaggaaccctgacctggagaggggcagaatgaaacctgcgggcccctaaccctagtgggttgtttgagaaacctgtcctactgtggcagggggctgagtcttctcagggtcatgcatgaaaactgaaattcctgaaggccacacacagccccggaagtgctgactgacaagggcacatgccagtgatgcagttttcttttttgtcttcacttttgttgttccgccgtcttcaacacatggctcccagctcacagcaaatgctgccctggttcagctaccaggaagcaggagaggggaagggagggcaagcctcattctttatggaacaaaagcagtgggcagacagccttccctcacgttccactcactggaatgtggtctggctgccttccctgcaggaggtgggatgcaccctcagtgcagcagccctgccccagccaaaaacgtctcagcacagctgtaagaagaggaagatggctagagacaggcagccttccctgcaagtgcaatgaggcaagcctgccaaaagcctcctttggaaatactgtttgattacttttcagagtttctatttaggaaaagggcaaaacctttcaggatcaggagtaggtgagcggcgatcaggcctcactcttcaccgagggccttccctgaggaggggcctgcaggacgctggcagcggaatggggctgtgtggctgctagattaggtcatggcagggagacagcctcttcctggttcttgctagaacaggcacacttggggccttgagctccagggagttcatggaagacatctgactaccctgagccccttgctggagggttctggggagtggcccacggccaccgtcacccatggccaccgtcacccacaggggccgtgaggacatccctggccagcatctaacacaaccacatgggatgccctaagcaactactgcccagccgagggctgcctgaatttctgactcacaaatggtgggcaatgtgaaacgggtattttaagctgctgagttctgcgggagtttgctgagcaacagtagaaaccagaactctcggatactgtgttctgtccttgaaacggtggaagattttatgtgaccagaatggaatgtttgaacaaatattttgagaatagaattttaaaacatttactcatcagcatccaagggtggggagcagtgtcatctaggagactggttctattatttacgtagatgttcttgaattaaaggatgggaatattttttccttccaaaactttttttcaattttatattctgtttttcaagtttttattatgaaaatattcaaactcacagggaagttgaaagactaatacaaagaagaaccatactctttccactgacatgatccaacgaggaatattttgccacacggcaaatatataccgtataattttctgtaccacttgatagaaaggtaaagaatgaatattgttttttaaataacttttttcgtatataagtaatatgtgcttatcgtgtaactacctaaaaacattgaaaaataaaaggaaaataaaattcatacataaccgcc

SEQ ID NO: 1473 - DNA, 3495 bp, Homo sapiens
atgtccctccctaagccctggtctctcttgcctcctgcagggctggtgaattaccagatctccgtcaagtgcagtaaccagttcaagttggaagtgtgtcttttgaatgcagaaaacaaagtcgtggacaaccaggctgggacccagggccagctgaaggtgctgggtgccaacctctggtggccgtacctgatgcacgaacaccccgcctccctgtactcgtgggaggtgcggctgactgcacagaagtcactggggcctttgacttctacacactccctgtggggctccgcactgtgcccgtcaccgagagccagatggtgattgctcacaccaaagccttggacccctcccagcctgtgacctttgtgaccaactccacctacgcagcagacaagggggctctgtatgtggatgtgatccgtgtgaacagctactactcttggtatcgcaactacgggcacctggagttgattcagctgcagctggccgcccagtttgagaattggtgtaagacatcacaatcccattattcagagcgcgtatggagtggaaacgcttgtaaggcttcaccaggatccacctctgatgttcagtgaagaggaccggaaaagtctgctagagcagtaccatctgggtctggatcaaaaacgcagaaaatacgtggttggagagctcatctggaattttgccgatttcatgactaaccagtgtaagtggcagtttagcgcatgggataatgtacccgtcctcattttttcaggttgccttgcccattctggacattttggctgtaagaatattggaaacaaaggggggaacctggtttaatccatgtaggttgtgttgagaatttcctaggaaaagtaagttgtgcttaggaagtaggaaagcagtcaggcccccgcttcccacgtacggtcaaaaagcaaacatgagagtctgctatagtgagatggaaatggctagcttgcctttttcttgtctatttcatagccaaggatgaaggaaaaactggacctcattatggatttacttttgggatacactcattattccagaggagggtaaaaggctgagaagcttaaggtatttcagtctgttttatgttactcatttgcgaaaagcaggctcatcgaatacaggtgagtttcaacgcgtcttgaatatggcagcatttaaaagtcttcagaccaggcatggtggctcatgcctgtcatcccagcactttgggaggccaaggtgggaggattgcttgaggccaggagttcgagaccagcctgttcagcatagcaggacccccatctctacaaaaactaaacagattagctaggtgtggtggtgtgtgcctgtagtcctagctgcttgggaggctgaggcaggcggatagcctgagcacaggagttggaggctgcagtaagccatgattacaccactgcacttgagcctgggcagcagagtgagacctgtctttaaaaaaaaaaaaggagctgggcacggtggctcatgcctgtaatcccagcactttgggaggccgaggcaggcagatcacgaggtcaggagatcgagaccatcctggctaacagtgaaaccctgtctctactgaaaatacaaaaaaaatcagccgggcgtggtggcgggtgcctgtagtcccagctgctcgggaggctgaggcaggagaatggcatgaacccaggagttggagcttgcagtgagccgagattgtgccactgcactccagcctgggcgacagtgagactgcttctcaaaaaaaaaaaaaaaaaaaaaaaaaaagaaagggtcttcaaagacaataagatctgtgctctcacgtagggtggatgaggggctgccaagttagcaatgaatgtttcccatttcttcttagtttatggactttccataaactcaggatggcagtttggttggttggagaaggatatggtgatggcgggagttacaatacattacttataggggaagataggcttttgaaaggttaaagcttaaaagtgagaatggaaaagggatgaatgaatgaacatgatgaggtgagagggaagaggtaaagggaaaaggagaacaagcaactcttctctgcgtggcacctgggatgaatggtttctggggacatccctgatggcagttttgtggagaggtgcaaagctttatgtgttaagaaatgagctgtaggctcagtgcagtggctcacgcctgtaatcccagcactttgggaggccgaggtgggtgaaaagaaaaaatgggctgggcgccgtggctcacgcctgtaatcccagcactttgggaggccgaggtgggcggatcatgaggtaaggagttcgagagcagcctggccaacatggtgaaaccgtgtctctccaaaaaaatagaaaaaacatccctgtatggtggtgagcacctgtagtcccagttactcaggaggctgaggcatgagaatcgcttaaacctcggaggcggaggctgcaatgagctgagatggtgccactgcactccagcctgggtgacagagctgggtggtggctcaagatatgttttgtaaacctgaagatttgagatcatataagccaaatcgaaacttaattggcattcataacttttggttctagagactccatgatcaactaagagccaccaaacatttcccatgtagactattttgaccatgctgactctactgacactgtggttactgaattcactttatctctagaaattaattcttactaatggatgtctgtcactgtaagatccttctctcctctgaaataaggagaacattttaacttcagtagtttaaactagtgtcctaaactatagcattcaaaatgagataatatgctaaagtaatacacaaaccaaaaatcccagtggctaacacaaaaagtttttcttattcattttacatatccagggtaagtcagtaatagacgcagacacacccagagaccaaggatgagttgtgatctgtctgcacacatagttcacaatgcctgagtgagttgtgctttggcctttaaacttccactcatgtttaattaataaagattttgctcaaatgccatttgatgatgagtttcatgacgatgatcaactttaaaagaacttggaagtacaatcctcaagcgtttctggaaatagcagaactacaatatttgagaaaaatattttttaatgtataaaaaattggcagggtaggctagcaagcaagagacctagagaaaagttgatgttacagtctcaagtcgaaaggcaatctgcaggcagaattatttccttgagggatctcagtcttttaatataatcaattgactggatgagccctacaatattttggaaaataatctgcttttctcagaaattactgattttcatgttaatctcatctaacaatactttcagagcaacatctatactggtatttgaatatataactcttttatcttttaaaatatcaaataatacagttatatatac

SEQ ID NO: 1474 - DNA, 1525 bp, Homo sapiens
agttcccagctgtccgaaaggtcttcggaacttcggctctaaagcgttcctcagcgccatccgcccggaaacacgagcgacagagaaaaggtccgcgaggccggcagactccagagtggctgggtccgagcgcggggcgggttgccgaagggcctcggcctgggctgcgtgctggagagcggggacggggccgactcaccagaggctgcagcaacaggtccactttgctctccagtctctttctccgacaccgctgaggcggtttcccaccgacttcctttccatacagcaccggcaggcaccggtgtgaagggtcataaaaatggcgctggccgctcgtttgctaccccagttcctgcactctcggtcgctgccctgcggggccgtccgactccggactcctgctgtggccgaggtgaggctgccgtcggccacactttgctacttctgccgctgtcgcctcggcttgggagcggcgttatttccacgaagcgctagggccttggcagcctcggcgctacctgcccagggctcccggtggccagtgctcagcagcccgggactccccgcagccttcgcttctttccctgcctgccctcagcgcagctacagcacggaggagaagccccagcagcaccagaaaaccaagatgatcgtcctgggattctccaaccccatcaactgggttaggactcgaattaaggccttccttatctgggcctatttcgacaaagagttcagcatcacagagttctccgagggagcgaagcaggcttttgctcatgtatccaagttgctgtcacagtgtaaatttgatctgttggaagaacttgtggccaaagaggtgctacatgcattgaaagaaaaggttacttcactacctgacaaccataaaaatgcccttgctgctaacatagatgaaattgtatttacatcaacaggagacatctccatttactatgatgagaaaggaaggaagtttgttaacatcctgatgtgcttttggtatctaaccagtgccaacatccccagtgaaactttaagaggagccagtgtattccaggttaagttggggaatcagaatgtggaaactaaacaacttcttagtgcaagctatgagtttcagagggagttcacacaaggagtaaagcctgactggaccattgcacggattgaacactcaaaattattagaataattttcttggaaaaatcagcttatggactttagcagttgctgtgaaaaactaaggaagaaaaattttggggtcatttgatcttcacttaatctaagtctgtgaattacttttatattattttgaaatactccttgcagtatattggcatgatacagtaaaagcattttccacagattgttatcaccttctttaaaagaagtcaaaatttaaaaaatacaatagcacgttgttggtgtcatattcaataacatttccaatgctacatataattttatagacataataaagaaggtattgaaaaaactacttacaaaaaaaaaaaaaaaa

SEQ ID NO: 1475 - DNA, 398 bp, Homo sapiens
  misc_feature (40)..(40): n is a, c, g, or t
accaggctgagtgcagtggcgcgatctgtaaaatcactgntgagcactgattagcacatactggaccgttgctcctaggagaaatacaggcttgcgttcctgtgagctttggtcgtgatattttcatcagctgatcaatatgtaatcttgttttatgtgtatttctgtttaaagattcatatatatatgtgtatatatatatatggttgagttgttaccgttgaactcacagcccactggactagaacacatgcctaaataaagttattggcacatgagattttgtctggtcttttttttttctttggataatttcaaagtctcttcacatgtgttctcttccactttaagttttccttaacaattcatcatatgaatagccagcctgggggacggag

SEQ ID NO: 1476 - DNA, 7089 bp, Homo sapiens
ccccatccccacccccaagcgagcacctgcccctcccgggggcggagctccggcgcatcatggcggctggccgggcccaggtcccttcctccgaacaagcctggcttgaggatgctcaggtcttcatccaaaagaccctgtgtccagctgtcaaggagcctaatgtccagttgactccattggtaattgattgtgtgaagactgtctggttgtcccagggaaggaaccaaggttctacactgcccctcagctatagcttcgtctcagtacaggacctcaagactcaccagcgtctcccatgctgcagccacctgtcgtggagcagtagtgcataccaggcctgggcccaagaggctggaccaaatgggaaccccctgccccgagagcagctgttacttttagggacactaacagacctatcggcagacttggaacaagagtgcaggaacggaagcctctatgtgagagataacactggcgtcctgagctgtgagctcatagacctggacctttcttggttgggccatctttttctgttcccccgttggagttacctccctcctgccaggtggaattcctcaggggaagggcacttggagctgtgggatgcccctgtgccagtgtttcctttgaccatcagtcctggccccgtcacgcctatccctgtcctctacccagagagtgcttcctgcctgctcaggctcagaaacaagctcagaggtgtgcagcgaaacctggctgggagtctagttcgattgagtgctctggtgaaaagtaaacagaaagcttacttcatcctgtctcttggtagatcacacccagctgtcacccacgtgtccatcatcgtgcaggtccctgcccagctggtgtggcacagagcccttcggcctggtacagcctatgtgctgacagaactgcgagtgtccaagatccgtggtcagcgccagcatgtttggatgaccagtcagtcctcccgtctgttgctgctgaaaccagaatgtgtgcaggagctggaactggagctggaaggacccctcttagaggctgaccccaagccactccccatgcccagcaactcggaggacaagaaggatccagaaagtcttgtccggtattctagactcctatcctattcgggagcagtcactggcgtgttgaatgagcccgctggcctctatgagctggatgggcagctggggctctgccttgcctaccagcagttccgtggccttaggcgggtgatgcgacctggagtgtgtctgcagctccaggatgttcacctgctccagtcagtgggaggggggacaagaaggccagtgctcgccccctgcctccgtggcgccgttctgcttcaaagcttctctcgtcagaagcctggggctcactcatcccgtcaagcctacggggcctccctgtacgagcagctggtgtgggaacgtcagttaggacttcccctctacctgtgggctaccaaggccctggaggagctggcctgcaagctgtgtccccatgtgctgagacaccaccagttcctgcaacattcctctcctgggagccccagcctgggactgcaactcctggctcctaccctggatcttctagctccgccaggcagccctgttcggaatgcacacaatgagatccttgaagagccacatcactgtcccctccagaaatacactcggctgcagactccctcctccttccccactctggccaccctgaaagaagaaggacagcgtaaggcctgggcctcctttgaccctaaggcccttctgcccctcccggaggcctcctacctgcccagctgccaactcaatcgccgcctggcttggtcctggctctgtctgctgccctctgccttctgcccagcccaggttttacttggggttctggtggcttcatctcataaaggttgtctgcaacttcgggaccaaagtggttccctgccctgcctgctcctggccaagcactctcaacccctcagtgacccacggctgataggctgcctggtgcgggcagagaggtttcagttgatcgtagagagggacgtgagaagcagcttcccttcctggaaggagctgagcatgccaggcttcatccagaagcagcaggccagagtctatgtccagttctttctggctgatgccctgatcctgcctgtgcccagaccctgccttcattcagcaacaccctcaacacctcagacagatcccaccggcccagagggaccccacctaggacagagccggctcttcttgctctgccacaaggaggccctcatgaagcgtaatttttgtgtccccccaggagcaagtccagaggtgcccaagcccgccctcagtttctatgtgttggggagctggcttgggggcacccagaggaaggagggtactggatgggggctgcccgagccccagggaaatgacgacaatgatcagaaggttcacctcattttctttggctcttcagtccgctggtttgagttcttgcacccgggacaggtgtaccgactcatagctcctggccccgctacaccaatgttgtttgaaaaggatggttcatcctgcatatctcggcgtcctctggagttggctggctgtgcatcctgcctcactgtccaggacaactggactctggagcttgaaagctcccaggatatccaagatgtgctggatgcaaacaagtcattgcctgaatcctcactgaccgacctgctcagtgacaatttcacagattccttggtgtctttctccgctgagattttgtcacggacactatgtgaaccccttgtggcgtctctctggatgaaactggggaacacgggggccatgagaaggtgtgtgaagctaacagtcgctcttgagactgctgaatgtgaattcccccctcacctggatgtatatatagaagacccacacttgcctccctcactaggactacttccaggagcccgggtccacttcagccagttggagaaaagggtttccagatctcacaatgtttattgttgtttccggtcatccacttatgtgcaggtcctgagttttccccctgagaccaccatcagcattcccctgccccacatctacctggctgaacttctgcagggtggtcagtccccattccaggccactgcctcttgccatatcgtctctgtcttcagccttcagctcttctgggtgtgtgcttattgtaccagcatctgccggcagggaaagtgcactcgcctgggctccacttgccctacgcagacagctataagccaggccatcatcaggctcctggtggaggatgggactgccgaagccgtggtgacctgtaggaatcaccatgtggcagcagcactagggctgtgtcctagagagtgggcctccctcctagatttcgtccaagtgccaggcagagtggtcttgcagtttgcagggcctggagcccaacttgagtcttcagccagggttgacgagcccatgaccatgttcctctggacactttgtactagcccctctgtcctccgtcctattgtgctttcttttgagctggaaaggaaaccgtcgaagatcgtcccattagaacctcctcggctacagcgattccagtgtggagagctccctttcctgactcacgtgaaccccaggctccgattgtcctgcctttctatccgagagtcagagtactccagctctctggggatccttgcttcctcctgttaactgaactgcaaggatggcctgagagtccttccttgctgaaaacctgaaggcctaggtcctggctcctctccctacttgttctgtgattgaaccaaggactccagattcacaaactgctactccactataatttcccttctttggtgttctggtgccagcctgccttggcaaaattgtggcaacaggaaatcatggccctattaatatgtcctctgattgggacaaggcacctgcattcacaggcggccctgagcacctgggttctgactttgtcgcaggagctgagggaacaaaagacttgctcgctgtggggtgatggtgacaggcctattgacctgcaatgaagccctctggtgtcatttctcactggtactcatctctggggtcccaggcctcctgactcctagttgtccacctcctaggaactcctagtcgttcatcatcatttcagccctttgccgccagggccaaaggtggaaagtgatttggaagagaagagcttttcgtccagcagaagaaatggtaccaaaatcagtctgtaaaggaagtaaattggggagttggcggcaaggcagagagcatagctatgatggtctcagtcagtaaggctgggccctgcaggaagtcaaatatgaatgcctagaggtgttcacaagcacaaagaaggtgtagggggaggcaagtgccaggcacaagcaggggcaggtgaggactctgggtgactgtgctatagggccccaggctacggttagccctgtaggtttcccaagggcctggcctaaggcagatccttgatcgatataccttgagaccagaaggtgctccgaaatcacaaccgtacaattaggggatctaggaacaattctttggagataccaatgcctttggctggtgttgctgcatttctttactggggactgatagatggagaggtggaaagatgagctgaggcacatctttcagagctactgggaggccatttcttcctggctgttaggatttgttcgtgtttgggagacctttagagcgtggttaaacccatatgttgggatttatgctgcttttatggtagcaataccctatattaagatttgaagtagacccggaaagttagtggccggttagctcagttggttagagcgtggtgctaataacgccaaggtcgcgggttcgaaccccgtacgggccagtgggtggcttttttttgtgtgtgttttgttttctgaccctctgctgttatccggaagtttctacccggagccagttgccttctggtaacagaattatattgcacctactgcttcctattccctgaatcactagcgctcccgaaggcttggagggaggagtctctgggcacccgggtgaaaggaaggttcacgtgcaaccgccgcgtctttttttccctgaagcgctttcatggaggcagatgtttgtcagtcaagggaagtaagaaaggcattggatgaaaacgaagccctaagcctcgtagtcgtggccgagtggttaaggcgatggactagaaatccattggggtctccccgcgcaggttcgaatcctgccgactacgtcatatttttttcttcagcatactgaccatatttctctccaggatgggatgatccagtcggcaccctccaaacctctcatctaggaactctagaatcgagaatttgatttagagtctatgattttggtttgaaatctatgattaacgtctttggacattgaaggaaatccgaggaatggacaagtgatgcaagagccagttgagttaccaaattagttctagaaagatctgaaaaagctcggtccgggttcctagctctatattcttgtagatgaatttcaggaacctttatggcagcttcggcgccgtggcttagttggttaaagcgcctgtctagtaaacaggagatcctgggttcgaatcccagcggtgcctttattcaattgaaacagcgtgattttgcggctaaatccacatcctttcatgtattgtttttatatcagaacgcgtaagagtttctgttctgcactcatagcacccacatttcctgcagagtcaagctgccactcccatgagatcgccactctaaaaggtggttctctaacttaggggcagaaatgttgcataggcctaagggtcctttgcttaactgatgccacaccccactggtgcaggtggactgggtcaggcggccgccccaccctcgatggaaggggctgcccaccttccaggcctctttctccaccctaggacgtcccctagaacctgagccactttgttttgtttggctcttcattatagttctttgggtttggtggctcataatgttatatatatagtatataatataaaaatatatatttaaatatacagtatttaaaatttggcacagcttccagatgcggtcctctaactggtctttcacttgcagttacctccatccctctccaccagcgggatgtcagggtaaggagtaagcagggatccggctggcctggcctggcctggcaccaggtttcgtgcagcagggtgcagaagggctgaggccatgtgaacagagtccaagaaagcatcattcgggagtcgctagggatcctggtgtggaagggcagggcacttttctggagcactgaagctaggctggttaaggaagaaataaatgccagagataaggcaagaaataggatctgtgagctcttggcaggacctaaacctccttggaagataggcagaaagctctcgacaccattccatggcccacgaaccaatgtaagatgagcaaatggcttgaaggaattgctacctccaggtcaagccagggatgcagcactgccgagaccacgtttgtgccaagcactgggctggaccctgtgcagaaccaaatgaacaaggcacgttcccctttcagcactaacggcactgtaagaacagggagaagtggaatctaatctggcctgagggtagagggtgatcagctaagtctgaaacaccatgtagaaacttgccatgtatggccgggcgcggtggctcacgcctgtaatcccagcgctttgggaggccaaggtgggcggatcacgaggtcaggagttccagaccagcagcctggccaacatagtgaaacctggtaacatagtgaaacctcgtctctactaaaaatgcaaaaaattagccaggcgtggtggcaggcgcctgcagtcctagctacttgggaggctgaggcaagagaatcgcttcaaccttggaggggggaggaggtgttgtcagccgagatcgcgccactgcatcccagcctgggcaacaagagtgaaactccgtctcaaaaaaatgaaataaaataaacgaatgatcaaaaaaaaaaaaaaaaaa

SEQ ID NO: 1477 - DNA, 2260 bp, Homo sapiens
acacgccgcgctgaggcccgcgggcccgtcatggaggcgcccaccgtggagacgccccccgacccctcgcccccttcggccccggcccctgccctggttccgttgcgcgccccggatgtggcgcggctgcgcgaggagcaggaaaaggaagaaggtagataatgactataatgcccttcgagaaagactcagcaccttgcctgataaattgtcttataatataatggtaccatttggcccttttgccttcatgccaggaaaacttgtccatactaatgaagtcactgttttactgggggacaactggtttgcaaagtgctcagcaaagcaggctgtaggtttagttgagcaccggaaagaacatgtaagaaaaacaatagatgacttaaaaaaagtgatgaaaaattttgaatccagagttgaattcacagaagatttgcagaaaatgagcgatgctgcaggtgatattgttgacatacgagaagaaattaaatgtgacttcgaatttaaagcaaaacaccgaattgctcataaaccgcattccaaaccaaaaacttcagatatttttgaagcagatattgcaaatgatgtgaaatccaaggatttgctagctgataaagaactgtgggctcgacttgaagaactagagagacaggaagaattgctgggtgaacttgatagtaagcctgatactgtgattgcaaatggagaagatacgacatcttctgaagaggaaaaggaagatcgtaacacaaatgtgaatgcgatgcatcaagtaacagactctcatactccttgtcataaggatgttgcaagttcagaaccattcagtggtcaagtgaatagtcagttgaactgttcagtgaatggttccagttcttaccacagtgatgatgatgatgatgatgatgatgacgacgacgacgacaacattgacgacgatgatggtgataacgaccatgaggctttaggggttggagataattctataccaacaatatatttttcacatactgttgagcctaagagggtccgaataaatactggaaagaataccactttaaaattcagtgaaaagaaagaagaagccaaacgtaaacgaaagaacagcactggcagtggccactctgcccaggagctgccgaccatcaggacgcctgcagacatttacagagcctttgttgatgttgtgaatggagaatatgtccctcgcaaatccatcctgaagtctcgaagtagagagaatagtgtgtgtagcgacactagtgaaagcagtgctgctgaatttgatgataggcggggagttttgaggagtatcagctgcgaagaagccacttgcagtgacaccagtgagagcattttggaagaggaaccacaagaaaatcaaaagaaacttttgcccttatcagtaacacctgaggctttttctggaactgttatagaaaaagaatttgtatcaccttccttaacaccacccccagccattgctcatcccgcactacccactattccagaacgaaaggaagttctgttggaagcatctgaagaaactggaaagagggtttcaaagtttaaagctgccagattgcaacagaaagactaggccctgtctaggaaatgggaatttacatcctaaaacctagttgttcatttgtttagagtatctatagcaaaataggttacatgtagtttgaaataaggtatcctgagttactttggcaacaagttcttttacccttacccgtggtatttgaaaaaaatcaaggtaactgtctgaatactttaatatcagcttgttttgtgaattctctgaatactgtcaacactcttatctaagtttgcctttatgatgcagtggcagcattttgaattacttttcaaagaatactgttcatatgcattgtttttgtgtttcaaactaaatacaggcagttttgtgccagctgtgatattgtgcataccatatggaccattttaaagaaaattttaaaatttcaaatagattcaacaattacattacttgctttcacattttaaaggcactttaaaaaaatctacttctcttgtaggttttgcggctagttggctattcaagaaacctcgcccctctgaatgtcatactgtaatctttaaggaagaaagctacatgaattaattgtactctatgggaaaatttctttggaaagatattttgtaaaacttttttttccaagtaaaaactttatgaaacttggtctcaaaaaaaaaaaaaaaaaaaaaa

SEQ ID NO: 1478 - DNA, 6926 bp, Homo sapiens
cccacggatcatcagaaggcgcggacctggaggaggcgccccagaaggcgacgcctcttgcctcctgtctctcgcctctcgaaggaagtttgctcttaatttcagagccgggttcgccgtcggatcaacctccaggagctagcagcgggcgcggaccgggcagtttccgcgctcagcacaggcagctcgcggtcatgggcggctcagcctccagccagctggacgagggcaagtgcgcttacatccgagggaaaactgaggctgccatcaaaaacttcagtccctactacagtcgtcagtactctgtggctttctgcaatcacgtgcgcactgaagtagaacagcaaagagatttaacgtcacagtttttgaagaccaagccaccattggcgcctggaactattttgtatgaagcagagctatcacaattttctgaagacataaagaagtggaaggagagatacgttgtagttaaaaatgattatgctgtggagagctatgagaataaagaggcctatcagagaggagctgctcctaaatgtcgaattcttccagccggtggcaaggtgttaacctcagaagatgaatataatctgttgtctgacaggcatttcccagaccctcttgcctccagtgagaaggagaacactcagccctttgtggtcctgcccaaggaattcccagtgtacctgtggcagcccttcttcagacacggctacttctgcttccacgaggctgctgaccagaagaggtttagtgccctcctgagtgactgcgtcaggcatctcaatcatgattacatgaagcagatgacatttgaagcccaagcctttttagaagctgtgcaattcttccgacaggagaagggtcactatggttcctgggaaatgatcactggggatgaaatccagatcctgagtaacctggtgatggaggagctcctgcccactcttcagacagacctgctgcctaagatgaaggggaagaagaatgacagaaagaggacgtggcttggtctcctcgaggaggcctacaccctggttcagcatcaagtttcagaaggattaagtgccttgaaggaggaatgcagagctctgacaaagggcctggaaggaacgatccgttctgacatggatcagattgtgaactcaaagaactatttaattggaaagatcaaagcgatggtggcccagccggcggagaaaagctgcttggagagtgtgcagccattcctggcatccatcctggaggagctcatgggaccagtgagctcgggattcagtgaagtacgtgtactctttgagaaagaggtgaatgaagtcagccagaacttccagaccaccaaagacagtgtccagctaaaggagcatctagaccggcttatgaatcttccgctgcattccgtgaagatggaaccttgttatactaaagtcaacctgcttcacgagcgcctgcaggatctcaagagccgcttcagattcccccacattgatctggtggttcagaggacacagaactacatgcaggagctaatggagaatgcagtgttcacttttgagcagttgctttccccacatctccaaggagaggcctccaaaactgcagttgccattgagaaggttaaactccgagtcttaaagcaatatgattatgacagcagcaccatccgaaagaagatatttcaagaggcactagttcaaatcacacttcccactgtgcagaaggcactggcgtccacatgcaaaccagagcttcagaaatacgagcagttcatctttgcagatcataccaatatgattcacgttgaaaatgtctatgaggagattttacatcagatcctgcttgatgaaactctgaaagtgataaaggaagctgctatcttgaagaaacacaacttatttgaagataacatggccttgcccagtgaaagtgtgtccagcttaacagatctaaagccccccacagggtcaaaccaggccagccctgccaggagagcttctgccattctgccaggagttctgggtagtgagaccctcagtaacgaagtattccaggagtcagaggaagagaagcagcctgaggtccctagctcgttggccaaaggagaaagcctttctctccctgggccaagcccacccccagatgggactgagcaggtgattatttcaagagtggatgaccccgtggtgaatcctgtggcaacagaggacacagcaggactcccgggcacatgctcatcagagctggagtttggagggacccttgaggatgaagaacccgcccaggaagagccagaacccatcactgcctcgggttctttgaaggcgctcagaaagttgctgacagcgtccgtggaagtaccagtggactctgctccagtgatggaagaagatacgaatggggagagccacgttccccaagaaaatgaagaagaagaggaaaaagagcccagtcaggcagctgccatccaccccgacaactgtgaagaaagtgaagtcagcgagagggaggcccaacctccctgtcccgaggcccatggggaggagttggggggatttccagaggtaggcagcccagcctctccgccagccagtggagggctcaccgaggagcccctggggcccatggagggggagctcccaggagaggcctgcacactcactgcccatgaaggaagagggggcaagtgtaccgaggaaggggatgcctcacagcaagagggctgcaccttaggttctgaccccatctgcctcagtgagagccaggtttctgaggaacaagaagagatgggagggcaaagcagcgcggcccaggccacggccagtgtgaatgcagaggagatcaaggtagcccgtattcatgagtgtcagtgggtggtggaggatgctccaaacccggatgtcctgctgtcacacaaagatgacgtgaaggagggagaaggtggtcaggagagtttcccagagctgccctcagaggagtgaaagggacaatttggctgaagtctttctctgaaaaaagccaaagggttataggggtacacttaggggttgcatgcaagctgttaccaaaaaatttttaagtattttcttaatttgaataataaaaccagaggaaatgcatacagggcatgagcaactgaggcaaacctttgtggacatgaattgttctacgatgaatttttgctttagtattttaataagaattacaaagacaatggcatacttggggtgagagggagctgaggatgtctgaggagggaatagtattgcagggaagactgagaaaacagtaggatgacagttttgagtatactctgcacttttcaattgtgcaatcttcttgtgcactttaaggctttttaattttgtttgagaatgcaaatgtatactgtaagtctacctttactatctactatgcctacttcaccatctcttaaggactcggcatttgtccacagtcagactgcaagagagggtaggtcatgaacagtcacccgtgctggctgtagcccccacagaggcaatcatgcccaatagattcaagagaagctaagcggaaatggagggtggaaggtgtgatctgtgggactgtctgggcctgttactcatcctgctatcaatttcttattaattaatcttgatgattcttattaattaatcacatttgcaggaaattcagatgaggcaagaaaattttattggcctgggtaagactgaaagcattccaaattaggcttagactgtgcaaagggcttagctaagttatcgagcttaaaacccgtcaattaaacaaacattatttgaacagttactgcatgccacgcactgtgttgggcttagtaataaaaaaaagaaaagataagtgcttgttctagcataaattaaaaggtccaagggaatttaatctggaagagaacatatgccaatttttaaactatgacagcttttttttttctctttccattcaaatagtcctggttcattcccagaagggcacaaaatgaatgaataaataaataaatgaataaagacaaaagccaaggtgtatgctctcaagttccaaagatgttatcaaaagctgaaatcatttgtttggtcattcagcaagctaattgagtctctgttatataccaagcactggggataccatggcgaaaaacaactttgttccttcctcctagaacttacattttaatggaaatagacaaaacacatcttcttaacggatggtgacctataaccattaatgttgaaaatggaagagacttgcttccaaaagattaaaaggagttgttcttttctccttcagaaaaataccagatcatttcctaaaatctccagtcccaagtattacatcgtggtttccctccccgactttttattttattttattctatttttttgagatggagtctcactctgtcgccaaggctggagtgcagtggtgtgatctcggctcactgcaacctccgcctcctgggttcaggagattctcctctgtcagcgtcccaagtagctggaattacagccatgcggcaccattcccggctaatttttgtatttttggtagagatgggttttcaccatgttggccaggctggtctcaaactcctgatttcaagcgatccacccacctcgacttcccaaagtgctgggattacagcgtgagctacctggcccctccccaaattttaacatcagatctcaacatatttgttgagaacttgtttagatcatcactatcgagtaaatttatgtcagttctttagagcatttgcttcacacacagttcaaccatttaaccagaaattaaaatatcacccttttcagccctcccatgaagaatttctaggtcataaacatgaataatactcagtatatgtataatatcatatttaattgttgcaacttttcttggcgtgtttaaatcctcatgtctttgagggatcccaccacaggtgaaggaagtaaagaccacttctcccccagtctctgctttctgcagtgctcactcatatcctggcatttagcatggtgtgttgaaattaggtttacttcttgtctctccaagtggctcctctcttaaaagacagaaactagggtttagtcatcatttgtgcttcctgctagaaacccacagccttgaataatggcttcctgcctccttgagtcactttaatatccctggtgcataggacctggcatgcgtcaggctgctcgggaaatgtgggaactggacacccagaacactgctgtgctggggctatttggggcctgctgtcaggcagaaagacgttttgaattgggctttctgcccttgttgagttttctcttaagtaaagtccaaagtccaaggggcagatggccagatgcactgcccagtaaggcaggaagccaaagaggcagtgcccagccccacaaaggctgcccgactccctgggacagtagtgtggagtcccagcccaggctgacctcacaccggagcttcctagcttcctttctttgctcaatgcagggcttcttgcaccccctggaaagctaagagatttttttcaaccctaaaagagagtacctttcactgcattggatggatgaacatcagtgccctaactttatccatcatgtaggtcagggaggactgggcactatttggcaggatgtactccagaatataatcaaagaattttctgtacatatttcactaaagacaagtttttgggctggatgtggtagcttacacctataatcccagcactttgggaggctgaggtgagagggtcacttgagcccaggagttctagacaagcctgggaaacatagcaagatctcatccttacaaaaaataataatggtgtgtgcctgcagtcctagctacttgggtggttgaggcaggaggattgtttgagcgagggaagttgaggctgcagtgaactatgattttaccactgcactccagcttgggcaacaaaatgagaccctgtctcaaaaaaaaaaaaaaagttttctagaataagcaggatgattgtttaatttgaagatggaacaggaaactagagtgcatttaaaatactctgtcttcattttaacatgttgaatggaataactgcatatcaccatgagtttgttttgcttttcatacagacttgtatgtgtcatttgagtggtttccagattggagcgaggttattctgatctaaatgaacagcatttttttccttagcctctgtttgccactctgggtatctctcctatgggcaaagccattagaaatgcataaaacctcgagacatggtttttggcaaaaactccatgactttaaactagctcttttactactgacctttcacagagaaaaaatatttcccttgaaaaaaactgggcttgtcattttttcccttgtagctttaagcagagacataagtgccttgcattacacatagtaaactttctttaaaaaaaaaaaaaaaagattttggagactaccagggtaagattccaacttgtccaaaagctttctggccttacatattttattataaaaattctcaagtctggtaatcttctatgtcagagctagtgatttcaaaaggtttcacaattccccaagacaaaagtgattttcgttcattataataaggttaagtgatatgtgattcatagcaattttgatgtgaagaagggaaggacatcattgacttaataatagtatcagtcggtgcaacagttggcaacatgtgccttcacactttaccataaagagacgggtttgagggtttgccttctaaagtctgcaacttcaagaaaaaaaatcgacactgtggattgactttcccggtcactatataaagcaaataaacttaaaacactttgtaaccatgtatttactctgccaggtgcctatattccaataaaatgttcatccttgaa

SEQ ID NO: 1479 - DNA, 961 bp, Homo sapiens
ataaaaactgaaataaaatgtcaagaatggggaactaatggtattaagttttatatagaagggcatgagggaagtgtattaaaatttgttcaaatttatgactgagagggctaagaaggtacttaatttcctcagatgatactttgcgaacatgtggtctatttggttgacctttgcaaatagttgaacaaccacaccgtgtattcccataccccctagactgcctgtccaggccaagccttagtaccacgagtccacagtgaagtccactccaggttatctgcataggtagcccaggcacctttcctcttttcctttaggtgcctcccctctacccacaacctcttatttcatctcaaacacagctattacaacatgttttatttcactggaaaattctgtaaagaactaaatctggttcccttgaagaaaacatttagcacagcttaaataaaagttgagaaggagggtaagagtgcattgccccattctagctctgttgctaccttacctctgactctaaggccctgtgggatgaaaagcaggtatccaaaagaactctgcttggcccwctagaatacggccttagaggacagaccctgagtgcctygcttttctgagcccacagacacgayagaaatcactagtgagctgccaatggggagtaamcaaaaaatattgtaaaattmaamtgaaatacagaggctggagrcaggwggatcaactgagggtaagggagtctatagaamagcctagscamamatgataaaamaccatctcttctaaaaaaacaaaaaattagstrracgtggwggmgggcacctgttatyccagatamacarggrgmctaaggmaggagawtcwtttgawcccgggaggaaaawgttgccagttarawgaaatcmcgmmtttcaatacarawtgarsaamagggscaamtymaaaaaaaaaawaggraaaa

SEQ ID NO: 1480 - DNA, 198587 bp, Homo sapiens
gaattcactcaatagagggaaatacactttttttttcttttttttttttttgacagagtctcgttctgtcgcccaggctggagagtgcagtggcgcaatctcagctcactgcaacctccgcctcccaggttcaagtgattctcctgactcagcctcctgagtagctgggactactattattgacaaattttctaaactcccatcaggtttctcaggtcttacattgttattttctggataacaattagaatttttattgtttttaataagaaaataaaatattttaaaacatgtaccaaaaataattcccaaattgacaagttccactttaaatctaagaaaaagaaaaactctcatatctgaagtttgctttttcattcctgttgaagttcccttcaataactaggggaggctcaataactttgcccaattattaaaccagaatagtaatcaggagccatggctgaaactcccaattctttaccccaaaactgtcagaggggattttcaactctgaactcaaacaaaacaacaggattggtgaaggatgactaaatccacctcaaatatgaaactgcccatatttgaccatttttggtttagaaaaaaagtggtattcatatggtacaagctaatagaaccatttatcattatcaaatcatagggacatagacaactagaagcaaatatccagagataccactactcactggtactggacacatcccaggcagaccaagaggcagccacatgaccgtttatcctccacctgccatcctcatttcctgtagctattaccaaacgactaggacaggacccaaaaaaatcatcagcggtgagagtagtcaatctagagaggagagtgtcaggtttttcttcttatcccatagaatggaatgaggaggattcccacctgccccaaactaccaaggaaggcaccgagatactcacagagatgtagagccaacaggaagggcagacagacatgtcattataaaatagcttttggatggtaacagccctttcccaaagcagacctccttcttgcctggagactagactgcctttgtaggactaatattagccacaaaattagaaatgatggtttagcagtcatgcagctggaggctgcaagattctgaccctccctaaactgctcctaagatcagtgcttgagatactttgcatcccctgcacttgatggatcagctggcaccacccagatcaataaactggctcatctgatcttgtggcccccacccaggaactgactcagcgcaagaagacagcctcaattccctatgatttcatctctgcccaatcagcactcgtggctcactggcttcccttcatcgaccaaattatccttaaaaactctgcttcctgaatgctcgagagactgttgtgaataataataaaactccggtctcccacaaaaaaataaaataaaataaagtagcttttgattcagacttgctcataagccctcctgtgcctatttgagctagaggagatgggagttggtgagatgtggcaggacaaaatgggaatgacaagaggaaggcttatagtcccaccttttgtcatagcaaagctgtgtcagtcccattggatcaggtgggtatatattcaaggtagctgtgcctgaactgccttagtattagacaagtagaatcaagaaacaagagactacagggtgacggctgagaggcagggacagggaaatggggtagaagaggagaagccagaggtctgtagtggcaactatgcagtttggaggccttcctgcaagggccttgaaagaaccatgcttaagtccctagagagaagaacacctacatatttacacagagaagggactaactgcccattgctggctggggaagctgcagtgtataagaaaggattacaatggtgaattagtaagtataaagttctctgcccctttctctgttacctctgcattgccccaacctatagtagctggtagaagtgaaggagcttcccccattacaaatccacccagccatagataaggcatgtgacaggaatcagggagaagacgagattagagttgattagagattgagttttaatatctactcatgcccaagagctagttaagaagaaagaaagggagatgcaaccgagcatgattaaaagcaatggatggaaaaaattttttcattattgtacattgacaagttcagactgttcaataggccagttacactggtatctagactgatgaactaattgaaatttctgggtcatctctgtggcttcatttgctaaaagttctgctcttacagtgtaattgaattcaaagacaagaaatcaccagtgtcaattgtaaagaagaaagatgaacttttatttggaaagaaactgcatcaaattaaattaaatacagtttgttgttttgtttcaactcacttctgtcacatataatatctaaggagtagacacaacccagtccaaatagtattatcaacagcaccaaaaaaaaaaaatgcatttggtttatttcattgatggggtgtggagagaagaataaagccagtggttcttgtgttcaaaaaatatatagttagttaaggccgggcgcggtggctcatgcctgtaatcccagcactttgggaggccaaggcggatggatcacgaggtcaggagatcaagaccatcctggctaacacagtgaaaccccgtctctcctaaaaatacaaaaaattagccgggcgtggtggcaggcgcctgtagtcccagctacttgggaggctgaggcaggagaatggcgtgaacccgggaggcggagctttcagtgagccaagatagcgccactatagcttggcctgggtgaaagagcaagacttcatctcaaaaaaaaaatatatatatatacatatatatatatagttagttagttaaatgaatttttcactttttagttgtctcaaaaattctatgattcacagatcacaatgatacatttattctaacatggctactgatatcatttggctgtgtccccacccaaatctcttcttgacttgtagttcccataatccccacatgttgtgggagggacccagtgggaggtaattgaataatgggggcagttacccccatgctgctattctcatgatagtgaattctcacgagatctgttggttttataaggggttttcccccttttgctcagcacttctctctcctgctaccttgtgaagaaggatgtgtttgcttccccttccaccatgattataagtttcctgaggcctccccagccacactgaactttgagtcaattaaacctctttcctttataaattacccagtctcaggtatgtctttattagcagcatgagaacagactaatagagctaccttttgaaatttggtttcataaagtttcagaaattgaagccacataaaaagaggctacttcacaaagagcttttccaagtttataaaaagtgttaactactttgcaaatcttccctatagcccagccctatcacaaggtaaagatcaaatggacattatttactcattatgagagacatgtcttttgttagaatcattaaacccaaatattattctctttaggtcattaatttggaaattttcttatgaatggtaataatctacttagcttcctatgagaccttgtaactatattagttattttactttctttgccttgagcatttaggatcttggagtttaatatctctggaaatttacgaagcttgtctaaagagatggccacagtggtttaacttatacattaaatagcaactacattatgattaattcctcatctgtcaagaactttttgaacttcaaattgtcatacttctatccattttcttaagacaaatctctgttctctggacacttgagacaagtatgtttcttcaaagcaattttaaagttcaaatatcacccatttataaccatctgctcctataaaacttcaatgaatatttcaaacattagcaagtattttgtctcctgtagctagaagcaatgtctgcatgtcctttccataagacacaggtaagacttctatttattcagcaacatataagtaacagataggtgaaatgggcatgaaattgacaaactatactgtttatggaataaaatgtataattcttttcttcatttcctcaaggttattattgtatttcataatttactaaaactcaattttacttttaagtagcagaaaacatctatgtgactacccttttggtacgaataacctttcagtgctgttactgaacagtacaaacccaaaattttgagttcttgacagtactctgcctggaaatggcatagactgtgcactgaatttgccattcattatgcaagcctcaaattaataagatggtgttttctatgaatgatctctaattatagtctttcaccaatctaattcaaattggcttctcctatagtaagtcaaaatagctgcattttactctccctgaaaaataaagtgagatccaatctgtcttccagagctaaggttgtaagactgagctgacatgagaatacctcaatgacttgaggtcacaggttgtgaaacttaggactatgttcaggtaagtagagagtgtctctgagggatcactgaaaacagggctgagcagagagttgggatccagcaacaaagcaacaaggacaccaaacaaggaaaagaaattacccagagggttgttggaggtggagcctagagaaatctcccaggcactgggtagcacatgtgggtcctttgtatacagccctcatggccctaattaaaaaaaaaaaaaaatttggaagcattaccaagacatgctgacttttttttttttaagattatgctcaaaagttcaaagtaaatctcagcctagattttctggagatagctctcacactaaaatctttggagttaacttgtctcatttgggaagcgcctctggtattataacctaaattatgtccctgaatgttgaagttttaagccccagtgtgactatattttggagatagggcctttaaagaggtaattaaggttaaataagatcatacagatggaaccctaatatgataggactggtatctgtataagatcctcacatcctataagctatccttgtaaagaattctatcttttttctcacaggaaaaagaccatatgaggacacagagttaagggagtcatctgcaagccaaggagagaggtctcagaagacacaaaacctgctggcactttgatcttggacttgaagcctccacacctgtgagaaaattaatttatgttgtttaatccacccagtctgtggtattctggcagccctagcaaagtaagacatctgggtttaccatgtagaaattgtatcagtgtttatatatcttaaaagagatatacttaaaaatatgaaagtatttttatctactgttgccacatctcagttaacaaatactagttcattttcaagaaactagtgctcatggttttttgtatgtagtaaagaactatataagcaaaacgtataatgattattttttgctctttctgcatcctgtatgaccaatgatattattaggagattcaggcatctggctgttaacataatttgtagtggtatacaaactaaggagtagtacgtcttcatctctaccacttccacttaaatctacaagcttccgctcctgagccagatgagtgatatcctctttgtgccatttttagttttactaccagtttaaaaccttttcttttattctcttattttttaattcattctactatgtactgaatacctattaatgtgccaggtgtggtattagacacaggatatgcttttcctgctcacatagaatatatagcctagagggggagacagaagaaaaaaaattatgtaaacaaatatataacgtgtatctactataaagaaaatgtataaagtgtaatgatagaaaataagggagcctacttcagaaactgatgggccatacctacctacttagggtttaagcaagttgagtgtttagggaaggcctctggtctaggataaggtaatgctagcatttgctgcaaaaggtaaacacctagatgtcagtggcttaccacaacagactttgggttctccctcacgtacagtccaataagttgttccgtaggcagccttccacgtagtgattcagagacccaggtttctttcacctgtgcctctgtcatagcctagaacctcagagtcttttgttttcagtcgatgaacagaagcagagagagtagaaaagccaagaccactttttgtgtcttcaacttttatttttatttctggggtacatgtgtaggacatgtggatttattacataggtaaacatgtgccagggtggtttgttgcacagatcaacccatcacctaggtattaagcccggtacctgttagctatacttcctgatgctctttctctccccactccccctcaacaggccccagtgtgtgttgttccccactttgtgtccatgtgttctcatcattcagctcccacttataagttaaaacattggtgtttggttttctgttcttgcattagtttgctgaggataacagcttacagctccacccatgtccctgcaaaggacataatcttattcctttctatggctgcatagtattccatggtatatatgtatcacattttctttattcagtctatcactgataggcattggggttgattccatgtctttgctattgtaaatagtactgcaatgaacttacacatccatgtatctttataatagaatgatttctgttcctttgggtatatacccagtaatgggattgccgggtcaaatggtatttctgcctctagatctttgaggaatcaccacactgtcttccacagtggctgaattaatttacacccccaccaacagtgtaaaagtattactttttctcccaacctcaccaccatgtgttgttttttcactttttaataatcaccagtctgattggcatgaggtggcatctctaactgtggttttgatttgcgtttctgtaatgatgagtgatgttgagcttttttttcatatgtctgttggacacatgagtgtcttcttttgagaagtatctattcatgtcctctgcctgctttttaatgaggttatgttttcttcctgtaaatttgtttaagttccttgtagtctctggagagtacacctttatcagatggatagattgcaaaaatattctctcattctgtaggttgtcagttcactctgataatagtttctttttaattatattgcatttgtcgatttttgcttttgttgcaattgcttttgacgtttttggcatgaaatctttgcccgtgcctgtgtcctgaagggtattgcctagattttttcctagggtttttatagttttgggttttacatttaattctttaatccatcttgagttaatttttgtataaggtgaaaggaaggggtctagtttcaattgtctgcatatagctagccacttctcccagcactatttattaaatagggaatcctttctctattgcttgtttttgtcaggtttgttgaagatcagatggttatagatgtatggtgttaattctgaggtctctgttttgctccattggtctacatgtctgttttggtaccagtactatgctgttttgattactgtagccttgtagtatagtttgaattctggtagcatgatgcctccagtgtcaaggccactttttaagccctttagcacacaaatgatcacatcacttgtgcacacatctgttggtgaaaactgatcacataacttcactatatgtcagaggaactgggaaacatagaccctgactggatagccacttctccaaaacaactataccttatagaatgagaatacaaatgttggtggagacgtggccatctctgtcactgcccctctttgaggaaaagacactgaagaagagatttgaaagataacaaaaagtcagaccatgtgtagagctgtgagagggtgagcccagccagaaggaactggacatgggaaagtcagcctcaaaacaggaaaggtctgccatgttcaaaagtcagaaagaagagactgaagtgtagcagacaagggaaaggaggcatttagtgatattggagaagtgggaagacaactgatctgtggactcttgtaggccacactgaggagtgtggatatttttattaaagtatcaagatgtttttaatagcataatagtgtggtccaatttatttttcaaaaatatttatctggaagtcatgagaagattggcaaggagtaagagatggagtggagagatcaaaaatgaaactcttttatttcctaagacaaaggccattgtgaattgaataagtgtagtcactgtggaaatggcaaaaactgaacctggtaaccctaagaagcagtaggtcatttgcttggcctaatgtgcacaccttgctcatctgatgggaggaacgtagcacatggatagctgccagactttgcattttggcaatagtaagacaggcctagaagtctgggcttcaggtggctagaaagggaggccccaaagtgatgtaagaagagatatattaagattgaaagagatgttgccctggtgctcacatttagggagaaatcctacatggtagtgagtttagaatgttagtattgacaagctgcaatgaagacatagatgtttgactctttttatgtccatgaatataaacacaggcaaaaaataataacgtgagtttcagagtaaccatattactttttttatttatcaagcttaggcagaagaatgccttcccttcatctaaacttttaaaatactgctacagatgagaatttaaaatgtctttggtgaagggatatgcagcctttatttgatctaagactttggttttgaaaagtgaaaatgttagggctcctttctcacattgaaataccacatgagacaaatctgaatatcaaaggatctgaaaaaagaaggtgaatgtaattccaaaattcaagggatcaatggaagatggtcacttcacagaattccgtgtgtaggactcccaagttacctggaggattatctgcaagcttagctgcctctgatgaattttttgagagaagaaaccaaccctccagcctacttcagaaacccatagataaggagttctttagtgctccagtatatttctggtgtgtgttaaataagccaggattctacatgctgtgtgcatggtgttttgcaagaacacaaaagactcattcctgccttaaagggctaagatatagatacaggtggtttactaaaaggcctgcttgcttgagaaagggttagtggaaatggtatgaatgtgaaagagatagcagggttttacccaaggcaggcagctcttcatctggcatagatgctatttcattcacagcattaggtataataacagcaaaagaagcccaacacgaaattacagcactaaggaaagcaaaataattacagtttcgaaaaaaaaaaatccccagctcactgaaaagtaaagctttataagccctttgtggaacttctggatgattctactagatttcttcacttaaaaagtattaatgataggagtacttgatgaaattctttggcaatttttactagtgcttttgaagaggatcaaagtcatcagtgtgtggacatgaccagactctgtttaaaaactatgtttaatcggttttttactcagcttcttggtgacaaggacctcagtcattttgcaagaacctttgttaagcttttttgggaacaaactgacttgccaagtacaattaacaacggtgaaggttgtaaaacacagacattcctccctgcaggttccaaactctaaccataaagaaaagatatattaaaaataaatggaaaaacaacccctttgccttcatttgcaaaggcagctctgtgtactggagctctcacccaggaatcagacaatctagactgtcttttcaatactgccactactcagcaagcagggtgtttaacccctccaagccacactgtccattttgacaaaatgatggagttgcaataaatgacctataaattaactcatttctgttctaacacggagcttctcagacacaataatgaatgggaaagcttcacattgagtgggcaaagataacagaaatcaccatctagggaggccattgaagacactggcagatttagaggctttctgtgtgtttcaccaatggaagacccacgtgccaagcatctgagttgcaatgctgagctttcacctggagatctaagccagtcacacactcagagctctgactaacattaatggtaacccgtgtgtacatatcaatgctggaagcagtgactgtacttcagaaacccccaggtgaagccaaaggcaaaactatggctataattttaagctcacgttttgagcaaaccaaatacaattttaaaaggaaaaaaaatgcccagtttaattgtctccctgagaatccttacactataccttataaaggaaaataaaattagaaaccttggttttagtagactaactgtcaatcctctcaacgaacaaagactctcccatggcatcccttgtctctgtatttattgatggcttgtatcgttcatcacacaataataatctggatgtgatgcagcagaagaaaatgcagaactgttttaaataatcatttttgtttgtttttactaagtagaactacagaattagtagcatcctggcgcagagctttaaaagtctcagtcaagaaatttcaattgcctttgcagcttttcataaaaattaatttgatgatcagccagatactatcaacatacaagatgcttggtacacagaatataatatgaaaagccaggacagaacattactaagcatttcagagccttctggagtgaaatataatttttaagtagatattgggaattagggaatacatatcatgtacaataaagtcatgctaaaagatgttcctagcttatctcaatctccaaaagaggccattttcaatctactgctttttaaatgtcctaaatttctccctttgaatgcagaaatgctaacatttattaagcacttccctgttttgggtaatgttttaaatatttcatttgttcaacaaatttgttattgagcactgactactcgcctggcactgcatccagtgttaggcatagggttgtaaaaacccacaccacctataccctcatggactatatacactagaaggggaggcagaaattgaataaacaaacttattcaatattattacaaactgtgaacagtgtgatgaaaactctgcaagatatcatacctggaaaagagaagggaaacccttcctgagaaagtgagttgagacctaagaggtttcctccagggagctggtgggagctgccgacagacagaagaagatgggcaaggcttttggggatgggtactatccctaccctcatacaacaaaaggacaaactgatatttaaagacattaactaacttagcctaaggcaatgcaggtactgcctgacaagtgaggagtcaaatgtgagtgtactatcagagcttcaataatgaagggacctatgggaaaaacaggaaatgcatcctcaattattacacttatgagttcatgacatcttgtgtttcagatcaactgattgtcctctgaaggtgtcagaggaaaaaaaaataatcctcttgtcatgaacagcatcttgcaatgcctgggcaaatcattatcgccattattattattatttggctccctcagaagctgcaggcattggagcactgccaataacaggagatacgaggttcactgagccagaagaatcataccataaatcctgatgccattttgagaacattaaaaagcaaacaacccataacattatagagcaagaagatgaacaaatatcaccttccccctgaatatgagaacaaagtgcattagataaataaaaggctgaccatatcacataaaggacaccgagaactactgatgaaaacagatcaaagaaatgtattccacttttctgtctgggcaaaccaggttacacagtaatgatggggctcagatcacactaccccaaaatatgagaccttggtatgttggctattttaagctgaaagaatctgagaaacatgtttccagagggactctctgactttcctctgcccttcttccctgaagcaggtcataaggctctcatgttcatggtgccttccttatatccacggaaaggaagatccttatctccaagacaaaggatgtcaagaagaatcaaaacaaacaggctttgctgtttcctccagttgattacccttagctcataatcttttcttcttttttttttttttaccccatcatatttgtcattgactcttcatcaaacctaccattaaaacactccggtttaattatttcttcacgtctgcatttccttatgaaggctcttgtgccatgaaaaacatggtaaatcaatttgcatgcttttctcttgttaatctgtcttttgttaccggggccccagccaatgaacctaagaaggatagaaggacaagacattgttcctcccctacagtagttacctgcggagctgccagaagcatcagataaggctccactcctgatcagtgtccatttctactatgtttttctaactagcacctaaaatgttaatcagctattaacagtagggtctctccaaagttatacagccaaacttagaaataagaatggaatttggaaatgctgatgagactggaactgtgccaggtgtcaaagggtaattttttaaatagataaaatcctgactcttacacaaatatcaaacaaacacatgtaataatttgatttaacttattactcagaaagagaaccagtaaaatgaaagctggttcaaaggagaagccaaagaaaagacatagctatagattaggaatattgaaatgaattgcaaatggaagcaaaactggcctctttcacagtatacgaggagtgtcaattgaagttccactggataggacagaagttgcatgcctatatacaagaattatcatgcattactatcaattatctgcaacttatagagttgtaaaaatgtgcaaggacaatgaaagttataattagatagctcttaagtacatggccttccactgaagcacacatttttttttccccacacacagagatgaaatatatccattatgccagaactggtgacttcaggcagatcattgcataatgtaaggacaagtagaaattaaaaataagaggcttaatttgttcctgattaaaataaggaaagaaattcccctctcctccttgttcttaaagcatttattttagaaaacttaaaataataagtactctcttttctctttgaaatgtatataaattcttttgaaaactaaataggccttttgtcaactttatgacccaggaatattttttctcaagaagctgggagccatctttttgaaatacaaacatcaaaggagatagcacttctctttctgtgggagggttggagccttacttcactgacgctggaagccttgctccgagttgcaaaactaccttttttcttttttgattagtattatttttgattgacaaatcataattatatgacatgtatggagtataatgatatgtttttctcaacgcacacaatgtgcaatgatgaaatcaagctaattaatatatccttcaccttacttacataacattttttgtggtaataaattttctcttagttattttgaaatatatagtatattattattgattatattcaccctgatgtgcaatagatcacaagacttcttcctcctgtctagctgaaactttgtaccctttgatcagcaattcttcatttccttgctccctactcccacccccagccaccaggaacatcattctactctctacttctatgagttcaatatttttagatgtcatgtataagggagatcaggtagtatttgtttttctgtgtctgacttatttcacttagcataatatcctctaggttcatttatgttgtcccaaatgacagaatttcattctcttttaagactgaatagtattcccttgtgtatatgtaccacattttctttatctatttatccattgatggacacttaggttaattccatatcttggctattgttaataatgctgcaatgaacatgagaatgcacacatcctttcaacatactgatttcaatttctttggatctatttccagaagtaatatggtagttctatttttaggtgttatttgtttttgtttttgtttttgtttttgttttaaaatggagtctcgctctgttgcccaggctggaatgcagtggcatgacctcagctcactgcaatctccacctcccgggttcaagtggttctcgtacctcagccacccacgtagctgggactataggcacctgccaccatgcctggctaattttttgttttttggtttttttagtagagacagggtttcactgtgttggccaggctgatctggaactcctgacctcaagtgatccacctgctttggccttccaaagtgctgggattacaggtatgagccacagaacctggccaatttttaggtgtttttttgtttttgtttttcttaagttcctcaaaactacctcttgccataaaaatatgagatatttgtttttcctctagataaagccaataagctaacatggatggtcacccctcttaccagagagatttaggataaatgaactatgcatgacaaatggtgctgtcaagttctcttacttgaggactatggtttctcttgaaacacgtgtgtaataggttgtatctctttgcctgtataagaagatgagattcctttctgtcttcgcaatctcttattgaattgcctatgatgtgtattgcattctggtttaaatcttattcaacaataaaactggcttctttctccactagtcttatagagagaattttgcttttactttcatttcccccaaaatagtcaacccatccaaatgtaccagaaatcccagaagcatcctgccagaatcaagaaccatcctgccagaatcaagaaccctgtgaaccaaactgctcgttccctggtcactgtctccttgcctccagacacaggatgatgccttttgcaaaaatcaaaaaagcagtgaacaaaaggcaggcattctactgtattcctagcttacagtagatcctaggtactatgtgtagattgacgtatgcagttaagaggcctcagcaaacaaggcagcctagggaaagttaaaatgcccacagcaaacatgatattccttgattgctgtcactgagcattgaaggttggctccccaaatatcaccaacacaacctgctgatagacaaagctgactttattgcctactacagttaagggagaaaaccacctagcaatgctttggcagtatctgagaaagggggaagataaagtcagaatctatgagaattggatcttggattgacctaaggcaaatattttaagagggattgaggggaaattttggatctgggatagtattgggtaaaaattatcacataacagtccagaagtggtggaaataataaagtggtgattttgaggagagggattaaaaaatttttaggttataaatgtctgttgatgttttccactaaagagctgtttggtcttttgagaaattcctgtaatgaatagtcaaagcattttcctgaatagtaaaatcatgctaatgaagacagaggaatagcacaaactcatattaatgcggacggtaaggcatggctttgattcccagcatctaggctgtgtgggggtagaggattttgacttttagaagctcaggccaaaactcagatgtgcaggaaatgttctttttctttttctctaagtcagcttatttgctattttgggccctgtaaggtttttaatatccatatttattaatattatcttgaatgcacacacaaggtttctggagcagagaagattatccatgaactctgagaaataaagaaagatttattttcccacaggctctgattatgctggaaaatcatctcagcccattagggttcatcacaccactttttccctcttgagtcagattcaacttgtagccccagcctccaagtccttctgtttccccagaggtctactcagggaacatagttcaaggctcctctatatagggaaatacctcagacacctctgctctcatctctttccctctttgctttagctgccccaacccggggactcttagaagttggaggaagccattcctgcctcaaacccctaattctcactcagtctgtgcacctctactcctccataccagggtttctcaacctcaacatattgatattcttggctaaataatttttgtggtgggagcttgttctgtggattgtaagagatttagcagcaccctaaaaatacccactagatacccccaagttgtgacaactaagaattccaagtgttctctgtggcaagaaaaatgggccctggttggggaccattaccctaaaagtttaaattttgtgaaataaaaaccaggaggaaacttcctgtgtatttccttcttgcttgcctcatttcttctctgaggtactgaacttaggatggcctccccagacaaatgagggcaaggcaaaagaaaaggaaatttggtggtggaagaacatagatgaataattccttatagtatcccttcagttgaccactccatctcagtgctgattgaaggtcacctggggactattaaaaatgcagaatctcaggctccaccttgctgaattggaagttgggcactggacccagcaatctgtattttaacaagatctccagatgattcttatgccatgtaaaaataaatgaccacccaaataagactaagcagaggctcttcattcagagcttgctatagtaagggagtcagtcaccatcacttatatttggcagggactcaaagggtgggaatgctttactgacatgggaagctagacgaaggctattaaaagtggagcagcctataggattgatttgggagcatatttcactttctctagttgattctgagttagaagtggggtcaaaaactcatgaagctggcatttcttggccaagtcccaaccgttctgggccatttgctacagaggttatggtttggcttcttgggctggttgctgcaagcattagttagaggttgtgttgtgttggattgggttgggttgggttaggtttcattgtcatctatactctggccattgtctggttgtatatttcatctctcagctgctaaagcttgagaatcattgctgttttcaaaagagctgactgagccaggtgctgcagatttgaggaagataccctcagggagctgacagtttagcacagaaggacactaaaactacctgccatgaaaatcacactgatgcagagagccataaaggaagccaaaacaagatttcctgagaacggagaggagtgaataattccctctgacagggagctcagggaaggtttccagatggtgcagcatgtgtgttgaaccttgaaggattagtggaatttgaaaacaaaaaaagagaaataagataaacctactacttctggggaggaaaaaggtttgtaatcaaaaaaagagtttacagggctcaaaaataaacattggtctctctaggctggagggaagggaatggtcatacaattcatgccgcagcccacttactcctcatcactgtatctgtctctttgtaccagaaaggacaaaagatcagaaccaggtacatattgatacatgtttagaagcaaacagctcttgccttctggcaaggggcatctctaccagtggcagcccttaaagactaaagacgctcaaatagtagcatacacacatgcaggatgaaacctggggaagcaccaagtcctggaaatggaaagaagatgagactgtcatatgaataacctgtgcagagtgtagagaaggaacaaagagaagggatcagaggggcagggatggaaaaggagatgtaaaaccagaaagactgaatgaagaagggagagccaaaggaggaggagcctccctggagagctcatcctgtggacgggagggagaaggcagcaaggtctttaaggggaaagaaaagggaaatcgattattttatagccctgggattacagaaaaagaagaatggcatgcaatcatgtctccagtgctatctcccctcatatgtaaaaaagtcctaatgttcatgccctatttacccccaacctcatccatagcacagaagtggggactccatgggtaagtcacagagtataagaggaggagaagaacagcaggagcagtcagcacagggacctgccgactgctttcttcccagagaacaaggtgaatgtatctgcctttctctgcccttctcttctccagagccaatagttcctccacctttccgccctttcatttctggatgttcaacttttatctttacaatatgaggaaagcaaaggaggataaaacaaatcttccaagctctcctgtcccctaaggtacatcttaaaaaacagatgccctttgactacaatcaaagttcaaatatggacttttcctcaaatccacatttttcctttcttaccagaaaacattctgattccaattaattttcccagtggatatcttgaaacaacgagccagtgcacctgggtcaatcaggcgctatcactgagaaatccagcacttggctaaaggataaatttggtacagttagtctttctatgagggaaagccaaggaagaaaattgctaattgatggcagctattatgtgccaagcactgggataaatacctttatatgaatgcatacttaatttgaaaaatcaccatgggaagtcagcactgtgatccatgattgacagctaaagcactgaagctaagtcttagttcacaaactagccacctcattagaaagcagtggaactgaagcctgaactctgctaggctgaatcctaatcttttgctccctttgccttcatggcaacatatctctgcccacgtaagtgtgttcatccttcacaatgactccctgacccctcatatgaaaccttgctctttaggaaggattcatcgccagtcattttaacttagtatattttcccacgtacctatgttccagagaacacagatagcatgaactatggatttcatgggcaattaaatatggaaaacaccaggttaaacaaatgtaagcagattacttacttcttagatccttgattatggatacgtacattgcgaaataagaagctcaaatagcagtaggatgaagtgagataatgggaaggtacatcacagtgctccaaaagggaaaattgtaagacaatacaatgtggtgtttaagctctcagtctctgggaccagacttcttaggttcaaatcccagatctatcacttatcacatcagatctagacttttgggcaagttacttaacctctctatgccttgaagaaatggagatagtaaaagactttaccactttcataagtatgtcataaagattaaatgaagtgatacagacaaagtacctttagaatacagtgtgtgtgacagccatgaaaatgcacctctcagatctcctgctgcaaagagcaaagtcaactgacagccccagctgcctcaccactctgagtccaccagtgtgtttgtgttgaggccacattttcacgggcattgcacagtatgggcactaatacaagcctatccctaagggactcctctaataggtgtcttcagctccaggaccccttatcctggctgaaacgttcttagcatgcaatgtaatctaaatttcttcctactcaatccccctccttttctgtctccacttgattcttcccctgtatgcttcagatgtttccccaataaatctcttaggtgtctaatcttattttagcatttgcttcctagaagacccaaactgacatggctaactacagtcaggcacagcccacaaagttagttgcccatggagtcccttactcaaaagcatttcatgatgcttttgaaatgcacttgaggaaatgagtgaatatatctgttgttaagtttacctgtagggagagccattttttaagcatttgttacaaggaagtgaaggtgagagcagaaggatcttcgggttaatctaaaatcaaattacataccaactacccaacttaacacatatgactgggagtatttatcataataaatagaattgactagtttttgggaacataaaataatctgaaattctcttcctgccataggactctgtgaatttgaaacagctccatgagaacccaaattgccttactgaggctaggaataaaatgaggggcagggagtatatagattgtatgataccagttctccgtcatccagtcatttattgactcttttactcatttaattaatattgagctctcactatgcactggttccattcctaggggctaaggatgaagtgatacaagagtcagatgcagacataacttcaacaaaatgtgataaaggctgtaagacagaatcaagtgctatagggacacaaaggagagaaagcctcactctgcctaacaccgagagggagtctttcaggaagttaaacggtaaatggaattccaagaaaaacattgtatacaataaactggaagtgtgaaggaaacagcacagagttggcagaaagcagatgctgattataacatccagaatcaaagttcatagtgggaggatattgtaaagataggcagaggtcaatgggctccctatggcacactgaggatagtgtacttccccatgcagaaggtagaaagtcacatggttctgcttggaactgagccccttactagacagaggagtgctggaaaccttccttaattgggttgggccaaaattggtagttgtagggccctatcagctgatgacgtggatgtaataaagcaggaatggagcacatgagaatttgcacaggaatacatgtgcattattattttagccccagaagaaaataagcctattctattgaaaatcatcagtatacaattgctttgaagcacttacaagtaatagaaatgccccttttttgttattacaacaaaataaataccaacaaaatatgagtcagaaagagttgatatttcagagaggcctctgaattttcttcctagcaagtgccagggtaaactgtattcaaccaaaagaaaagttctaattctgaaaaaaaaaaaaaaaaaaagtttcaggttctcagtaacatctgactgttctttgtgccctcattttattctgtgctcaaattttttgaattcctattttaaaaacccatgcatattttatgaattgagcctaaatgtcccatcatcacaaattcctaagactctttctgctcaggagctgatcattagtgaattcattttgtattccagtggttgtcaaaggccattctggaggtgttacattggattttgacattaattgatgaacacttaagctcatcataactctgctgggattcagaacagcagaaattagaaagatgaatttcaggagatgaaaccatcgaaaagaaatgtaacttcagagtcattactgttgaatgcttggagttccgtgacatccatacagaatgcagtaagggctcttgctgtagtcaagtatagtgccctggtgggaaaagagggttattctgcatgtgtcaagtagaactggacaaaattagcaatccaccttcacagccgtatgtcctgggcacacaggagaactagatttaccttattctgttaactggttaaagatgaacatctccaaaatgagaaaaatctatttagattaaaatcaaaaagagctcctctttctattgctaccaaaggatttatagaaatggaaaatgtcactcttaggccagcagacagaaatcagggccttggaatcccatcagctttgacagtaagtattaaataaagatactgagctaagaagaaaatagagcagttttctttggcaacagtaggtacttgctcagctatgctatttgaataactcattgggagcttggtaaggttcaaggtattagagagctttctgaaaactggaaaagatggtgaaatgattattagataggttgaaaatcaatacatatataaaatccacaacagccgtcttaacttcagtccaaacttctctggggtcacattcttgaactcaaaaagccaatcaacaagtatgttgacttttctttccttctatttactcttcaaaactccacaagggaatttattttgctttgttttttcatttgtactgtaacctacagggtttcaactggtcagaaaaagagactatatatcaaaaggtatgaaggaacatagagggttttgtgaagaacttatctcagtgaaagcaaggaagtaattagctttttggaaacattgaattcattaatatgattaataacaacacctccactgggtctggcacagtgctagcctctataaactttcatttctcacaatttgtgtgtaaggaaaggatacgattgtctctaatttacaaataaataacctgcagcttggaaaggttcattgaattttcaaagttatttagctggtaagctttgtaccgaggtttcaattccaggaactttaacccaagtgcccagtgaaccattttatctcgcaacctctgactcagttgacttatttatcagggctgtggggtgagctcttccagctgaaggcagaaaataattgttctcactaaggccaatgttccatgcagccaagtgactgactgaggtcatgtatttaaggtgtaatagcaagtctgaggatgaattcatattcttatagattacagtggcatcactgatgatcattaaattgattcagtcatagaattttcagagcctttttgtgagtattgcattcaatcttccccccagaaaccatgtataaatttggaagccaaacgagtagattatattttctcgaatctagcatgcactttatgttcttatgagtttattgcctgttttgtatttcttaaacatttttttctggtaacaaaagcaatataagctaatacaaagtatcagattgtcaaatcagacacacaaggaatcagagatcttaaccagtttcaagtcttaccaataacttcaagaattcagggaaccacaaggcacagacagcatggaaaagttgcccacactgcaccccaggtatttcttgccacattaagacatgctctggttgagattaaatatacaaggtctttatgtgggggatgcaggtagcaattatacaaaagggagctaatttagtcaggaaatatccctattttatacttttaaactacacagtttatctgacactttctagtgagccatgccccggaaacccataaattccaggtttacttactacatataagcaagtctagacacaccaggtacctcttgctaaaaagtatgtagtagataaataatctatcactattaaataccactgatctgtatgccagacagtctatcattagcatatttacaaaggtacttgaccaagtcatccctctttctttccccaggctttcctccaaaaagtaaaagaaaaaatgcacagttgctgctgaccctttcctttccaaatagcatactcattagggacatgtttgaaagtatagaaaaaagtgggcgaaggatacgaaagacacttctcaaaagaagacatttatgcggccaacaaacatgaaaaaaagctgatcatcactggtcattagagaaatgcaaatcaaaaccacaatgagataccatctcaaaccagtcagaatggtgattattaaaacatcaggaacaaatagatgctggcaaggctgtggagaaataggaacgcttttacacttggtgggagtgtaaattagtccaaccattgtagaaaacagtatggcagttcctcaaggatctagaactagaaataccatttgacccagcagtcccatcactaggtatatacccaaaggattataaatcattctactataaaaacacatgcacacgtatgtttattgcagcactatttacaatagcaaaaacttggaaccaacccaaatgcccatcaatgatagactggataaagaaaatgtggcacatatacaccatggaatactatgcagccataaaaaagaatgagattgtgtcctttggagggacatggatgaagctggaagccatcattctcagcaaactaacactggaacagaaaaccaaagaccgcatgttctcactcataagtgagagttgaacaatgagaacacatggacacagggagggaaacatcacacaccagggtctgttgggggatctggggcagggggatggagagaattaggacaaatatctgatgcatgtggggcttaaaacctacatgatgggttgataggcacagcaaaccaccatggcacatgtatatctatacaataaacctgcacattctgcacatgtatcccgaacttaaagtaaaacaaaaaattttttaaaaatgcaagatgaaaatagaaatcacctgtaattactaagcatcgccaatctagaaatatttactattaaaaatactttgtggccaggcacggtggcccatgcctataattccccacgttttgggaggctgaggtgggaggatcccttgaaccctggagttcaagactagtctgggcaacacagtaagactctatctctatttaaaaatgctccagtctgggggacagagtgagatcttgcctcaaataattaagtaaatttgttaatgcttttctcttgctcacctgtagaaaaaaaatgataataataattaaagttttttaaccaaaaataagtaaaaatactttgtgttttactctaatcatttttctatgcagattatgtctatgaaattagttactgagaatcatatgctggtggctttttccccccagaaaatttgcaacctatgctacactcccaatgagcaattcaaatagcagaattaagctttttctctacacatcttaatgctagattttaaagcgtttgttttcattttattaatcagataggaacatatgccaacctggatctttgagtggctgcaattagtagagctctctcattgctccacattggctgtattacatgaataagaagtaaactcttgtgttaagctcttgctattttgtggttgttactttaacaaaagttagtctatccctactgattgatagatacatttgcaaatatttttccaggttttcttctttaatttaaatatagctaatatgttttattgctgcatgtaatttttataatggcaaatatctcaagttttgaaaattgtcaattccttctttgcttttatgcactgaaagttttttactgcagagagataagataattctcctatgtttccttctggttcttttatggttttggtttttgcatttaattattttctaaacagcatttagaaaatatatgttttctaatcatggtactaccattttccatattcaaagcaaaaaaaacttgaaaaatataataataaacaaatgatatagagacaaaatcttttattatgccatcacccaaagataaccagtcctaaacatttgtttatatgtattgtccgtaaattattttcctatacagagacatacatttaagtgaataaatgggatgatgctttatgtaatattttgaaactcatttttcagttacataaaacattatattttataaaataaataaaaatagtagaataatttattttcttttggatatacacctagtaatgggattagtgggttgaatgatagttctcttttaagttctttgagaaatctccgaactgctttctacagtggctgaaataatatccattcccatcaacagtgtataaacattcccttttctctgcagccttgccagtatctgtttgtttaactttttgataacagccattatgactggtatgagatgatatctcactgtgcttttgatttgcaattctctgttgactagtgatgtggaacatttttttcatatgttttgtggcaacttttatgtctccttttgagaactctctgttcatgtcttttgcccattttcagtagagttgttttttgccttgttcaattgtttaagttcctaatagatcttggatattagtcctttgctgtagtcccttgctggatgcatacttggaaaatattttctctcattctgtaggttgtctgtttattctgttgatagatccttttgagtgcagaagcgctgtagtttaattaggttccacttgtcaatttctgtttctgttgcaattacattttttttttttttttttttttgagatggagtctcgctctgttgcccaggctggagtgcagtggcacgatctcggctcactgaaagctccgcctcccgggttcacgccattttcctgcctcagcctcccaagtagctgggactacaggtacctgccaccacgcccagcaaatttttttgtatttttagtagagatgggatttcaccatgttagccaggatagtctcgatgcaattacttttaagggcttagtcaaaaattcttttccaagtctgacgtccagggtgatgtttcctaggttttcttctaagattcttgtagtttgaggtcttacacttaaatctttactccatcttgagttaatttttgtatatggtgaaaaatagggatccagtttcattctccctcatatcactagccagttattccagcatggtttttttgaatagggagtcctctccccattacttatttttgttgactttgtcaacaatcaaatgattcatttctgggttctttattctgttccgttggtctgtgtatctgtttttattccaataccatgctgttttggttactgtagccttatagtatagtttaaagtcaggtaatgtgatgcctctggctttgttctttttgcttagaattgctgtgtatattcaagctcttttttggttccatatgaattttagaatcattttttctaattttgtgaaaaattacattggtagcttaataggaataacactgaatctgtaaattgctttagccagtatggacatcttaatgatattgattcttccaatccatgagcgttaaatatttttccatttgtttgtgttatatattatttctttcagtggtgttttgtagttcttgtcgtagagatatttcacctcctggttaggtggattcctagggtttttttgtgggtgtgactattgtaaatggaattgcattattgatttgactctgagctggaatgttattggtgtatagaaatgctactgatttttgtacattgattttgtatcctgaagctttactgaagtcatttatgagttccaggaggcatttggtggaatatttaaggtattctgggtatagaatcatatcattaacgaagagagatagtttaatttcttcttttcctgttgaatgccttttatttctttctcttgcctgattgctgtggctgggacttctagcactatgttgaataggagtggtgtgagtgggcatgctagtcttattccatttctcaaagataatccttctagtttttgctcattcagcatgatgttagctatgaatttgtcatagatggcttttattacttaaaggtatgtttcttcaatgcctaccaacaacttcaaatcagaatggttcttctttctttatgaatgcattagaccttttttaagtatatcaactctttgtctatcatatatgttgcaggtagctttctcattttatccttctcctttttgttttacttacacttttaccatgcagaaatatttatatagtctaattcatccctccttttatggttcatttattttgttctattcccagaaagattttctttccaacattacataaataactatcatacctgagctcttctgatttctccccttgcctaagggagaagaaaagcatcatgacaaacaatttcagtttcctctagcctctcctaatgtctgaaaagcatcttatacattagtcttaccctcctctttctaggacccctacccctaataataaacaatgatgtttctgtgccataaaggaaccaaaactaaaataaagtatctaagtaggcaactcatgttataattataaaatttagaatcacggttggagtggagaagatccaccattcttttggttcactgaaaaatatgaagctaactttgtctaatcctacatcaggaagatataggggatttaccttttgtgctatcctgaggattttggtgttcagggtcctaccataaatttctagggaggtttataaatgccttaggctattaaacaggttcaatacagggtaggttggatggggtgctaagcaagtattggaccacagattagcatcaatcctatcaaatgatcagcagatcaactgatgccctggttgtggttgattaacggtcctcactagatagcaacaagaacacaactgaatcctggtattggccatcaatggtttattgttcctttgaaggctcatcaaagtctccagatcttataatcttctgtctttgtattcctactcatcttccctttacctacctgaggcatcttttgcctacaccgcatgtagaaaaagtagagagttaaatactttttaatctgaagtaaatgacccatagctcactgtctggattgaaaggaatagaagggatgccttcaaaagtgcagttgaagaatgcaatggccacaaagggaataaaagccaatcatgaaatatcagtcagagttcttcatttcaaaacacaaaaaacaactggctaatttaagtagaaaattaattgattaaaaggatagagcatgttcattctcttgatttaattattcttcgttgtattcttggattataacatcactttgtaccgcataaatatatatataactctaatttgtcaatttataataaaaatacattttttaaatttttttataaaaaaagatatgagatagcttatagaattatcaggaggcccagaaaaactaggtttaagaaactctaccagcttttgtatgtttatacaaaattatgtgacaaaaatggtcctttgcagacatcattgttattactgccaagctccagacactgtgacaaatcaacatcaccagctctgggccctggacactgccttccacaacacagccacagctatcatgaaaaccagactttcctacaagtgccaccaccataagagaatgtgccttccggtcttcttttgcatcatgagaccccagttcagagtctgggagataagtatctttttaatgaagctaaggtcgtatgtccctaccgtgggtgcaagggtttctgggaaagctagaagccatgcttttcagcgggttgactctacctaccactgagattcacaaggtggagaattccccaatataggaacaagtctggacatgagtcacaaaaacataatgacaaatgccttctgaattaatattttaaaatactattctgactcaatcatttaaaaccatatatatatgtctttttatctcaatgatttatatattttgaattcaattgcttgctgctttcatagattttttataaagtggaggtattcattacaattagattaagctgcaagtaacagagaaaccaaaaataactgtggtttaacggctttttttttcaagtttaagaagtacaaacatagtccaagacaggaatgacatttcatgatgacagagacccatactccttcattcttgttgctctgctatgtataacttccatttccaagatactttgatggcttaatgtagctgctaaatctacaaacattgtgttcacattttattcagccataagaagaaaagaaaaaagagaggcatattctatctctctaaggacatttccaagaagtcgagcataccacttacatcagtttacatcccattgggcagaacttagctacttagacaagtggccaatctagctgcaaaggaagtttagaagtagaatctttattccaacaggtcacgtgtccagctgaaaactgaggttctccttctatggaaaatggaggaaatggatataagggaaaaactaccagtctttgccatgctaaaatacctttataactgagaatgtggaattataaaagttaagttacctatccaaggtgtggtggcaggcaaacgctctaatctcctaagaactagatttgtttgacctccttgattattactgcaaactttttgggcatggcctacctaaacttcaagcaccagagtatatgtcactctctccatggcaccttccctaattaaatgagcctacctgggctctataaactgtatagtactcactgtttctcttactgctgtggtagaagaattctaaaatggtccccaatatccctgccccttgttgtacctgctctgtagaattatctctacagggaatgagagggacctattaatatgataatcaccttcatgattgttgtattatataaaactttatcttagcagaagagagagagagatgatcctggtgtcttgaagaaatgaggtgtcacgttgtgagagggctgtgtggcaaggaactgggagtgacctctagtatctgagagtagtcccaccattgagagctagcaagaaggagaactgtaatcctacaactgcaagcactgaattctgtcaacagccataagagtttggaaaagaacctcaagctccataaaggaacggagcccaactgacacattgacttgaagccttgtgagaccctaaacagagaaactagctaaaccatgctcagacttctgacccatggaaactgtgaggtaataaatgggtattgtttttagcaactaaggtgtagtaatttgttatgcagcaatagaaaattaataccactacagtactactttgtattattaagacaaagaaaagtggggagatggaaatagcaatgaagtcttattttgctgcaggtataatgctaagggctctacatacactattgtatttaatatctaatcaactagcatattggaggaaaatagggctcagataagttaatgcaatttggccaaagtataaagctagaagacagcagaattgaccaactggaccaagaactggaccacccatttctagtacttttctaataattgcttaaataatttttttaaaaaagcagtaaacttacaagcagtatactctaagctttgttaggaagttacttctattactaaaatgtttgagtacttaacagtatttatttataattactaaattatatgtttatttataaattagaaatgttcttacttgaatgagcatctgattttgtttgtgggtttcttactttgtttagccattagcttgtttaaaggaagaagaagagggtgaggggaggaggaggaagtgagagatggaagaatggaaggaaaggtagttgtgatccaagagttgagggtcattgaggaggaggagcataaagaaggaggggattatgggacagaggactacatttgaaagctaaaacagcacaacaaatttaagcatttcttaagtgttttctatactatattttatggaccaaatgcaacatagtatcttcaggagaatttctacaaactttcctggtaactgttgtgagaacattgaaagtcaaatgtgagctgttacagcttatcttcaactgatcctttctctattgtttagactaaatcttaagtagtgctattacaagagctcctggtcattgtaataaaaattgtagtgcccttccacagttggattttatagtatggtgattaaactttttgaggtgctggtattctggtttctatcctcctgattgatttcattctctcttttgtcttgtttttgatttatttcagaaacattattatgacttgtgttcatcatttcagaaggcctcatttgtgtaaattttcagtctcccaatcttgttcccgtaacatatcttatgtctaatttgtttcagatatttcaatagcagatgacagtctggctcagactaattacagctgttaatgaaagataatgatatagtggtaataaaaataccacatctcttttcatattttggaatttactgtaagctcctctgaagctcaaagaggatcatgttttcattgctcatccctgagactaaaagaaatgtcagaaatcgcatttcagtacacaattaatatttctttgcccagctggctgtgtgggctttcagattgcaaatctaatctgctttgcaagattttctacctaattcttggctttatccccagattaaatactgaatgctgttttagctgctaacttctttggacaggccatgagtactgcaaaatagaggcaacattttttttttcttagcagtcacttctcaagttacagaaataactgatatagtttgcactaaatccgctaggaaaatacatcaattaatctcctgctgtttgtatatcttttaagggttcagggatgagtaaagtgaataaataataaagggattgacagctgcttataagaagagactaaaaaagattgggaatacttttatatttgtttgtaatttaaaaatgcagaggtagacaagataatataattaaaacagctaaaatcagaaactctgcaaataagtggccaagagttgtacaagaaattttagaatatcatcatattctgatctgagataactgaagaagaatgggggtaattgataatatcagattaatacttgtcaaagcacagtacaaaatggacttaatattgacttagcatttttagatgatatgtaaatgtgtaaaaagtggaagctaccaaaagtttaaaatagtctcttgttatggtttcttatgagaaataaagactgagaaattagaactgaacttagaaaactaaagttggatgtttaccaagagtgtggataagcaagacccagctcgctttgccacagactgctttgaaagataaaagcaaacaccctaagacactaagtgtaacaattgctaaaaaccctgctctatgctcccatgtcaattaaagtgacttcaactggcctgctttacctaatcccaaattgttaagtcccatccccaaaccactcaagctctaaacctaattacaatcctaggctcataaaaacccaaagtttttttcaagataccattaaggctttactcttagcagctctctcccttgttgagcaataacatgaaccaggttgtttgagacaggctttcttagtgctctttaagcagtctaacagcacttaatcagctttcgttctttttgttttatttttctttttttgtattcttgttgagtgtctttcattgaggattaaaataaaatcaatacaacatcagcttaccgttgcacaaactattcccctcatctactaaacactccagctacagtcctagcgagcagctgaatgttcaccctatgtgtcttgttcatcctttgttctgcgcctttgcttcaagcatctgcccagggctgtgaagccatggttcctatacaacatgtgcaagccactcaaaattttcatcaccctccttcttaatgtcagagccttgcaaagtttttcttctttcactcatagtgtcccgtcatgctaaaaattaaaaaaaaaattgtataaatactgtgaaaaagtataagacaagttctagtttaatgcagacttcatttatcaatacccccatttggacaattatacttgtggagtggagaataaaccgatgtgtgtttgtgtgtgtatatatatatatatatcttatgaatccaggtcacatgtgcacaggctcaaaaaagtactaccaaacacacgcaaaaacacaaggacaatttcaaaatgactcagagccttgtgtcttgaaaaccagaaagagatctcgatacctaatctacagaaatgctaacttaaatctttacttccttcataagtcacagctgctactggggctctgtctgaagcttcttctacctttagcccatctgatgtatcagccttcttcctcttctcttctctcaatacagtccttttttatgttaagtgtttaatgtgcatcagcatcacctggcgagcctgttaaaacacagattggtggcttcatgccagagtttctgattctggaggtctctgatggcacacaaaaattttcatttctagcatgtgctcaggtgatactgatggttcagggatcactctttgagtaccactgatgtaggtcatcttagtctctctggttgagttcctttttccctcctgtatctataattctatcttccactttccattctcccaactctctgccagaaaaataccaaaaatacaaatcttaaagatatttgtcaacttgggctgccataacaaaataccataaactgcagagcttaaaccccagaaatttacttctcacagatctggaggctgggaagcccaaaatcaaggtgccagcctaatcagttccccagtgagggctttcttctaggcttgaagatggccaccttctcactgtgtcctcacatggaagagagacagaaagagtttgggcctctctttctcttcttacaagagcactgatcccatcatcagggtcctacccttataacctcatctaatcctaattatcttccaaagactccatctccaaataccatcatattgagggctagagcctcaacaaattcatttgtgggagcaggagtgttctgtccatatgaataattaactctcctgagatggcaaagactgaattcctcttcacgggcagataaataaggtgaaaattccttagtcttgttaataatgattgcactttaacttatataaaatatacaacaccatgggtgaatctccaaaataaaaaagaggaaagtcaaacacaaaagattatatattatatgattccatttacatgaagtgctagaaataacaaaaatatagtgccagaaaacagacttaatggttgcctgacactggtggcctaaggagaaaattgactacaaaggggtgcaaggaaactttttagaatgatagaaatattctaagacttggttttgctggtggtcacctagatatatgcaattgccaaaatacattaaattgtatacttaaaatgagtgaattttatcatatgtaaattatgcctcagtaaataagggaaacatatacatactttatatgtatattatatattaatatatattactttatatatataaaatgttgaaatgtctccaaaaacaaaaaagatttcatttaaattaagctgatgtgacaaccaaaattctctgtggaaaaataaataaataaactgatagattatcttctgattttaaaggaattttcttgttttgttttgtattttatctttcatctcatgtctaaagtgtgccggcccaggttacaggctacatcacacacaatcagtacctcaatcaatgaaataagtgtggctcactctcctcttcctgggtggggttcaaaggatgtctaaagaattgcatttgtgaactaaagaatgctacgttgctttagttaaacgcaacttacctgatgaagaaagtacaatataagttcaacaaaggaaatggttttgtttagggcagaatcttcactaatctcttactgtggcaatgcttggtgtggtctcttcttctccatctcccagaggaataattacacaagttctgctttctgctcacctgcctcctcatgtcagatttggcatctctattgcaagataattgctgcttggaatattcaattagcttttaattaaatattgctcattaatataactgcaagacaataaaacatatgtcatttgattagccaaaaattcaaatataaattacgttcatttttatgccaacatgcacattacctaatgagacatttttcaccctgctataaaaagattgtgtgtgatcttattttcttttagagatttttttaatgcgtgcaagaaaagtttttaaattatatgtggcaactcatattctatttcttatctctacattaactatttagaacagaaagttacgtacagttaagtacaatgaaacttctttgtaatagcaggtgtttggatattaacttaacactcagttttatatgtcattttatgtataaaaatttgttgtttatagtgatcatatatatattagaacacagatagcattttatttaacaacatattttgtctggttataaaagtaatatatagttatataagaagccttttaaattatagaaaggtaacctattaatacattgatgtattttgttcctgttctgtttttaaaaactaaaattatagcatatattataatatgtaatctggcttgtttaagattgtattgtgatcacgtatcatgtcacttttttaaaatttaaaaatctgaaaagctatgtgatatttcattatataaactgattataatttttagacatcagggtttgtttttcccaatttttcactattataggtaaaagtaaggaaaatatatttattcataagtcttggccatacctctggtcaggactgattcctgaaaatagaattactggattagaagaattaagggaatacttgtattctcagcttctcatgtttttacagggtagagagcagcctggtgctaacacttctaggccctgtacaacccctgaaactgatcctcccataagaagccagggtgattaatatggttagagaattggagagagttgatacctctggtctcctgtgatttctgtgaagaacatcccatgctttgacctcttggcttacttagcttttgatgtaagaccactggggcaaggtggtacccactaatagcaacaccccagtgaggagtgactgctctttaaagtttctcaacctgtaagtgggttgaggtggggatgggtattaggaggtcagaattatcaggccccaatatccaacaatgggagaagggggaaaggccccatcaagttctccaagcagctttatttgataatcatgtactttagaacactttgcactccttcacttagtttgggctctgcttcatctgcaaggagccaggtaggaaataattgcaatgagtaggattcaggtagcaaacttttcacttaatctccaacaaatgatataatacaagagctcagaagagatagaacagtaaattcacactttgaaatactccttctactgcaaatacatagcagtaacagtaaaaaatgtggaaaaaaacaaacaataacaaaattttttaaactgtgctaaaaaagaaataaacagtttcataaacctgatatggaaaagaaatgaaaaatgggagctgcgctctgggtcaagggcaaagaggagtaattcggagtctggttcctgtggaattatggagaataataatgatccactaggctgaaaacgaaatcagagaaagacctactgactaagtcagggtttggtaaagatgttcaattcatgaaaacagggttaagaaaatgactactgactctacttaagactgcagattataggagccatgaaaggccaaaacacagagataataggatatttcaaatgacatgaaaattatataatgctaagaaagatgttcaacaaacaacaatatgagcttgaattcacttcaattgaattttactgtatagcataatcagacaaaggctttaaaataaacatgttagtaggccctgaaatgacaaaaatgaaggaaatatagccttagaaaggacaattataaaataaaagtggaaaatttgtaaaggacagatgaaaatgaaaataaagaggtcttgaaaaatgaaaatatgataatcaaaattcaaaacaagtcaatgaataagaaaaaccctagataggacatagtagaagagagaattcatgaatcagaaggtagttaggatttgtcaaagcacagtagcaaaaacagaaaaatgaattatacttaagtgtaatatatgtacacacaagcacatatatacatgtacacaaatgcatatgacagagcaataagagacaaggataaaaattaataaatgacagcatatgtataataggactctccctgactacaaggaagaatagagccacaagttagtggctgaaatttttttagaattgaaggaagcatatgtccttagaatacacttgaactccaactactgagcaggataataaaaataagtacatactaagctatatcagagtgaaattatacagtgtcagggaaagaagagaaaatcttaaaagctatcagagagggaaaaaaaaaacattatttagaagaaccattgaggtcagatgcagtggctcacacctgtaatcctagcactttggaagaccaaggtgggtggatcacttgaggtcaggagtgcgagaccagcctagacaacatggtgaaaccctgtctctacaaaaaaaaaaaaaaaaaaaaatacagccagccatggtggctggcgcctgtagtcctagctactcaggtggccgaggcactagaatcacctgaacccgggagatagaggttgcagtgagccaagatcgtgccaccccactcaagcctgggtgacagagcaagactccatctcaaaaaacgaaagaaaaaaaaaattgagattaacagacagcagatttctttcttatataagaaatttcagaagataatggtgtaaaatcttgaaagcactgaggggtaataactttgttttgccttttgttattattgtttgtcttgttttgttcttcacagtctctccaacatcaaaattttggaacatcctagattttaatccttaaatgtcttttctttttctcttctcactccctcatgggctcatcccgtctcatagttttacatgacatctatatgttgatgaattctatttgttaccctttgctacacaacaaacctccctaaaatatggtaacttaaaacaactatttattgttacctctcactgctctgagggttgacaggctcagctgggcagatgtggtttgcggcccctcatatggttacagtcagcagtagctgaggctgtaggcatagggaggcttattcatttacaagtttggtgcctgggtttggatgactagtatagttagaggccagttaggcatctctacctccatggagactttcactccatcatagcatgatagtctcagaaaaggagatattctttcatggtggctgattcccagagtaaatattcaagagcgccaggcaaaagttgcaaggttcttatcacctaatgttgaaagtcttagaacatacttttgccacattctataggttaagcaagttgttaaagcttagaatctattttctttccttttcttttttttcttttttttgagatggagtctggctccatcacccaggctggagtgcaatggcgcgatctcggctcactgcaacctctgcctcctgggtccaagtaattctcctgcctcagcctcccaagtcactgggattacaggcacccgccactatgcctgacaatttttttgtatttttagtagagacagggtttcaccatgatggccaagctgttcttaaacccctgacctctggtgatccgcccacctcagcctcccaaaatactgggattacaggcgtgagccaccgcgcccacctagaatctattttcaacacagttgctagagtgattattttaaaaactatattgaatcatgttacttcgttactcaaaactctccagtgggcttccttctcattcagaacaaaaaccaaagttcttaacactgaatgacatgagcttacataaactgacttttgttcttctgtaacttcatctcaaacaattcttccccatccccctttccaaccttcatctcattcatggcacaataccctccttgatattccttgaaaatatcagatatccgatgctctctcacctcaaggctttgtacttgtatcttctactcagacaacttttctaccaagtatttgtagagcttgatccctcagagctttgctcaaacatcatccccacagtgaatctttatttgcaaatctgctcaacactccatattttgttatcccgtcctccactttatattcttgccataaacgttatgactgtcagaaatactatggattttatttatttatttatccaatcattcatttactcatttattgactgtctctgtcaattagactgtaagttccacagacaaggatttttttaattttgatctttttaattgataaataataattgtacagattcatgggttacatagtgatgtttacatatgtataatacatagtgatcagatcagggtaattagtatatacatcttctcaaacatttatcatttctttgtgtggggaacattcaatattctccttctagctatctgaagctatataatatattgttgttaattctactcatcctacagtggtagagaacactagaacttatttatcctacgtagctataattttgtgtcctttaacaaatctctacttatccctcccttctctctacccttgccagcctctagtatcctctgttttactttttactcatatgaataaacttttctcagcttccacatatgagtgagaatatgtggtgtttaactttttgttcctgacttatttcacttaacataatgtcctccacttccatccatgttactacaaatgacaagattttatctttttgtggctaaatggtattccattatgtatatattgcattttctttactcagtcatctgttgttggacacctaggttgattccatatcttggctattgtgaacagtgttgcaataaacatgggggtgcagatgtatctttgatatacttatttcctttcctttggataaatgctcagttgtgggattgctgggtcatgtgataattttagttgcagtttttttaggaacctccatactgttattcatagtgactgtatgggtttacattcccaccaacagtaagagttcccttttcttcacattttcactagcatttactatttttttgtctttttggtagtagcctttctaactgaggtgagatgatacctcatggtgcatctgagttgcattttcccagtaatgagcgttgttgagcattttttcatgtttgttttccatttttgtgacttcttttcacaaatgtttgtatgtttgttcagacttgcccattttccaatcagatttttttttttgctgtcaagatgtttgagttccttatatatgctgtatattagtcccctgcagtatgagtagtttgaaaatagtttctttcattctgtaggttgtcttttcactctgttgattgtttcctttgttgtgcagaagcttatagtttgatataatctcatttgtttatttttgctttattgcctgtgcttttgaggtgttattcataaaatcttctctcagacccatatcctgaaccattttcactatatttgcttctaacagttttatagtttcatgtcttctatttagagttttgatccattctgaattgatctttgtatagggtgtgatgtgggggtctactttcattcttctgcatatggatatccacttttcccagcaccaactattgaagagattgttttttccccaattagtgtccttcgcacctttgtcaaaaatcaggtggttgtagatatgtggattagtttctgggtttgctattctgttccattgatccatgtgtctctttttgtgacagtaccatattgttttgattactatagctttgtagtatattttgagatctggtagtgtgatgcttccagctatttttgctcagaattgctttggctatttggggtcttttggggttccatagaaatttcaggattttttccatttctatgaagaatgcaattgatgatttcataggaattgcattggatctgtagattgctttgagtagtattgtaaatttagcaatatttacttttctgatccatgaacatgggatgtcttttcatttgtttgtattgtcttcattttctttcatcagtgtttgtagagatctttcacatggttaagtttattactaggtattttttgttgctattataaatgggattgccttcttgatttctttttcggctagcttgtttttggtgtatagaaatactactgatttttgtttattacctttgtatcctgcaacttgactcaattagttttacagttctaagagtttttggtagaatccttacgtttttctctatataatgtcatgtcatttacaaacaggagcaatttgacttcctcctttccattctggatgtcctttatttctttcttttgcctcattgctctagctatgacttctggtactatgttgaaaagagtggtgagaatagttttgttcttgttcatagagaaaaggcattcagcttttccccatttagcaacatgttagctgtgggtttgtcatacatgacatttatcatattgagatacttctcttctgtacctaatttattgagggtttttgtcatggcacaatgttaaattttatctaatgctttgtctgcatctattgagatgatcacatatatttgctctttattctattgatgtgatatatgacatttatggatttgtgtatgttgaaacgttcttgcattcctgagataaatcctacttcatcatggtgtattatctgtttgatgttttattggattcagtttgctagcattttgttgagaattcttacgtctatgttcatgacggatattggcctgtagttttcttttttgttgtctccttgtctggttttgatgtgagagttatgttggccttatggaattagttagaaagaattttctctgctttaactttttggaacagtttgagaagaattgacattaattcttctttaaaggtttggtagaactcagctgtgaagccatccagtcctggacttttctgttttgggagacatttttattactgattcaatctcattacttattattgatctgttcaggctttctatttctccttggttcaatcttagtaggttgtatgtattcagtaatttatttatttcctctaggttttcaaatttattggcttatggttattcatagcagtctctaatgatcctttgtatatctgtggtatccattgtgatgtctactttttcatttctgattttatttattttggtcccctctctttttttcttagtctacctgaaggtttgtcaattttgtttatgttttcaaaaaaccaactttttgtcttattcaccttttgtattttttagggtcaatttcatttatttctgctcccatctttattatttatttctttttactaatttggggtttggtttgttcttactttcctcatttttggggtgcatgattaagttgcttatttgaaatcttccctgttttttgatataagcatttattgttataaacttacctcaatactatttttgctgtgtctcataggctttgaaacgttgtgtttctattttcattcatttcaagacattttacattttattcttaatttttgtcttcacccattagtcagtcagaagcatgctgtttaattttcatgtatgtgtacagtttcaaatgttcctcttgttatcgctttctagttttattccattttgataaggtaaaacactttatataatttgatttttaaaaatttgttgaaacttgttttgtgtcataacatatgatcatcctggaaaatgttccatgtgctgaggaaaaaaaaaactgtgtgttttgcagttgttgggtgaaatgttctgtaaatttttgttaggtccatttcatctatggcatagtttaaatttgatatttctttgctgatctgtccaatgctgagagtaggatgttgatattcccaactattatcatattggggtccatctttccctttagatctaataatatctgctgtatatatctagatgctatggtgtcgggtgtgtgtgtgcatgtgtgtgtgtctatatatatatatagagacacacaaacacatatgtacataattgttatagtctcatgctgaatgtatccatttatttatttatttatttatttatttatttatttattgagacagagtctcactctctccaggcttgagtacagtggcgtgatctcagctcactgcaactgcaacctgtcaggttcaagcgattctcccgcctcagcctcctgagcagctgggaccacaggcacacgccaccacacccagctaattcttgtatttttagtagagacggggtttcaccatgctggtcagaatggtctcgatctcttgatctcatggtccacccacctcggcctcccaaagtgctgggactacaggcatgagccactgtgcccgaccccctttattattatatagtgtcctttttgcctctttttacagcttttaacctgaagtttactttgtctgatatacatatagctactcctgcccaagaccatgaacccacctcttgcatcagtgtgacctgggtgtgagttatggagtcaaaggagatcattttggagcttgctagtgaataagtctcaccagagctgatggttttataaaaagaagtttccctgcacaagctctcttctcttatctgccaccatgttgagacatgcctttcaccttctgccatgattgtgagatttgactgccccgctggatttcagacttgcatgtgacctgtaatacctttattttggccaattttttccatttgcaatggttttatttacccaatgcctgtactcctattgtatctaggaagtaactaacttgtttttgattttacaggctcataggcagaagggacttgccttgtctcagatgagactttggactatggacttttgagttaattcgaaaattacttaagactttgggggactgatgggaaggcatgactggttttgaaatgtgaggacatgagatttaggaggggtcaggggtggaatgatatggtttagctgtgtccccacccaaatatcatctttaattcccacggttgtgggagggacccggtgagaggtcattgaatcatggggtgaggtctttcccatgctgttctcttgatagtgaataagtctcacaagagctgatggttttataaaaagaagtttccctgtacaagctctcttctcttatctgccaccatgttgagacatgactttcaccttctgccatgattgtgaggcctccccagccacatggaactgcaagtctgttaaacctctttcttttgtaaattgccaagtctcaggtatgtctttatttgcaatgtgaaaacaggctaatgcagtcacctcttccaatttaatggtgtaggtttcaacatactccactgaactgacaccccaagaccaatttattagtataataaattagtataaataatttgtataaatgggtcttggggtgtcggttcagtggggtgtgttggccttagttctaggtggatgtagtgtagtctccatgaagtttcttcagctgtaattcacactggtaatgtgagagtttctcagtgggctagaatgagagagtttttggtgatgttgatgtcactttgccaggggtcaatgtattagtcagtgttctctagagggacagaactaatagaatatatgtatatatgaaagggagtttatcaagaattgactcacacgatcacaaggtaaagtcacacaataggccatctgcaagttgaggagcaaagaagccagtggtggttcagtccaagtcctaaaatctcaaaacttgggaagccaacagtgcagccttcagtctgtggccaaagacccaagagcccctggcaaaccactggtataagttcaagagtccaaaagctgaagaacttggagtctgatgttcgagggcaggaagcatccagcatgggagaaagatgaaagccggaagactctgcaaatctcctctttccaacttcttcctgctttattctagccacactggcagctgattagatggtgcccagattgagggttgggtctgaagcctcatctcccctgcccaaatcagatctggccaaatcagatcagagggtcggtctgcctctcccagtccactgactcaaatgttaatctcctttggcaacaccctcacagacacacccaggaacaatactttgcatctttcaatccaatcaagctgacactcaatattaaccatcacagtgggcccatggagctatttgtcaatcacacagctgcttagctggcctgggggtgtgtcttctaggggtgggcccctaggatatttctcaggaccaggatgcaggctctggctgttccaccaacccgggagcatgtctgctggaggtggctgttttacaggtcagatgcaggtacaagcctgctaggctggctcaggagcatgctcactgaaggtgacgtatagggctttttatcaggtcccttatacaggtggatggctgcttacctggcctggggcatgtccaccagggttggcccacagggctatttgtcaggttttagacgtgggctcctggctgctttgcctatcttggtgcatgcctgccaagggcagcctatgggactatttctcaggcctttattgaaacaagctattgaacaagccaggagcatgtccgcagggaagtaagggcactgcagggctgcttctcagatcctgagcatggatgcatagccacttctctggcccggggccttgccagctcctcagaggcttgggacatctcctgcttgagtgggagaacacacagtggtttggtcagctcaaattcaggtttgctctgggtaggattgccaggctgttcctcaggctggagctgcagtagtgggagttggtttccctactttgcaggaccggggtcacagctgattctgagaccaggcttcacacagctggggttgtggcattcagccacctgtgtgggtttggcataatgatgataaagccctaatgctggagaggtgcagtggctattggtcctcacgcctcacagtagggtacactccagaggtggctttgtcctcaagatggaaccatgctacagcagcttggtttgcagtgggcgggtgggaggtgggaagtatagactttgtgctcctagtgtagggcaatgcccatcagctctgcaaactgggctcaaggcttataaggactctgggattcttctgtaacaagaactgtaggtctttgtggtggcaatgggaaatggtgtgtatcttctgcttaccttccccctgcaatgaaaagtcccttctgactcaaagcagatctgatttgggcaggggagatgaggctgcagaaactgggtgcctccacactgtccttctggatttccaattactgcaggcacatctccactctcccactgcactccagagctctcccttcaacactccaatcaaatcttggctgtttatttactgccttggtcctgtcttgtgagcaggacaaacaccaggcatctctggtcagccacgttgctgacatcactctcaggcaaggatttttatccattttcttccctgatgtattgtcacacctaaaacagtgcctggcatattataggtacctaataagcaatggtgtgccgataaatgtttaatgacgagctcccataaacaaaagcaaaacaaaaccatgatttatagaatttgctgatctcatggtatatgtagtcctatcgcaaccaatttcaactgataggtcactgaacatggaattggtaagcgataagcataattggctctcatgacccattccaagtcagctacagctgtaatacttgtttaaaaaaatgaaaaaaaaggaaggaaggaaaatacatctatactgaattcaaaatgaaggaaaataaagactttctctaaacaaagattttaggagttcacaatccacaaactgtcattgaaggaaccaattaagaatgctttagtaaaaagaagagtataactacagagattgcatagaatacaaaaacaatggtggtgctgaaattataaaatgtattaataaatgtaattatcaaatatataaatttttgataataaatgtaatttattatcaatttataaatttattataaataaataaatttataataaaattataaatttataaataaatttgatgataaatgtaattatcaaatatataaatgtctaaaaatataatttttatgtttaaaaatgtgacacaaactctagacaacaaaaagaaggggttcaatgataaagagactactgatagagccattgtcttgcttaggagttggatagagatattgaataactgtatgtcagatgtttaagaataccactaatagcctaaaaaatacaatctgtagcttccaaatttccagagtgaaaaaccagggagtgaatatggaaatcttcacatcccaatatacgaggggaaacagagcaatgaaaaaggatgataaaaagaaaacataaaataaaatggtagaaataattcacaatacatataaacggattaaatgctcattttaattggccgaagtatattaatttttaattcaactttaaatccaagacatatacctaaataaagacaacacatagaggttgaaaataaatgaatggaaagctataccagacttgcaggttaagaatgacaaacagaacacataaatttacttatgattcattttgaaatctcattaaaatggcagctaatgtttttaaggcctaaatctattttttaaaaaaagacaatggtaaaagaaacgttagctataaaacatcgaaagctgtaaagcaagtggattcttggtaattgacttagcaggtagtgaggaaagcaagaaagaactatgatttacattgcagactcaaaaggcttaggattcggtggcaccagggatctctggaatggggtaaaataataaaaattatactgcaaatagacagattgtctgaaagtgtttaagaagcagttccccagatcccctcatagggttgctttgaggattttatgagtaatatatgtaaagcacacagagaagtgcctggcacgaagtaagtgttctacatgtgtttgctattattactccatagtgggaagttaatagataattctattaaaagatggaaaggcagcaatagaagcatactatagagatggaggttaataataaaagaattgtctaaaagaagttaaagttgtttcatctgggggagaggaacaggggttactagttttttataacaagcctcataaagtaatagcaagtacttgactattaccatgataaaaaattaaaacttaaaaggaaatagggaataaaaggcagggaagctggtaggcatagtagctaatactaaccagaagaaggctagtatagcaattctgtgctgttttgactcacaacatttctaacaccaaatgtgtcagtttttttttcttttcacaccaaccaaccacttctacagctctccagacaccaacttcatgtcccacaattcaatgtaattctgattctaactacccagagtcagtgcagacatctcaggttaagggctcagtctcacaataccgcccgaatttcagatgtccatcacaagtctgtcacccatacttctgaccaaccagttcccacgactccctcctcaggtttgaaaatttgctataatagctcacagaattcaagaaagcactttacttactattactggtttattataaagactacaactgaggaacagccaaatggagatctatttgtgcctaccatattgtacaatgcagaactaattcctattttagacaaaatatttcatataatagaagaagaggaaacgctgttcacattattgaatgaggctttaaaatccctgataccaaaccagacaagaatagtgcaggaaaaaaaacaatgtgtagaccaatttcactcaaaacaaaaatggaaacattctaaacaaaatactacatgaaattcatatgaaaaagctaaaggttaagaatatccaagacaatttgaaaacaagataagaacttgctccaccagatattaagatttattttaaagatctagtaatgagactgtgtgacattggtccaaagatagacaaataggccagagaaacaatatggagaacatgacagacatagtattgcaaagcagaaagcaagagtgtcctgttcaaggaataatacacaggtagattaaattattgttagtgatctagttcttgggttgggtaatattcatcatgttataaataaacaaacaaaattaaaaaaataaagaatgccccattcaatctatggtgctaggacaactggatgtccataattaaaaatagctgaattagactctgcctttaaaccctacacaaaatatacttcaaatggtttaaagaactaaatatgagaaataaaactttaaaaagaaaatatgactttttggtagggtttcttaagcaaaaattttaaataagattccaaaaagcacaaagctgttcacgtcaggtaaacattgatacattttaccaattaaaatataaaacttctgatatggtttggctgtgtccccattcaaatctcaacttgaattgtatctcctaggattcccatgcattgtgggagggacccttgctaccgtcatgtaggaagtgccttttacctcccaccatgatgctgaggcctccccagccgtgtggaactggaagtccaattaaacctctttttcttcccagtctcaggtatgtatttatcagcagcatgaaaactgaataatactgtaaattggtaccagtagagtggggcattgctgaaaagatacccaaaaatgtgaaagcaactttggaactgtgtaacaagcagaggttggaacagtttggggcgctcagaagaagatagaaaaatctgggaaagtttggaactccctaaatacttgttgaatagctttgcccaaaatgctcgtagtgatatggacaataaggtccaggctgaggtggtctcagatggagataaggagcttgttgggaattggagcaaaggtgactcttgttatgttttagcaaagagactggcagcattttgcccttgccctagagatttgtggaacttcaaacttgagaaagatgatttagagtatctggcagaagaaatttctaagcagcaaagcattcgagaagtgacttgggtgctgttaacagcattcagttttacaagggaagcagagcataaaagtttggaaaatttgtagcctgactatgggacagaaaagaaaaacccattttctgaggagaaattcaagccagctgcagaaatttgcataagtaatgaggagcctaatgttaatccccaagaccatgaagaaaatatctccaggccatgtcagagactttcacggcagcccctcccatcacaggcacagaagcccaggagtccctgtgccgtgtgcagcctaggatcttgatgccctgtgtcctagccactccagctgtgtctgaaagggtccaatgtacagcttgggccatggctccagagggtggaagccccaagccttggcatcttccacatgcctggatgcccaggcaaaagtttgctgcaggggcagggcctcatggagaacctctgctacggcaatgcagaagggaaatgtggggtgggagcccccacacagagtccctactggggcactgcctagtggagctgtgagaagaaggccaccgaccccagaccccagaatggtaactccaccaacagcttgcactgtgtgcctgggaaagccacagacactcaatgccagcctatgaaagcagccgggagggaggctgtaccctgcaaagccacaggggcggggctgcccaagaccatgggaacccacctcttacaacagcatcacctggatgtgagacagggagtcaaaggagataatttcagagctttaaaatttgattgccctgctggattttgaacttgcatgagccttgtaacctctttgttttggccaatttctcccatttggaatggctattttacccaatacctgtacccccattgtatctaggaagcaaccaacttgcttttgattttataggctcataggtggaagggacttgccttgtctcagacgaaactttggactgcggacgtttgggttaatgctgaaatgagttaagactttgggggacagttggaaaggcatgattggttttgaaacgtgaggacatgagatttggaggggccaatgttggaattatatggtttggctgtgcccccactcaaatctcaacttgcataatgtgtctcagaattcccatgtgttgtgggagggacccaggggaggtaatggaatcatgggggccagtctttcctgttctattctcgtgatagtgaataagtctcatgagatctgatgggtttatcaggggtttccacttttgcttcctcttcatttttctcttgccaccgccatgtaggaactgcctttcgcctctctccatgattctaaggcctccccagccatgtggaactataagtccacttcaacctctttttcttcccagtctcggatatgtttttatcagcagcatgaaaacggactaatacgacttccataaaacagaaaacagcaaataaaatataattcacaggcttgagaaaagctatttgtcataataaagctaacaaatgaataggtctgaatacataggaatacccaaaaatcaatttttaaaaagataggaacatccaacagaaaaatggacaaagaatatgagagtaaagtattacacaccaaaaaaagaaatgtaaatactactaaacatatgagtaaatgtgcagctttaccaatgatcagacaaatacaaatgaaaacaataacaacataagattggtaacattttaaagtttgatgattccagggatcagtgagaacatggagcaacaggaactctcaaatgctgcagatgggcatgtgaatttgaacaactactttgaaaggcaatttattggtatctataaagttgaaaaatgtgcaagccccctcaggcatcaattacatttctagataattcatcttaataaactcttctggtttattatgcagaccaatttcattctctcattttgtcctatctttacccttctagaataggtccagaggaggcttcaattcctgaactccaaaacacatcacggtatatcatcgtggttttcttataccaactataaaaacagcttacccaagattatactattgcccaacagtagttgttgaagttcattgtgtttaaaatagcattcttcatttccagcacagatacaaattccattgtagtaagaaagtattgtgaatagaaatgataaaaatggatattacctttgagtcctactatatttagaataaaatccaaaacccttaacaggacctgtaagatcactgatattctccctggcctgcctctccagcatcacatcatttcactctcccccagctctcttcagtccagccacaatgagtatcacctaacttcttgaacacaccatgcctctcccaccaaagggctcttgctgttacctctgcctgaaagctgtcttctctacctctttgtcttgctaattcatgatctatttgcaggtagcattttttgacaaataataaatatttgatgaatatgttttgcctgacgtagactggctaaatacgcaaatgatttgtcttatttgctgtttgtctttaggagttgagtccggtacaatgtccttcaaaatcaggccacagatgagaagctgcattcaattccaaggggattggcaatgtgggaggacagatagggtgttatcaggatgccaatgggaatgggtgcagaatcaataaagtgtggcacctttgaggaaaatattcatcactcccaaagcatgacacgagtaggaatgtgaaaagggatgttctgtaaggcaaaaaccatctcaaggattttgtcaaaggacacagcagttcttttggtttaggggtcttttcttttttctgctgcaaatatcagaaatggtgtttttcaaacttgatctatagagcataaagccaagagaacccctttggatcatttgtgtgtgtgtgtgatatagctgttcaggtgatgtcacggtgcagtcaaagtgcctgagcaagggaacttataagggacagattgtctgccacctctgagactagcccacctaagcatttggccctgaccagtctggcagcccttgggctctggttctcagaacagcactgttgtatgtgtctccaagcttcaaaattctcagactggagggtttttcagggtttcactctctacttggccctgtagtactttagattgcaggatagaacatgcctggccagcagtttaggtggacaggtaaaggagaataagacattcaaataatatatttctaaagcactgtgagggtcccgtctcaccagctggctgctccagggttagatagcctgcatgttttgttgtggcatgccaggtcctctcaaggcatgcttcagccagcctaggtgtcaatagcagctgactcctcctgagataactgatctcaaatgcagccagtttcttggagacttggcacatgtatcttgagtcaaaaagctatatggtgcctggatccatcatcacttaaacgtgaaggcaagaatcttccacccagaattccatgaagcatcccttcctgtgaccaggacccaggatgaagtacaacatttgggagtgttgagtcttgcagcaggataaatgtctatccatagatccataggtagacctaggaggaaatggtctacccactagagtatatgctctgccatctggttttgcagcaattaggtgaatggatggatcaagtggcccagaacagtagccacaggaagttgtgaacatggtatcagatatgcctcattatttgcagtgaatatctctattcaggaatctgcaaggccccagaaactctggctatcacttcacctggtgagccttgaagctgcccatagagactgccagtcaccccagccctgccagggtctgtggatggcactttgaccatccatgccaagccaggccaccaaacattgcttggctaagaatggaggttcaggttgcttttaagcagcagaaaaaagctggaagagaggtactactgacttcgccttctctaccaaacaaggaactgcactatgctcagctcccgtgtaaaattgtatcctgacatttataggtgcagtggggttaaacggatttagaaatggagccacaacatcaatgggcaaaatgggaaatatgttcttacaaaactggcaaagccaaatccaaagtagacagtgccctcatgtggaagaaaaaatttttttgcgaaaacaaatttccactgttttctgagtgactgtagctgagtattctttagaaatacgcaagaggtaagttaacattctaccaataagagctagctgacaggtaacaaatgattaactttatcatatgaaatttaaactcaagaaactgtctggggttcagcaaaactagacaacttatttttaatacaaagaagtgtattagcccatttttttgcattgctattaggaaatttataaagaaaagaggtttaaccggctcatggttctgcaggctatacaagcatggctccagcttctgctttgcttctggtatgggcctcagagaacttacaaccatagtggaaggtgaaggggagcaggagtgtcacatggcgagagaacaggagcgaaaaagaaaaggcagaggtcccagatctcgtaagaaataactgagcaagaactcacttatcatcatggggatgatgctaagccattcatgaggggatcccccctgcctgccccaccaaaccatgacacaatcgccttccactaggccctgcccgcaacatggggaatcacatttcaacatgagatttggagggagcaaacatccaaaccgtgtcaggaagtaaatataacatctagttaataggaaatgtgttttgtctatctgcccccactcccaaccacccatgaaataaagatttttttttaaggttgtttgaaggagtagctaattaataatcttcccctgagtacccacttatgtccactgggcggtaagtcataaccattccccaggggacagcaacatggtttcacaggctcgctagtgattttttttttttttttctgggagaagtggtaacaccaatggtatttgagtgcactgggccctgagtcagatctttgctcagtcccctgaacacaaagcacctgcaaacgggatgagagagcatttctgaaaagggaggcaaagctgggaggaagagagaggaggatctgaactttcatagagctggagtcttgctctggcctctagcagctgtgcagcccaggacatgtggcagggtcctgctggttaggttagagtgatagtatctgtaccactaccatggaaagtagcaagccctacaaatcagggcttttctcccggagagccagctgttaaatgcttaccagcacactactgcttctgtgattgactttcccccttttaagcactctcactctcctgttcctgctacttgcactcttcaccagccacactttcattccttgcacctgtcctaactgccctgtctgggagccctctctgggcctcacttcctttcatatcaagtctagattccctgttccgtcacgctgctctgttaattgcactcttaacaaactagtgtccctatttaaaaattccctaactatgaatccatcaaatctatgccattttctcctacctcatggcatcgaagcattactgaagaatatctcatagccctgagtgttggggccatttaaatgtgtagtatgcagcctcatagttttttcagtgcttcttagaaatctatttattgtgcatggccagcttagctcttttgaaacttatccactttcccaaagttagttattttctaccaccctttcccacacatattctctacatgtagcctcacctactttaagagaaaacattaaaatggaagtaatagctctcaatatattagtggccagccaaaaaaagtatttttatccacatcatagtacttaactttctcttatttcaattacagtattattcttgcttctttccttctttcttcagagtccttcaatttcttaatctataaaatatgaataacaacactgacctcatggggtgtttgtgaatactaaatgagttattatttaataaattgaacacatatttgtaatgctttttaaaaatatctttattgatacataattcacatacaatttgcataattaatgtatatagttaaatgatttttagtatattcacagagttgtacaaccatcatcacaatctaaatttagaacatttttatcaccccaaaaagaaaccctgtacccattagcagccactccccattcttccctccccaaagctcctggcaaccacaaatcaactttctgcctctgtagacttacctattctgaatatttcatataaatgaaatcatgcactctctgttcttttgtcactggcttccttcccttaacatgatgttttcaagattcaacttgcaaggattttagaacagtcttcgcacatcggaggtctactttgagtttgcagttattatttcctgggctattcttccttgaggactaaattccaaccttttccatgcttctggggttccagtatttactctctgcagtatttttaactccttttttttttactttcatctctgtctttgcatataaaccctctgaagcctctccaatatctaattctttcctatctttctctccagacaacattaatttaaaagctatctactgtttctaccacattttcctattaactcttgataacttatctatcatctagtagtagaaatataagttgaatgttccttatccaaaatgcatgggaccagaagattttcaaatttagatttttttcagattttggaatacttgcacatacataatgaaatattttggggataggatccaagtctaaacatgaaatttatttatgttttatacacacagtatacacataggctgatggtaactttacacaatattttaaataattttgtgcatgaaacaaagttttgtctacatttttactgtgctccatcacatgaagtcacatgtggaatttcccttttgttgaatcatgttgccactttaaaggttttagattttggatcattttggatttcaggtatttggactagggatgctcaacatgtagtagtagggctttttctcttagaattaccactgactctcagagatagaccctcaaaatggccatgtttgttgcattaagttgaaccatataaaatggccaatatgcaacgattttttgcttacaacaatggcaattttacatcactcaatctgtcaattccctccagtcaaagactactacaaatgcacctgcagttgtggaacttgggtttactactcctgggctctctcagtaggaaggttttaggatttgagtttgtcttagatgattgacggtgggtgttaaggatgtaggaatttgctccaaattggatgctatcagaaaacagaagcaattatttttctcaatcccctgccaaaggaagatgatattgttgatattcagatttttaccattgctgagattttgctaatcaagatcagaaagttgttgatatggtttggatctctgtctccacccagatctcatgttgaattgtaatccccagtgttggaggtggggcctgatgggaggtgattggatcacgggagtggatttccaccttagtactgtcatgacaataatgattgagttctcgtgagatctggtcatttaaaagtgtgtggcatctcccccatctctctcttgctcctactatggccatgtgagctgatctgtgtgcttccccttcacctgaggggtttcaagtttcctgaggcctccccagaagccacccagatgccaccatcatgcttcctatacagcctgctgaaccatgagctaattaaacctctttttaaattacccaatctcaggtatgtctttaaacagtgctggaatggactagtacagtcgttcagagaacagagtccatattggattagggttaactcctccttctgtcataggatgaattgaatcatcttacatgacaatggctatgcagtcatatttagatgtctgaataggatatattggccaactgcaaaaaagtaataacctaaaaaatatgattacttattcaccttcacaataagtctcaaagacagaagcctagaatataaaataagggtgatgaaaatatatcccagaattcacctggatctgttttagagaggtagatgtttattttagcttagacatggactattctacttgtcctctaacatatataaccacatcaagaagtgatctattatagtaaatttttccttggattgttaagaataattcaaaggctatgtaactattcatgataacttcagtgaataaatttaaatttaaatggctttatcaggcttctaaagaagaagttgtgtaattttttttttttaattttttattgatcattcttgggtgtttctcgcagagggggatttggcagggtcataggacaatagtggagggaaggtcagcagataaacaagtgaacaaaggtctctggttttcctaggcagaggaccctgcggccctccgccgtgtttgtgtccctgggtacttgagattagggagtggtgatgactcttaacgagcatgctgccttcaagcatctgttgaacaaagcatatcttgcaccgcccttaatccatttaaccctgagtggacacagcacatgttttagagagcacagggttgggggtaaggtcaccgatcaccaggatcccaaggcagaagaatttttcttagtacagaacaaaatgaaaagtctcccatgtctacttctttctacacagacaccgcaaccatccgatttctcaatcttttccccacctttcccccctttccattccacaaaaccgccattgtcatcatggcccgttctcagtgagctgctgggtacccctcccagatggggtggtggccgggcagaggcgctcctcacaccccagacggggcggtgggacagaggcgctccccacatctcagacgatgggcggccgggcagagacgctcctcacttcctagatgggatggcggcagggaagaggcactcctcacttcctagatgggatggcggccgggcagagacgctcctcactttccagactgggcagccaggcagaggggctcctcacatcccagacgatgggcggccaggcagagacactcctcacttcccagacggcgtggcggccgggcagaggctgcaatctcggcactttgggaggccaaggcaggtggctgggaggtggaggttcacgccactgcactccagcctgggcaccattgagcactgagtgaacgagactccgtctgcaatcccggcacctcgggaggctgaggctggcggatcacccgcggttaggagctggagaccagcccggccaacacagcgaaaccccgtctccaccaaaaaaatacgaaaaccagtctggtgtggcggcgcgcacctgcaatcgcaggcactcggcaggctgaggcaggagaatcaggcagggaggttgcagtcagccgagatggcagcagtacagtccagcttcggctctgcatcagagggagaccgtggaaagagagggagagggagaccgtggggagagggagagggagagggagagggagagggagagggagattgagaaagttgtgtaatttttaagtttttcttgattcaaagacaagtttttggcatccttctccaaaagtgtttttgtttgtttttttactgtgggagttatagctcatgtagtatacataaagagggagttaatttttcctacatggaatttttccaaatagcctgtatttgctgcttttttaaatttttttttttaattctggggtgcatgagcaggatgtggaggtttgtaacataggtagatgtgtgtcacagtggtttgctgcccctatcaactcatcacctaggtattaagcccagcatgtgttagctatttttcctaatactcttccttcccccaccccacccctggacaggccccagtgtgtgtggttcccctccctgtctccatgtgatctcatttttctgctcccacttatgagtgagaacatgtggtgtttggttttctgttcttgccttagtttactaaaggtagtggcttccagcttcatccacgtccctgcaaatgacatgatctcattccttttatggctgcctagtattccatggtgtatatgtaccacattttatttatccagtttatcattgatgggcatttatgttgattccacgtccttgctattgtgaatagtgttgtaatgaacactgacatacatgtatctttgtaataaaatgatttatattccattggcaccgggtgctgtggctcacgtctgcaattgaggcgggcagatcacgaggtcaagagtttgagaccagctggccaacatggtgaaactccgtctctactaaaaatacaaaaattagctgcaagtggtggcacatgcctgtaatcccagttactcaggaggctgaggcaggagaatcacttgaacctgggagatggaggttgcagtgagccgagatcgtgccactgcactcccacctgagtgacagggaatgtgtcaaaaaaaagaaaaagaatgatttatattcctttgggtatattccgatatgagggcgggggcgtggagccaaagcgggtggagccaagatagccgaatagaggcatctctgctctgcagctcccaccgagaaggacggaaactgccagtgaactctgcatcttcaattgaggcaccaaagctctctcactgggactgactaggtggcgggcgtgacccacggagagcaagcaaaaacagggtggaacaagaccccacctggcagctgcaggcagccaagggagctccttccccctgccaagggagatggtgagggactgtgcttcccctccctgaaaaccaggctttccccacggatccttgcctctttttggaggttcctgggcattcttttcaaggaaacatgatctgctggtacttttaaaatatcaaaaaatctctaacaattatactgcatatacaggttaagttagtgtgtggcaggcaagtataagccttgtgttcacataggtagtactctagaaagtacagattctattgagagtgtaagtacaatttagaacaatagaagaaggctgatgttttgtccctcaaattgggcagattccttagaagaagttaaatatttcctgcaaagctgattggtgtgtctgtgaagagaacaaactgactattgtgagaagaatggtattagttctcttttctaaaaggctgttttgctgatacagctgtaacaactttagcaaaaatattttgctaatgggaggccaaagtttaatttgtataggactcagtaaaggttgtcattaatgatgggagggaaatttaagctatggaaggtcctataaataatctactttttgaagtgttggaaggaatagttattaaattttgtcagcaaacagttaaattcctagccatagctataatgtgagaaaaacacatcaggaagttttgttttttcttaaatagccaaagattatgtagagtcaaaagtaatagaattatgataaggaagatcatattgaaaattcttttaattagttcataaaaggtacaaaaatataataatggtttatattaatagtaagggaaaagcaaatgggtgatgaagaatcagaaattaatcttgtctgttgacttgggtagaagctgctttttctgtagtcatcaacatgttctgtctccttgtgtgtaaaccatttatttctctagtcagaggcttctgtacataacaatcctaaatttagggtctctgaatggagtggccatacaataatcactaaaaaaaaatgtgttggttgttttttacgttgggatcaacaccttggagttttactggtatatcagttgttaacattaccaggtaagacctagtctatcaaagttcaaagtcaatttttccctaattccttctttagaagactaaatatccgggtttctgatcatggagagtccacttaggaggatgttttagaaatacagcttgttagtgataaagctgtaggcatcatctgaatccctggtaatggtcagtcacacctgcttgtaatagcttagaatctaggcttggaaataatgccccaatgcataaggcaaatctgtttttaactcagagggagaaaacctgtggttcctagagagaactgatcttattttcatataagctaattgtaatgatttgggacctgggtatttgatgttccttcaagctttgatagttatagtttagaactgcattccctgcattcttttcatttttcctgaagcttgtagatcataaggtaatagagattctgagtaaaatgtaaagctagaatggaatagagtgagattcagcagcacttctgcccactatgaaaactaagaagttgagagagtcagttggcagagagatgaatgaagcagagatgcaaggacaagaaatggaaaaagtccaatttccagtttcagtcctacccaagatctgcattcttagtcagaagacactctgtattcttacaataattcatccttttaaaaaagtattgttatgtttaagtagtttgcattgatttatgttatttgctcacattgatcaaagttgggatagcatgattatcaaatagaatactaactgccgtgatccaaaatgcatctaatatttttaaagcacaagtgcatataaaacttttgagaaatactaactggccattattacaggatgctatgaagcactttattattttgaaaattgttagataaaaggaaaggaataaacatttatcctctctttcctacataaatgataccactgagtgactcaatattagatgagataattctcttttaaaaagtttccaggggccagcgctgtggctcccatctgtaatcctagtgttttgggagcctgaggtgggaggattgctacaaaacaagactcaatttctacataaagaaaaaaaaagaaatttagcgagtcatggtggcatgcacctgaagccccagctacttgggaggttcaggtagaagaagaattgcttgagcccaggagctcaaggctgcagtgagctatggtaacactactgcactccatctgggtgacaaagtgagactctgtctctaaaaaaataaaaataaaaaaggaatgatagaatgagaatatcaccatttttcaagccctaatgaattattagatctcgatattaagtgttagtggcagctaacatcatatatagatgcacacataaagagacaactagatattatgtgcatctagatggaagaaaataacccttcctatgaggtattcttgccataaaagttgaacctgaatctgtgcaagcctctgcttaaagaaaatataggagacagagaagcatgttagaaatgacatcatacgaattacatcagccaaaataagactggaataagtctttagcttttttctttttttttttttaacagatgtattgcaagaatgcaagtggggaaagcaagagcaagagtgaaaagattattatggataaaaaaagcttgaaagatataccaactaatcccaatttgggggccttgtttagatcctgattcaagcaaaaggtaaaaaattatatgattataagataatcagaaatttgaacactaagtattttatgatattaaaggttattgctagttgttttttaagtgtgataattgtattgtgattacattttttaaaatattcttatgtttaaaagatgcctgaaatattcatggatgaaacattatgtctgtcatttatttcaaaataatgtgtgaggagagaagtggatgggagtacagataaaacaaattgttcatagatgaaaattgtcaaagctgaatgatgaaagctcattaaactgttctttttttacttagtatatatgttttgaagatttccataatataattttaactaaaccagatcatttggatatctatattaaaaaagtaaaatttgactgacatctcacttcttaccaaaaaaaattgtaagtatattatatatttataacagagattatcttcttatcctggggtagagaaaaattactcaaatgggacacataaagcacaaatggtaaagaaaggttaaatagattttattatattagcattaaacatttaagaatttctctttaccaaaaacaatcattaatagagtgaaaaagcaaaccacaactgggagaatatatttgcaaaacagctatcagttaaatacaaaatacatacaggagagctatgcaccattaagaaaaaacagacaactcaatagaaaaatgagcaagagacttgaacaggcaattcagaaaagaagaactccagatagcctaatatgtacagtatatatacatatatatttatgtatatatatgttttcatatacacatatacagtatgtatactgtatatatttatgtatatgtgtattcacatatatgtaatgaaaaagggtttatcctcattagtaatcaaggaaattcgtattcaaagaataaggacatacacccagatggctaaaacaaagacagctgacaataccaagtgttagcaagtatgaggagccatggaaactttaatacactgctgatgagaatgtaaatttaggcaattactactttgggaactgatattttccagtgaagttgaagatatgcttaccctatgacctaatgattccattcttaggtttatacccaactgaattgtgtgcccatgacccaaagagacacttgtatcacaagtgctttaataacattatttgtaatataacaaaaaaatcaaaataaccaaatgtcagctgagcgtggtggctcacacctgtaatcccagcactttggaaggctgaggcaggtggatctcctgaggtcaggagtttgagaccagcctaaccaatatggtgaaaccccatctctactaaaaatacaaaacttagccaggcatggtggtgcacacctaatcccagctactcaggaggctgagacaggagaatcgcttgaaccctgggaggcagaggttgcagtgagctgagatcatgccactgcactccagcctgggcaacagagcaagactccatctgaaaaaaaaaaaaaacaaccaaatgtcaacgatattaggatagataagctgtggcatatctatacagtggactgttacgcagcaataatagtagactacagttacacagaagaacaatgtggaattataatacaaacacatattaagccaaaaaaagccaagcacaaaacaatacagatggtatgatctcaaaagttcaaaaacagacaaagctacatcatagtgtttgagtatgtgtgcttgcagtaaaactgtatttttaaaaaagcaaggaagtgattactgtaaaagtcagaacaatgattacttctggggacagggagggtgaaatgattgaaaaggggaacaaaagagagtgctgggatgctagcaatcttctatttctcgactttgttggtggctgtggagggatttgctttatgataagttcttgaactgtacatgtttgttttgtgcatttttctggatgtgtgttacatttcatattgagtgaaaggtttttcattcagtacctcaaatgagaaaccctagtggaggcactgaaaagaagcctggatttgttagaaagctgattggttggaatagaaggaaaactctagaatttttcctagatctcaaaggcaagggatttaaaatgaagaaaggcactcataaccaccctctaaactgaccttttttgacattgttcctcttaatgcctataaattgccatgtattttgaccttaacttgatctccattgcatgaatagcttgtggttggttagcacagcatgatttatttcacatgactcctttcaccttgacctccttacaagacctaactgaaaatcacccatgccatcttagttattgtgagtagtgctgcagtgaacactggagtgcaattatcttttagaggtcctgatttcaattctgttgactaaatgcccagaaatgagactgctggatcacatggtagttctacttttaattttttgaggaatcttcatattgttttccatagtagcagtactgttttgtcaagtgaaggatgaacagatgaaggaaatgtgttgtatagagagaagggaatattattcatccttaaaaaataaagaaatcctgcaatatgcaacaacatgaattaaccttgaggacattatgctaagtgaaataagccaccaagaaggaaaaacactgtgtgtttccacttacatggggtatctaaaatattcagactcataaaatcagagagtagaattgtggtttctgtgggctggggaaagaggaaaacgacaaatcactaatcaactggtataaagtatcaattgtacaagataagtaagttctggagacctactgtacaacattgtccttatagttggcaatgttgtatcttacacttgaaaatgtgttaagaggatagacctcacattaagtgttcttaccacagtaaaacacatttttttcaaaaatcgcccagctggccgggcgcggtggctcacgcctgtaatcccagcactttgggaggctgaggcgggtggatcacaaggtcaggagatcgagatcatcctggctaacaaggtgaaaccccgtctctactaaaaatacaaaaaattagccgggcgcagtggcgggcgcctgtggtcccagctactcgggaggctgaggcaggagaatggcgtgaacctgggaggcggagcttgcagtgagccgagattgcgccagtgcagtccggcctgggcaacagagcgagactccgtctcaaaacaaaaacaaaaacaaaatcgcccagcctaggtcctaaaactctgtaaataccctgccttattctttcattttcagatacttataagattctgtcaaggtggtgttctctcttactgtagttaatcttataaacttgactttggttgatcaataggtttttctgatggtccttggggtatctgacagttaatcaatagattagttcaggcacataagagtgacagctcaaagacctctattcattatgaaaattaggacctaaaattgagaaaattctcaatacttgggattacaggatatcataaagtatttccaataaaccagatcctagggctaatgtgggttcctcacacctgacctttggaacaggaccccatgtgtttcatgaccttctggtcccagcgcagggcccctatcatagtaagtgcttaaaaaaatagatgctgaaaaaatgaaagcacagttagtttcatatttgtatgaatgtgtttccatagtaattttttaattaaaaaaatgacttataaacatgacttcataaaattttgtcctcttagaaagttttaaagagcctggcttaaaaggaaaatatattcattactcagctctataggaggcaatttccatgagattatttgatacaatccgtttataagaagcgcatttctcactagagggagctcagaatccaccattaaatggcaagacacgctggataaaatgtcacttcactttagggagaaaagtctgtttgggtaaatatgacattgatttccagaagttgggaatttttaatatgccaatttttcccattgttaacctctgcaattctaaatgacataaaagggaaataatacaaactctcataatgatcagccaattacttaataagctaatattgtaaataaacacagtagggcaaataaaaagatatggcattatctctacctgcttgatgaaggatggtggtaaaaatcctagtattcatgaaaatgagaaattacataaggcagtggtaaatatgagtatcgggaaaagctgtttggagaaatatagttttgctctttgcccttttcctgtgcccataggtaactccgtggagcatcttctactttaaagttgcaccttcttgggtacatttgggtacatttggggaaaggggctatctcacagccactcctaagccagcgtgttcagtagcctgcttctctcctatcatccactccatctcctttgacaccctcagctcagaatcgtggagccaccagcttttcctcatccaccacctgacctcagctgccaactctttcaatctcaacagcaatgttaagattggatttggaggctgggcacggtggctcatgcctgtaaccccagcacttttggaggctgaggcaggcggatcacctgaggtcagcagtttgagaccatcctggccaacatggcaaaaccctgtctctacttaaaatacaaaaattagcagggcgtgatggcggacatctgtaatcccagctactcaggaggctgaagcaggagaatcgcttgaacacaggaggcggaggtagcagtgagctgagatcgcgctactgcactccagcctgggcaacaaagcgagactccgtctgaaaaaaaaaaaaaaaaaaaaaaaaaagattgtatttggagcaaagttttactaaatccttggaagaaaactgcactgtatctaaaaagcacttcatccgattctcccatgtaactgggaacttctcactgaccctcatttctctcagattccagactacaaccatcccccaccctccacctcagattctgaagtttttctctaccctttgaaattcttcacacttctctttaccctagagttccaaaatctaccatgcatgtatgtcccaaatattatataggacctatttatactaaaaagctactcctgttttatctgaatttcaagttttaccaggtattctatattttttctaaatctggcaactatccctcagagtcatcgctctgctttccctggggacagaggagaaaactcaggattcctccccctttattaaataagttatctttatttcatcctctcccaccaaggcaacacccagagaaaataatttttctcacttctttcccttagaacaaatgtttgatttctgttttaaatagcagagttttttctatctccatcatatatcacctatctcttaacatgtttgcatttaacaagttagagtgacttgttttccagttttattttcgtgagtgaacacagatgtttcagaattgcctcatccaaccatttagttcattgtgttcatgtcagttgtgcactaaacactaaactaggtataggatatcaaaatgagtaaaagaagggctctgtctggggaggcagtgtcttttaaaatgggaaagtaaacaatgagtccacattagcagatggctctgaactcagccgagaacagtaaactctgcctagcgttttcacattttggtttaacatcgtttgtgagttagtgacttttgaagggaaagaacagccttctagaacaccaacatcacacttagattgtccttaaataaactgctgccttttaagcaacactgggagtgaattctgtcctgctgaccccctttccaattgcaacaaacacctaaaatgactttggaagctggcagagaaccctttttgaggaggtgcagacagatatccccttatggtgaacaacttctacacttaaataaccttactcactttgaatagattcttattagttttccttttggggggctatttaggtttctaaattttgaggtacctaacatttacatgctgttacaatctgatatgaagttcatcaatgattaagttatttagactattttttaagacttcttttttttttttggagatggagtctcactctgtcaccaggctggagtacagtggtgcggtctcggctcactgcaacctccgcctcctgggttcaagtgattcttctgcttcagcctcccaagtagctgggattacaggcatgcaccaccacgcccggctaatttttgtatttttagtagagatggggtttcaccatgttggtcatgctggtcttgaactcctgacctcgtgatctgcccacctcggcctcccaaagtgctgggattactggcgtgagccactgcgcccagccttcttaagggtgattaatacttagtatctgctctaggaccttgctatttagagtgatcctcagacaagtatcctcgccttcacctgggagcttgctagaaatgaagactcttggttcctacacatagcagctcaatcagtatctatatgtccacactatttccatgtgctttgaagaacattagatttgataagcattagtctagggcttagcatggtgcctgtgctagtaggtgtataataaacactgattgaattgtacgatatattaatatgtttccttaagagtgcataacagaacactgaatttctctccaattacaatcacgatcatcttcctcattctcctcactgtttcaaaatgctagtcttagctgggcattggggtatgcgcgtgtagtcccagatcctcaggaggctaaggtgggaggatcactaagcccagtaggtcaaggctgaagtgagctgtatttgcaccatcgcactgggtggcagagcgagactctgtccataaaattaactaaactaaaaattatagtctcctgtttggtttagcattaactactttatagtgtaatttggaaagatgtcctcctctgctaagggagtacagagcagtatccatggcagaacttgggaattctgcatggaaagatggcatctgaaaagcactggaccgaacggaacccacttctccatctccaatctttaaagtttattctaactacaaggagcacttggtccatgataggaagctgttctttcagatgccacaagtatctctattctccagaaatatctttttcacaccatttgccaattttccaaaagaaacacacaaaaaaacaagtagttctctaattttacctggatttaaaaagagaagcctctctttataataagacattaataacttgtgaataactgataatactgtatcatataatttcccaaatttacatcaaggagtttcagtttattgagaaaagccaagaaaaaaagacaaagccaagaaaaaaaaattccggggctaggtcaatcagagaaactttgcctcttctcgattcctttggtgacatatagtcagtgatacaatggtaaatgtttaatgactggatatctgggagaaacacctggacttctaaggtcttccaatttatatggtataagtagtccctttatggctgatttcaaggtgccaatattgtgtccggaattggtgggttcttggtctcactgatttcaagaatgaagctgcggaccctcgcggtgagcgttacagctcttaaggtggcgcgtctggggtctgccccttctgatgttcagatgtgtttggagtttcttccttctggtgggtttgtggtctcgctgggctcaggaatgaagctgcagatcttcacggtgagtgttacagctcataaaagccacgtggacccaaagagtcagcagtagcaagatttattgcaaagagcgaaagaacaaagcttccacactgtggaaggggaccggagcgggttgccactgctggctggggcagcctgcttttattctcttatctggccccacccacatcctgctgattggtagagcccagcggcctgttttgacagggccgtgattggtgcgtttacaatccctgagctagatacaaaagttctccacatccccatcagattagttagatacagagtttccacacacaggttctccaaggcctcaccagagcagctagatagaatgtctattggtgcactcacaaaccttgagctaaacacagggtgctgattggtgggtttacaaaccttgagctagatacagagtgccgattggtgtttttacaatccctgagctagacataaaggttctccaaggccccaccagagcagctagatacagagtgtcgattggtgcactcataaaccttgagctaaacacagggtgctgattggtgtgtttacaaaccttgagccagatacagagtgctgattggtgtatttacaatccctgagctagacataaagactctctatgtccccaccagactcaggagcccaactggcttcacctagtggatcccgcaccggggctgcaggtggagctgcctgccagtccggcgccgtgcgctcgtactcctcagcccttgggtggtcgatgggactgggcgccgtggagcagggggtggtgctcgtcggggatgctcgggcagcacaggagcccatggagtggatgggaggctcaggcatggcgggctgcaggtcccgagccctgcaccgcgggaaggcagctaaggcccggcgagaaatcgagcacagcgccggtgggccggcactgctaggggacccagtacaccctctgtagccgctggcccgggtgccaagtccctcactgcccggggctggcagggccggccggctgctccgagtgcaggcccgccaagcccatgcccacccggaactccagctggcccgctgtcacctctcaatatgacgccactaaacatggagttgataacaggtgtgcagtagctcaacattatatagtatttctaccatacagatacagtagtagacagagcttgatgaatatagaacaaatttgcgtcagacaatagctttttgtttttagatagtttctttaagggtgaaaacatttaaccaggctctcttgaagccctgctgcctgggggaagtcatttgatttttgctagtctgtatgcattgtttatgtacagactttatggttttgttctcaaaggcatctcctcctaccccgagcctcacactgctggggtttcgtttgttttaaatcttggttggagggggcactctctccagaaagtaaaagacaacggatctggctccagtccaggacggaaagcataacgcttgatttctggatggggtttgcacaaggacagcacgtgagttctgctctccgtgggactcagaccggataggccgtgaaaatctctaaggtgtcagtccacgcaacctaacctggcaaagggaatgctttgcaaactcaggccccagaacagaactcggcctaccagatccagggagccaaagcacgcaggcgcagacagagtagcggtgagcagaaggcaggcgggacgggcgcgcgcactcggcggccaggcgcggcgggagcgcgccctagggggcgggcactgaagctgcggcttgcggttcagcgggttctagggcgccgggcgctcgggcctcggccatggctcacaggccgaaaaggacttttcggcagcgcgcggctgattccagcgacagcgatggcgccgaggagtcgcctgctgagcctggggcgccgagggaacttccggtcccgggttctgcggaggaagagccgccctctggaggaggccgcgcgcaggtggcgggactgccccaccgggttcggggccctcgtggccggggccgggtctgggcgagctcccggcgtgccaccaaagcggctccccgcgcggacgaaggctcaggtgtccagggagacgcggggaagcggggaggtgacggcacagggcgggaaggggccgcggggtctctggatccttctctgggggttctataacttgctgccgaccacaagccatgctgagtcttatccagaaagacttatccagaaggtagtgagcgagaaaatagctcgagcacttgcccgctatctgcatctgccttttggactccttgggggaaataaaacaatcgtgtacagttgggaggctcttcgttttcaccatcagttgactccatcagttataactaacacagttatcaaagtttatgaagaacctaaactgtcacaacaaagttcaataatttataatactattaagtgggcagaagttatatgtaccttttagacacttgaccaacttatctttcttgaaaacatttagccagagtagtacaggaatctaggttttgggacattcccctttgtttattttcttttttcaccagttatttgcaaaaactaatagtaatatatacaacacaaagaagcatgatagagattcatgacactgtagatggtaccagtaatggtgttagatatagtgtcgtcattttgaagtacctttgagttcttaaatacaggtgtaaggcagcataaagttgtttaaataaaatgtgctgctctgagttggaattgtagcttaatgaggaatacggtttttggttagtcttgagagctaaaatcttcctattattttttattgtcattaaagtgatttttattaatttattgagaagtaaaaaatgtatatacttatagtgtacaacatgatgtttgaaatgtgtctacagtgactaaatggagctaattaacatttgctttaccttaggtacttacttttttttgtggtgagaacacttactatctactcttactaattttcaagtatgcaatgcattgttattaattttagtcaccgtgttgtagaatagaattcctcttgtctaattaaaatgtgtgccctttgaccagtatcttcccaactaccctcaacctcactcagtcccttctaaccactactcgactctctgcttctgtgatttctgatttccacttttttagattacatatgtgagatcatgtggtgtttgtctctctgtgcctgtcttatttcatgtaacataatgtcctccaggtttatgatcttcgtgatttcttggtctttcttgtgaccttctatttgtctaaagttttcatgaccttttatatttgttttctggttaaactttgtagatgaaagttgaagtcaggagttccttttctcttgccttctagaatagtggttctcaaactctttgggaattggacctcttttagactcttagaaatgattaaggattccaaagagcttttgtttcagtaggttatacctatcaatatttatcacactaaaaataaaatttattaattcacttacaaaaaatctattacatgtaaggataagtaagatttttgtgaaaagtattaccccaaaaaaggaagagtagcattgttttcaatttacagatctctttaatgtctggcaaaatattaatagaagacagatgaattgtcataggtgtttctgcttttaatctcttgtgctattttgttttggttgaagtatttgaagaaaatacagcctctgacagatacatgattaagacgagtacttaatagcatttttagatcattgagggtgttgtgctttaatataacacagctcaacaagtaataaactaacccttcttaaaagttagttgcgggccgggcacagtggctcacacctgtaatcccagcactttaggaggccgaggcaggtgtatcaagagatcaggagttcgagcccagcctggccaacatggtgaaaccccatctctactaaaaatacaaaaattagccaggcatggtggtgggtgcctgtaatcccagctactcaggaggctgaggcagagaatcacttgaacccgggaggcagaggttgcagtgagctgagattgtgccactacactctagcctgggtgacagagtgagactttatctcaaaaaaaaaaaaaaaaaaaaaaaaaaaagttgccaaatggattcttaaaccatatgattaaatttggggtgctcttaccttaaaactctgttctgttttgtactttggatcttttactcatgaacgattggtaacatcttgcattatttggaaggtattcattagctgagtttgcagatcttgcaaatgttggagcattttattgtacaataccaaaaaaatcatagtattaccactgattaatcagtctgtaagtactggaaagctgttaggttcacagtagagaatataagttttccaaaatctcaattttcacttgaaatctctcattttattgataggcacaaccgggctcatgttttgagaaaatgtttgtcagatagccatgtctgaataatcggtttgttagtcattctttcaagtaaaatggtgatgcttcttaaaaacaacgtctagttcagcttgcaactcagtcacacaaatgcttttccttaaggcagccattgcatttcaagatgcagcaaaagtgccttatgaatactttgattttgtcacaaagaatattaaacatgtgtactcaagggtcaaaatttaataaaataacaattttttaattagttcatgaagagcaactggcttttttctgccatgtgaggtaaggaaaaataccataactgctactacaaattgattcattcatgccaagagcctagcagttttacccatcactgcctttacttcattatataaatatcaacatggtaaaaagaacaaataacatgttattattgtgatgaaagtagttttaatttcacagactctctgaaagagtctcaaggacctccagggattgataaaccatgctttaagacccactgctttggtgttaatccactttggaaacaggtatgggttgtcataaatgacaatatctaagaaagatgtgagctgcagctatattttttttagtgttttaaattttgattttactccagccttttttgaactgtatgtaggtcttctaactaaggtagaaaattaaaattaatgagtagtatgtaatcttatgttttaaggttactcataaagattgcaaatttattgtggattaagaaatcctttcttgtcaataatgtcaagaattcctttattttgttcattcaattttcacaacacccctgtgggttttatcttggtgttatctttgtttaacagattaattgaatttaacagactatttaccttcccaaatcatgcattgaaaagatggacccatggtttaatattgaccaaagtgctcgttacaatatttctcgccaccagccgttgaaatatggcatactataaagagagcctaagttctgaagttgcctgggattaggttgacagccctgcttctccactgcccgagttggtgttctttatcctctcaatccttagtgaactcatcagaaattgcatttactttatagaattacaggtattaaataagtcatgtaaaacaggtttcagtgtgcctagtacatagtatacattaaatatttttcttttctacttattcacaatcattactattctaaatattacttcattttttgtcgctttttttttctctaatgcctccttcccttttctcattgcatacttttggaaatatattattagatgcctagataatacaaatagggtctttgtacacttagtagatcattcagttgcttaagaaagaaagttggaggaagatcaatatgtctactttaatatatggactaggattaaaacaccgtattatacatatgccatgtgttgttcagaatttcaattaataattccattattttgactcttttttgttgtatttttaaaatgtcctgttagaatccagaacccttgatgtgtccacagatgaagaggataaaatacatcactcctcagaaagtaaggatgatcagggtttgtcttctgacagttctagctctcttggagaaaaagaactttcatcaacaggttagtaatttgtatgattttggttaagaattttatttttaatatagtgtttttgatatagttattaatgacataacaaactctagtgacatggggcaagtaggtcattaatgatgattgtcagagtgccaaaattgctcatttttattacattttaacatgcacaggtcagacagcttataagtagcagggctaggattcaaacccagtttgttctggagcctgtattcttcttaatcactgtgctatactgggtgattgacattgatacttgaaggatggtaagaatttgtcagggaggatgtttcaggtataggatgtagcatatctgaaactctagggaaggtatgtaatatgtgcaggaagctaaaaatagctctggctgaaagtatttggttgcgagtttaaggaaaagaaaacaggaaggacaagttggagtcagattatacagggcttagggaaccactgaaaattttatacagatgacatgaatgtttttgtgtcttagaaagatcagtctagttcaggggttggcaaatctggcccaccacctgtttttgtaaacaaagttttattaaaacacaatcacagtctttcagttacttaatatttgtgggtgcttttgcactgcagcagcagagttgagaagttgccacaaagaccctatggcccgcaaagtgaaaaatatttatctggcgtcttacagaggtttataacttgttttgtgccgtggactcctttttcagtctagtgaagcctaagatcccttctgagaaaataaagtaaaatacatagctttgtagaggaaacaaattatattgaaataaaattattaaaatatattttatgacgcttgtaatatagtaataagtgcttctgtgcttctttttttttttttttttttttgagatggagtctcactctgtcgcccaggctggagtgcagtggcgcaatctgggttcactgcaagctccgcctcccaggttcacgtcattctcctgccttagcctcttgagtagctaggactataggccaccacgcctggctaattttttgtatttttagtagagatggggtttcaccgtgttagccaagatggtctcgatctcctgacctcttgatctgcccacctcggactctcaaagtgctgggattacagacgtgagccaccacgcccggccataagtgcttctttattagcctattaaataacaacaaccagtagctctgtaaccttgtaattttgtttcttctccatgtccacaaggtacagaaatactaagcgattaagccaatattaagaactgaaatctagtaaacagttgaagccttgtctggattctagatacagtgctattcagtaaaattttctgtggtttggaaaaattttctatcttcactgtccatatggtagccactagtcacaagtggctgttgagctcttgaaatgtggctatagcgagactgagaaattgaatttttagttatatttgaatactcacatagggctagtggctactgtaccaaacaatgctactataaaagatggcggattagactaggtgccatggctcatgtctgcagtttgggaggccgaggtggatggatcacctgaggtcaggagtttgagaccaacctggccaaaatggtgaaaccctggctttactaaaaatgtaaaaattagccaggcatggtggcatgcacctgtaattcaggggactgaggcaaaagaattgcttgaacctgggaggcagaggttgcagtgagcagagatcatgccagtgcactccagcctgggcaacagagcaagactccatctcaaaaccaaacaaacaaaaaaagatggtggattaaacaggataaggcagtggttgtaaagtgttggcagcactgcccccaccttaggagagagggcagcgtttgaaaatgtgtgggattatttaaatgattatagtagttgagttgttgctggcacatagtgccctagaggcaagggatgataaatgtcttaacaggagtgcagaacagttcagcgcagtgaattgcccatcccctatgcacattgagaaacgctgattaaaaattgaaaacttgtcctgtgaggaacacctgaaagttcgaaggacttattggctggcgaagaaaagatggaggaatgtgttaattttaagggctggcatgtggaagaagagcatttatttgtgttccgatgaataactgcctcaaaatagtccctctagcagagattacttgttactaatagaagatgataatttacctctcagccctagatgattgcatatcagataggatgatatatgtgaagaattattcataagttataaatttgtaaaaacatgatgtatttattattgaacaatatgctgacattattgattcctcctatgtctgcccagcatctgctgtgtgagaacccttgaacgaggtattgaatatgcagaaacaggacaaacgcaatactcttctcttccttggttttttacttctttatttttacttgagcagttacctttatgtagcactaatatcttactagtgtgtcccattgcttgtgacttactaattaaaccctaccgagtcacctgcaagaaaatcacttccaaaataagtatttctgtgtccacattcatacacttgagtatttgaacctaaatgtcttatcttaatcctgcctgcacattaaaatcctctagggagctataaaaacatacttctgctcagctctgcctcagatcaacatctgaatcactggtatagaggcctgggtatgtcaagcttctcaggtgactctgatgtgtagccagggtcgagaattgctactataacctgctgtgatggttttgaatcttaaatgctttgggaggaggaagagacacctgaccttcatcatgtccctgacagtagtctataaataattactaatctataaaaaagcaaatcacttcattttctattacttgttcttgatgaatatttattgacttctagtgatttctttattgcttcatgattcactcaaggacttttaattttccctagggctgatgtcaagcatattggtctgtgatttctaaaatctttctctttttttgtttgtttcaaacatgggagcttttgtgcatctccaagtacatggcatttttctgtttatttctcaaagaatttgggtcaacttgtgggaaagtttagaaaatttcacttcagcctcagtagcttgacatctttttagtagtttgaagtgcttaaaatggtgaaaatttctctcgctgtttctttaatgtagtatttttcttaagaaaccgttttttccagaatgaagataaatttcagcttagatcatgcatgaagaaactcgttttaaattggaagagtttatgctaatgatatttatgctgtacaaaataaagaaaaaaaataagactctcttaagagttgttgtcatttaaaatttttcacctggtaaatgagcctgattattttctttacacttcttaatgtctcatgtttattcacgtggggctcactacagaaccgcagaggctaatttggctttgctctgttactgtttgtagtatgtttgtgatttcttgtaagtgtgggtaggagggaaggaggaaggaggacatcatagtgtagtatctctcttacttggtaagtcaggctggtctgtcattgatccttctaacttctgtagctctcactgattggggaacaccacactcagccctctccacatccctgcgctgacaatctcagagcttccagaaatgagaaatagcgacccctcaacaaagtgagcagtacctgatgagtaagagagttaaaagataaaatgaagcagtttcagtatattttctgatacttctagatttgtttgatttttctaagttgtatttaatctctattaagttttcttcctttgctgatacagattttgagccatttattaaagtcacattcatatatcaaaatagcaaataatttaggaaaatggtgcttttttctttttcttaaatgtgaggaatatttacttacattggtctttggtttttagtgtcctcgtctttgtttccttcagttaagatcccagatgcagcttttattcaggcagcccgcagaaaacgtgaattggccagggcccaagatgactatatttctttggatgtacaacatacctcctccatctctggtatgaagagagagagcgaagatgaccctgagagtgagcctgatgaccatgaaaagagaataccatttactctaagacctcaaacacttagacaaaggatggctgaggaatcaagtatggatttaccaatatatgaagattaggatattttttattagaatataatatgagagaatctccataaaaaatgtaatatgctggctcacattttatagtgttgataatggtttttaacatcgatttggtccatgatattgtgacctctaaaagatgtatctgtatcaaaatgttattatcaaggagtatgtgtaataatgtttattaatgcctgacctcccaccttgatgtttttggacaggttaaaaaaaatgtgcagtatcttactttcaaagcattgaaaacgatcgtttttacctgtataaatatattttttttaacatggaagcatctatagagattttagatgtcatgtattaaaatcttccctgctgtaataaaaaatttcctctaccaataatactaagccttaaaggactgttttcatatttctcatttatgatatatgcatttgaccaaggttttggtaactttaaataatatttttttcagaaaaggacttagttccttacaatttatttttaagtgtttggattctcaggtagtaattgagagatctttgataagaaaaaccaaacatttcattctttctcagttttttacaatatagggctatagtgttttgagtgggacagtttagtgataggagtgcaggttatggagtcagatcccaggatccagcttccagcttcaacatagtcctaagacagttacttaacctcccaatatttgcatttcctcatttgtgaaatgagggcagtaatagtgccttcttcccagaattattatgaagaataaataacacgtcaagtggtgctaagcctttgtataatctcaaaaaatgttggcttgctgcaattaaaatggaaaaatactaaacgtttacatgtgagctttttttccgctagtaagcagaaatgaagaaacaagtgaagaaagtcaggaagatgaaaagcaagatacttgggaacaacagcaaatgaggaaagcagttaaaatcatagaggtaatcattttttatcccatgtgtattagattcctgtggctgctataacaaattaccacaaacttggtgactcaaaagaacacacatttattctctcacagcgtggaggccaaaatctgaagtcaaggtattggcagcaccttgcttcttccaaaggccctggggggttgtggggagcggtaattcttccttgccttttgcaacttctggtcattccaggtgtttcttggcttgtgactacataactcctctctctgcctctgtcttcacgtggctttttccatgtctctactgtgtgtttttctcgtaaggatacttgtcattgggtttagggcctactcagataatccaagatccttcacttaattacaaccacaaagactctttttccaaataaggtcatgtttgcactttccagggattatgtcatggatgtatcttttgggaggcctccattcaacccactacactgtgcatattatcttattttccactagattataaataccttccacttgagggtactatttttttaatctttaattttatagtaattgacagtttatattgtacaggtgcttaaaagtaaagtttagccctcaagctttacttttaaacgcctgttctgtataatacaaatatatccaattttctctttggagactgtttttttcacttcacaatacaacagagacatctcaccgcaatggtatatctacttcgactacaccttaatgatttcatagcaatctagtgaatagataatatatatcatttatatattaaatctcattatgtgatttctcatataattttttattgtagtgaaccctatggtaaatattatacacaaatatgttatacctatattatgatatgtaactgttacatttctgcatacacaaataatagttttgtgttttatttaattttttaaaagatgtaaacaaagtaaatatccaacaataggggtcttggtacaatacagtaaggtgggatgaagtgctaaaaatggtatcagaaaccaaagctcgggaggctgagtcaggtggatcacttgagtacaaagaagactagcctgggcaacatagccaaaccctgccgctacaaaaaatacaaaaattagccagtcatggtggcacacacctgtagtcctagctgcttggggggctgaagtgggaggattgcttgagcccaggaggtcaaggctgcagtgagccaagatcacgccactgcgcttcagcgtgggtgacagagtgagaccctgtctcatttaagaaaaaaaaaaaaaaacaacgttaaagcccagatttggccaggcatagtggctcacacctgttactccagcacttcggaaggccaaggtggaaggatcacttcagcccagtagtttgagaccagcctgaacaacacagtgagacctgaactctactaaaaacaaataaaactagccaggcatggtggcgcatgcctatagtcccagccacttgcggggctgagctgggaggatcacttgagcccaggagttctgggtgcagtgagctatgatcacaccactgcactccagtctgggcaacagagtgagaccctgtcactaaaaataaataaatgaatgaatgaatgaatgtaaagtttaaacaagtagtgagctttgaaacataacaaatgtactgtacttggggttaaaagtcctagatttgggctgtgggtctgctgctagaatataagttctgtgaggtcaagaattgcaatcatagtgtacatcagagattcccaaactttctcattcatggagatgttagtgtcttggtaattttatcatgatacttgtaagccaaaagaagtaccaaacagttctatttattaagtagtccaaagaattttatacaatttatgtcctaagaactaaccatttggaaaaaataatacagataaattgaaggcaaaacatttttatctttttttaaataaccaaaattccttactaatgagatgtgtgttcctgttaggcattgcatgacttttcagaccttggagtcagattggacactgtcactctcatttccatactgatgttcacacaatacttgtttttatcatagcatcctcccaaaacccagctccacaaatatgacttcatcaaaaggaatggaacacattctttttttttttttttttgagacagagtttctctttgtcgcctaggctggagtacagtggcatgatctcggctcactgcaacctccacttcccaggttcaagcaattctcatgcctcagcttcctgagtagctgggactacacgtacataccaccatgcctgactgattttttgtattttagtagagatggggtttcatcatgttgcctaggctggtctcaaactcctgagctcaggcagtctgcccacctcaacctcccaaagtgctaggattacaggtatgagccactgtgtctggccatatggaacacattctaatgtaactgtgaactaagagctagtagtccaacagatgttgagtattacggtttttccctaaaaaatttaaaatgtctcactacacccctttaaatttgctaggatgcctttgcacacagtttaggaaccacaatatgcatgcaattttgaattctgatttccttgcttgacatattataaattatcttctcttgtttttatatcgttataacaactgattttaatagctatataatattcactggagtcactgaatcataatcttaaccattcttcattttggacattttaggttatttgcaatctgatttttttaattaacaaataagaatcagtgaatatttaattattttcctcctctcctttcttttgttcagatgtgtgtttttgaactattcctttgtaataattgccaagagttgtattactaatcgagatgaacatttttatggcacttagtatatttttctctattgccatttaaagaaaacttagctcaatctgtaatgtcgccaatatcatgggaatattttaccataatcttgccctcttcaggtccaagtatagttggtgaaaatggaatctcacacttatttgattttcatttttattgctaatgtgagtacatttactgattcctttattgaaaatctaccatttgccactgtgttactttcctgtggctcctgtaacaaattactgcagacttggtggcttaaaacaatagaagtttattcgctctgaggtctggaggccagaagtccaaaatcataatgtcagtagagcaacccccctttccagaaactctgtaggagaatccattccttgactcttctagtttctggtggctgttggcatgccttggcttgtggccacatctctctttgttgcatcttcacatctgcttcttctcttgtgtcccaaaattccctatctcttaggatggtacatgtaattgtattcagaccccatcgggataatccaggatatacaccacatctcaaagtcttaattacatcttttgccatataatgaacatgaacatgaatgtgaacatgttttcatggggtcaccattagcctgctacggccagttacaatgatgtacaacctctgcaggaagggagacaactaaacaaaacaattatagtgaaatcctacaggtgctgtgacagaactctgtgcagggtcctgaggtggcacaaaggagcaagtgggtgatcagttttataggagggaaggtaagtgaggaagtctgagaaagcatttatggaagtggtgatatttgaatgggttattgactgcaaaatatcaagagtgtttggagattttgtagatatgcgtagagctggatgggaggcttggtgagaactgaaatgacaaaagatgatgcttcatggaaaatataaaaagaatagctaagccagtgaaattggctaaatatctggtcagttttcttcatgtgtctttgtgtaaaatagaggttcttcaggatcttttgaacattccaagcatggaggagctgtgattagacagaggacactaatgtgaaacataccatgttataagatatatgttaggagtgcatttctttacaaggaccagaaaacccaaataagaatgtcttggctgggcgtggtggctcatgcctgtaatcccaatactttgggaggccacggcaggcagatgacgaggtcaggagattgagaccatcctggctaacacagtgaaaccccatgtctactaaaaatacaaaaaaattcaccaggcatggtggcaggcgcctgtagtcccagctactcgggaggctgaggcaggagaatggcgtgaacccaggaggcggagcttgcagtgagccgagattgtgccactggactctagcctgggcaacagaacgagactccatctcaaaaaaaaaagaaagaatgtcttaaagaaaagtaaaaactttacctacaaaccctccagcacacttccatttacttttcattgactagaatggagttgcagttaaataggtacttctatcatggaaataggtgttaggtcagccagacaggtctgtctactccacaaattaatattcatgaaggattgttgtttcttaaaaaactgggtgactttctgagagtacattagaccataaccaaaattagcttcaaaactaaacttttttaaaaatgtaatttttagaatttgcttcttaaatatgaatttaaacttctaaattttaaaactgaatttaaaaacattttattgggaccatgaaaaattacaaagacatggaattttttagcttgaagagaccttggatcatccagtccctttacatgctattaatgtttcaaaggtaaatgaaataaatggttttgtaaaaatctatttttacttttttaggaaagagacatagatctttcctgtggcaatggatcttcaaaagtgaagaaatttgatacttccatttcatttccgccagtaaatttagaaattataaagaagcaattaaatactaggtgagcaatactcattttgaaatttacatttgtcctagatatttaatactaaagatataacactatattcttttagattattaagtactgatattaaacagacttatgggggggaaaaaggatctcctgtgttatcatactaacacaatttatttcatttttgtatacactagtcccccccatatctgcatttttgccttctatggtttcagttatcggtagtgaaaccatggtccaaaaatattgaatggaaaattccagaaataaacaattcatatgttttaaattgcatgctgttctaagtagtgtgatgacatcttgagctgccctgcttcatcctgcccaggatgagaatcatccttttgtccagcatctctttgctctgtaagccagcagcctgttagtcacatagtaaccatctcagttatcagatcaactattgcagtatcacagtgcttgtgttcaggtaacccttattttacttaataattgccccacagtgcaggtgtactgtatgtaatatataaattaaactttatcatagttacctatgtatagggaaaaaacagcatatataggctttggtattatttgcattcactgggggtcttggaacctatccccatgattaaggggtgactacgatatgtctttttagtctttataacatattttacgtggttaaaatcagtaaatacaaaattctacttttctatttaatatgattataagcatttttctatattaccaaaaagcctttaatttttttaaaaaaactatcatgtttgtccatatagttgttatatcataattaaatacttctctgttggacattttgatctagaacaggagtcagcaagtcgtctttttgtgtaaaaggctggatagtaaatattttaggctttaagggctagatgattgctgttgtaactgctcaactctatgttacagcatgaaaacagccatagacaatatgtaaacatataagcatgtatgtgttccaatataactttatttataaaaacaaaggatggactggtagtttgccagccccctagaatacaaagataaccttgcatgagggataaaaaagaggcagcagatcattgatttatcgtagcattttattttatctggataactttattatattttattttttattaactaggttttttattttaaaaagaccatacactctcattgttaaaaaataaaataaccagtggaaaggatatacagaacgaagtaaattaccaccctccctagaggaacccattgctaccagtttcttatgttttgttccagaagtggtctatatgtatatctttataagcacatgtatacttatatattcccgtttttatacaaaaaaggacattatataccctgctctgtacctagttttttccacatgatatttacttacaagttcactgctatagtcaaaaatattctacttaactaaaacattttattaataatgcctactatacattattatcttgattaatttcttaattctcactctcctttatataaagcaaagaaagattctgaaagacaaatgcaagaaaacttgaagagagaatatttggcctaagcaagtgctaaagggtttccttttattgtggtgttctttgcttatctagtctataaacccagatttatatgattgtcagtttccttggtggtctttgaaaatatttacattagattgctacttttaaaagagtatgaaaaataaactaatttttattttatttatttagattaacattactacaggaaactcaccgctcacacctgagggagtatgaaaaatacgtacaagatgtcaaaagctcaaagagtaccatccagaacctagagagttcatcaaatcaagctctaaattgtaaattctataaaagcatgaaaatttatgtggaaaatttaattgactgccttaatgaaaaggtacatatcaatatttatttatatcatttccttttttggagaaaaccccttgtgcaattaagaaaagtctaaatctcacaattagatacttttctctagtatttttcctacacatttttaaaataagatgatagcattctcttaatgttggatattcaagttttttgcaactattttattattgtaagtaacattgtataaaattttgtatataaatttttgttataatttcttctgtttaaggaaaattccttgaaaatgaagtcaaataaaatgaattattaagtctaaatatttttaaggcttatgaaacattacaaaattgacctccagaaagattgtgccagttttattagtttactagattaggaataaatggattttgtttttacatatcatattttgatctcaagcaaactctttggttttctgcttgtgaattatttgtttcttgtctttgcccttttatctttgtggttcttagtggaaatttttttctttttcttttctggttttgttagagtatgaacaattctttatagcttaaaattttttaatgttttatcctacttaatgtgaacttaccagttttgtcttttgaatttgtttgtaatggtttttctttcaacattcagatgttttgaaatttttgtttttagtttttgttttatgcatactaagtttttacattggggcaggccttcagttgtctgtttttaaaaatagattaaccatttcaataaattattctctactttccacatttttgttatttttattttatttatttttctagtgagggggacagagtctcgctctgtcacccaggctggactgtagtagcacgatctcagctcaatgcaacctctgcctcctaggttcaagcgattctcgtgcctcagcctcccaagtagctgggactacaggcgtgcaccaccacacccagctaatgttttgtatttttagtagagacggggtttcgccatgttgcccaagctggtctggaactcccgagctcaggcaatccacctgtctcagcctcccaaagtgctagggttataggcctgagccactgcactcagcccacattattttttgtttataattaaaacaatgagatgctttgtcccaattgttgttttaagttggctatcttctactatcacttggtagttactttctgaagtatttattacaatgtaattttcttttttcatttgcccttgaaaaattacactgttaaaattttgtcagcctgtgcattaatgtactcatagcagcagctgtggagtatcaatggagtaggaggaattgttgctccccaaaatatgagagtttcaatttcaacaagtctcatttctgtatcacatcacaacttacttacctgactctggttagtttttctccattccccgatttttcaaatttcaccagctttgagtgcccccacctactttccacaccctcagcctggaaaacatctgtacccttcattttttcctattcttctgtctcaaaaaaaaatcttctatctcaaactttaatgcatgttcctgactccatcccatttggtttctttttttttttttcttttgagacagagcctcactctgttgcccaggctggagtgcagtggtgtgatctcagctcactgtaacctccacctccagagttcaagcgattctcctgcctcagtctcctgagtagctgggattgaaggcaggtgccactgcgcctggctaatttttgtactgttagtagagaaggggtttcgctatgttggccaggctggccttgaactcctgacctcaggtgatctacccacctcccaaagtgctgggataacaggcatgagctaccacatcctggcccccatttagtttatctatctctgataattgtaacagttccagtagactaagtcaattttctgattttttaatattaaaagtattggcagctaggtctgttgcacacaatgttttatacttcagatgtgatagtattgggaatgtttctttgagaattaagcatataaatatgcttatgtatcttctaaatattacttttatatatatatatatatatatatatttcattatcgatgacctgcaaaatgttacttatatgtgtatttcagattatcaacatccaagaaatagaatcatccatgcatgcactccttttaaaacaagctatgacctttatgaaacgcaggcaagatgaattaaaacatgaatcaacgtatttacaacagttatcacgttagtgtttttcgtgttccatacaatttattattcattaagctaaattatgtgaagaataaaaatatttttatttttataaacatgtttttcatgtattttcccacaaaccctttacccaccaacttccaaaaactcaaaacatttagaaataggacttaagaatgttttaaattaagtccaagactcaaaaataaacatgacttccagttatttactatttcagacagaatatgtacatagccatttagagaatgttttgagacaagttcacataattctggaggctctgtcagaagtctaacttcatagtttcagagcccttttacagattggttctggtgagtttcaatacagattttaagatctcattatataaaatacggatgcctcctcttttttttttcgcattgattttgtactttcagagatatcttcctttgattaaggtgctatcaggagatagtgaaagaccataaccaagtagctagtaaatgcaaaggcaaagtgactttcagtgaaacacacaacccttagtggatcataaataatggtattacgtattaaaataagaaataatatgaatagaatacagtaatccctctaatctgcagttttgctttccacagtttcagtcaacaatggtccaaaaatgaataagtacagtacaataagatattttgagagagagatacccaacattcgtataacttacaatatattattttcattgttctactttattgctattgttagtctcttacagtgcctaatttataaattaaactttatcataggtgtgtatatagaggaaaaaacaaatagggtttggtgctatatgcagtttcaggcatcgactggggttcttagaaggtgtcccctgcagattaggggggactcctgtattggcaaagccaatatttcttgcatttggctatggaaaaaaactggtagaaactactggaaaagaatatgagaaaacgaaactttgtggtagaactttgttgctgttctcaacaacagcaaaagtacaccagccaaagtacatttttaggctaatgaacctcatgcctgttaatattgcaataaagagttaacattgaaatgtcattgcataattaattgcaaaatttaagcatatttatgtatttacatatgcatatgtttatacatccatgatattacctttattttcaaagcattttacttttttcttttgagaatttgtagtatgaagtcaattttatttattaacaggcaaagatgagacatccacaagtggaaacttctcagtagatgaaaaaactcagtggattttagaagagattgaatctcgaaggtacctatataaagtgaagatttaaagaaagcatcattgagcaagtacttttcactactgaaatataattaaccacatgatgtcattaactatacctgatatacattattaatttgtaagaataatagaaaagcaaaatttagtaaaaccacccttgactgctttaaagacacattggtgtatttggatcagttaaaaggaatgggtaaaatgacatttatcaggctgggaattccttgtaactagaaaccggtcctaattataattaccccctcttcggaatctggttagcccatgggaatgtcctaaatgggaatgtcttataagagaaaacaaaacaaaacaaaaaatgcagaaccaccaactcaaactaatgaaactaaaaatgtcaaaaatattaataaaattgtgcgctgatatgatagtatatttctggccatttaaaataaatgataaaattacttattttcagcaagaggttaaaaaaaatttaggcatttattttcagcaagaactacttactttttgtttatttttggtttgttgcaaaatataggacaaaaagaagacaagcaagggtgctttctgggaattgtaaccatcaggaaggaacatctagtgatgatgaactgccttcagcagagatgattgacttccaaaaaagccaaggtcagttaccaagtttctaatatatcatggtttgagttttgaaatggtgagaaacactttgctgggattgcccttaataagtacataagctatataaaacagttgggtaaattcaggaaaaatgaaacacatttttcctctgtaagactcttttctctgaaaaaatggagtaaaatgaaggaaggaacattgtgagtattcttacatcttcatagttttttctcttagacgttctccaattaataatgaacatcttcatttcatttctttaccacacatactttctatattgtcatttttaacttaaaacatttgaatttggtgaaactttttagcatgatgagaagatgcatatagttgaaaaattctaggctctggatttaaataaatttgggttctaagggagatttttttctgtgtaatcttagacaaattttttgacctccctaaatttgatgttgttttgtctgtaaataagtagactatacctatatggtatggaagatagctacgatggtaaaatgagattaatgtatttctgcgtatagcaggggtatatatggtaacttctattagtgttgatattattactttgttgataaagtgatttaataaaaatttatattaatataaaaggacaaattttagctcaattgattacagtccatcatgaccgtgtttttaaggaagcatacttaaagttcacaacttaaaatgcataaagagacttattttgtttacaggtgacattttacagaaacagaagaaagtttttgaagaagtgcaagatgatttttgtaacatccagaatattttgttgaaatttcagcaatggcgagaaaagtttcctgactcctattatgaagctttcattagtttatgcataccaaagcttttaaatcccctaatacgagttcagttgattgattggaatcctcttaaggtatttatgcttaacatatgaaaaattatcctgattatattagttgcttaaattcccttactattgtgttaggcattaaataccttacccttagagtcggagctgaaatttagagctttggaacaatagtcagaaaatgtgtgctttcggctacattcttcttttcttggctgtcacttgatttttaggctaagcatcattaacatcagtaaagcaaacacatttttttttagcttcttgtacattaaatttaaaatcctcccagaaagtataaggtactgttgggtttggagaaagtagatataaaagccttgtttcaagaattcttaagttggagatgacatactgggaagagttgcttagggttgtgttgagaaggtggaatgcaagcctttgaagagtttatggggtaaacaggatgaatcagaaagggaaaggtgtttcataaaggtgtaaagggagaagtattagttcaggagctagaaattgcacagatatttagatcctaagttaaggaatataaactctgttcactgaatttgactgactaaaagaaaaaaaaagaagtatgaactcagcaactgcctactgtgtaataggacctttaactaaatcacatacaaattacatatttatgcttagtgaattgaaggggccagaaataaactttgcttgaagtggatgaattttttttataaacaaattccatggctgtttcaagtgcctaacaaatttgtattttgctccaagcagagtacttgccatgtggtagggtctaaaggctccggcacacactaggtagttgttgagtgtttgttgtgtgattgaatgcatgaaatgcagcttcttcttatgttacttagacaccatgtctcagtcatgctgtcctgcaatcctgcctagccttggtggtctagtgttaaaatagggaattaatctcttctgatccttagaaaagctctggtgattattgaaaaaaataataactatttaaaaatacactaatgttgaaagatttctttataacttttgtaattttctttgtaagttggaatccacaggtttaaaagagatgccatggttcaaatctgtagaagaatttatggatagcagtgtggaagattcaaagaaggaaagtagttcagataaaaaagtcttgtctgcaatcatcaacaaaacaattattccccgacttacaggtactgcttcgtaaccttggtaaaattaaattattttctgacagagtatataaggttgttaatttctgttatattcacaaagttttttcataagtttttaatctcaaggaaatgttatatgtagtaaaaatcaacagctgtcaaatgtaaggtggttaaaaaatttgtgtttgtacaggtggttggctaccaaactgctaatactcagattgatcactaatcctcatctgacgtatcatcagcagttccaacagttgacccttctttcttcctagaaacactgtctttacttggctaccaaaataccacactcttagtttcctgcccacctctctggtctttgctgtctgcttgtcacctctttgacttccaagtgctacagtatctctggattcaggtcacttaccttctctgttctatttacttcagtcacttagtatttaaagtcagtttagtgtttgtggcattcccgctgcttttatggcacttcagtcattttttagcacacttccatccatactacatgtgtccttttttccccttaacttctctaattgtgtttcttatccttttctttaaaaccattgcttcatctgggagtggtggttcatgcctgtaatcctggaactttaggaggccaaggcaggtagatcacctgaggtcaggagttcaagaccagcctggccaccatggcgaaacctcgtctctactaaaaatacaaaaaactagctgggtgtggtagcaggcacctgtaatcccagctactcaggaggctgaggcaggagaattgcttaaacctgggaggcgaaggttgcggtgagccgagatcgtgccattgcactccagcctgggtgacaagagtgaaactccgtctcaaaaaaaaaaaaaattgcttcatttcactcacatttgccactagcagctatgagcacttaacattaatgcttgtgcttcagaccttagcatgaagtcttttgttttacctgtgtacttgataaggatccgtttcactatgtcactgagaaagaaatttgacagcaaagactgcaaaactcttatttaattttttgtgtgtttgtttttgagacagggtcttcctctgtcacccagactggagtacagtggtgtgaacattgctcaagtcagtcttgaattcctggggtcaagtgatcctactgcctcagcctcccaattagctaggactccaggcgcgtgccaccatacccagctaatttttaaaagatttttttagagacagggtcttgctctgttgcccaggctagtctcaaactcctggcctcaagagacccttcccctaagcttcccaaagcactgggattataggcatgagtcaccatgcccagcctagaagttggaagcaattagccttataattgcttcttaggcaacttgattataagattttggctgggtggagttgctcatgcctgtaatcccagcactttgcaaggccgaggcagaaggatcgcttgagcacaggagttccagaccagccttggcaacgaggtgaaaccccatctctatttataaatttaaaatttaaaaaaaataaaaaataaaaactttcaagattttatttcaatgaaacttatggtgcatttgtggggtgtgttagaaagttactatttttaactaactctactaatgatagaatgcatgtgcctagtttaagcactctgctgaaaaaatctaaatactaatgatgaaacagtcccacaaataagtagctttgtgagaaattaacactgactgagtccaaatagtgattgaattctacatatatttcaaagatagcactaacagaatgtgctaatggattggttgtgcagcaagagagaaagagaggaatcaagaatgggtccattgaggaattggcctgagcaactggaaggacagaggtgccatttcctgaaatgaaaaagtctgacaggagtaagcttaatgtggggagctgtattagcatagcagctcagtttgggacatgttgattttgaagtacctgtaatctaagtggacatgtcaagtcagttgttgaatacatgagtcttaaagggggaggtccagtcagaaggtataagtttggaatttatccacatgacatttattgatggcatttaatgtataaaattgactttgaataccaagcgagtgaatataaaccgaaaagagaaggtaagtgacctgaatcctgagatactatagcactgggaagtcaaagagatgacaagcagacagcaaagaccagagaggtgggcaggaaactaagagtgtggtattttggaagccaagtaaagacagtgtttctaggaagaaagaagggtcaactgttggaattgttgatgataagtcagatgaggattagaatcaatcattggagtttgctatgtgaatgtcatctgtgatttgctaagagcgcattaggtaggctgataagagataaggcctaattaaagggaaagcaagaacaagtgagaagagagaaactggagatagaagtttagatagtactttgaggaattttgttgtaaaagataggagggaaatggaacaatactagaggaggaagtagggctaagggggattttttgtttgtttattattatactttaagttctggggtacatgtgcagaacgtgcaggtttgttacataggtgtacacgtgccatagtgtttgctgcactcatcaacttgtcatctacattaggtatttctcctaatgctatcccaccccagtcccctgacccccaaaaggccccggtgtgtgatgttccgctccctgtccatgtgttctcattgttcagctcccacttatgagtgagaacgtgcagtgtttggttttgtgttctggtgttagtttgctgagaatgatggtttccagcttcatccatgtccatgtccctgcaaaggacataaactcatcctgttttatggctgcatagtattccatggtgtacatgtgccacattttcttaatccagtctatcattgatgggcatttgggttggttccaagtctttgctattgtgaatagtgccacaataaacatacatgtgcatgtgtctttatagcagcatgaatttataatcctttgggtatatactcagtaatagcatggctgggttaaatggtatttctagttctagatccttgagcagtcgccacactgtcttccacaatggttgaactagtttacagtcccaccaacagtgtaaaagtgttctatttctccacatcctctcttttaattgtgatgttaggatgtcgattttagatctttcctgctttctgttgtgggcatttagtgctataaatttccctctacacactgctttaaatgtgtcccagggattctggtacgttgtgtgtttgttctcatggtttcaaagaacatctttacttctgcctccatttctttatttacccagtagtcattcaggagcaggctgttaagtttccatatagttgtgcggttttgagtgagtttcttaatcttgagttctaatttgattgtactgtggtctgagagactgtttgttatgatttccattcttttgcatttgctgaggagtgttttacttccaattatgtggtcagttttagaataagtgtgatgtggtgctaagaaaaatgtatattctgtcgatttggggtggagagttctatagatgtctattaggtctgcttggtccagagctgagttcaattcctggatatctttgttaattttctgtttcattgatctgtctgttatcgacagtgggatgttaaaggctcccactattattgtgtgggagtctaagtctctttgtaggtctctaagaacttgctttatgaatctgatctgagtgctgctgtattgggtgcgtatttatttaggatggttagctcttactgttgcactgatcccttcaccattatgtaatacccttctttgtctcttttgatctttgctggcttaaagtctgttttatcagagactaggactgcaactcatgcttttttttcttttttctttttttttttttttttttttgctttccatttacttggtaaatattcctccatccctttattttgagccagtgtgtgtctctttacatgagatgggtctcctgaatacagcacattgatgggtcttgacactttattcaatttgccagtctgtgtcttttaattggggcttttagcccatttacttttaaagttaatattgttatgtgtgaatttgatcctgtcattatgatgctagctggtcattttgctcattagttgacgcagtttcttcatagcgttgatggtctttacaattcggtatgtttttgcagcgtctggtaccagttgtacctttccatgtttagcgcttccttcaggagctcttgtaaggcaggcctggtggtgacaaaatctctcagcatttgcttgtctgtaaaggattttatttttcctttgcttatgaagcttagtttggctggatatgaaattctggattgaaaattcatttctttaagaatgttgaatattggcccccagtctcttgtagcttgtagggtttctgcagagagatccgctgttagtctgatgggcttccatttgtgggtaacccaacctttctttctggctgcccttaactttttttccttcatttcaaccttggtgaatctgacaattatgtgtcttggggttgctcttctcgaggagtatctttgtggtgttctctgtatttcctgaatttgaatgttggcctgccttgctgtgttggggaagttcttccggataatgtcctgaagagtgttttccaacttggttccattctccccatcactttcaggtacaccaatcaaacatagatttggtcttttcacatagtcccatatttcttggaggctttgtttgtttcttttcacttttttctctaaacttgtcttctcgctttatttcattgaggtgatcttcagtctctgatatcctttcttccacttgatcgattcagctattgatacctgtgtatgcttcacgacattctcatgcagtgtttttcagcttcatcaggtcatttgtattcttctctaaactggttattttagttagcaatacctctaaccttttttcaaggttcttagcttccttccattgggttagaacatgctcctttagctcagaggagtttgttattacccaccttctgaagcctacttctgtcacttcgtcaaactcattctccatccggttttgttcccttgctggtgatgagttgtgattctttgaagaacgggcattctggtttttggaattttcagcctttttgcactggtttctccccatctttgtggatttatctacctttggtctttgatgttggtgaccttcagatggggtctcttagggtacatcctttttgttgatgctgatactattcttttctgtttgttagttttgcttttaacagtcaggcccctcagctgtaggtctgctggagtttgctggaggtccactccagaccctgtttgcctgggtatcaccagcggaggctgcagaacagcaaagattgctgcttgttccttcctctggaagcttcgtctcagagggtcatccgccagatgccaggcagagctctcctctgtgaggtgtctgtcggcccctactgggaggtgtctcccagacaggatacacaggggtcagggacccacttgaggaggcagtgtgtcccttagcagagctcgaacactgtgctgagagaaccactgctgtcttcagaactgtcaggcaaggacgtttaagtctgctgaagctgcgcccacagccacccctttccccaggtgctctgtccatggaagatgggggttttatctctaagtccctgactggggctgctggcttttttcagagatgctctgcccagagaagaggagtctagagaggcagtctggccgcagtggccttgctgagcttcggtgggctctgcccaggtcgaacttcccggtggctttgtttacactgtgaggcataaaccggctactgaagcctcagcagtggcggacacccctccgcctaccaagctgaagcatctcaggttgggctcagactgctgtgctggcagtgagaatttcaagtcagtggatcttagcttgctgggctccgtgggggtgggacccaccaagccagactacttggctccctgtcttcagccccttttccagggtggtgaatggttctgtttctctggcgttccaggtgccactggggtatgaaaaaataaaaattaaaaaaaaagcctgcagctagtttgatgtctgcccaaacagccacccagttttgtgcatgaaacccacagccctggtggggtaggcactggagggaatctcctggtctgccggttgcgaagaccgtgggaaaaacacagtatctgggctggagtgcactgttcctcctggcacggtttctcgtggcatcccttagataagggagagaattccccaaccccttgtgcttcccaggtgaggcaacacccaaccttgcttcagctcaccctctgtgggctgcacccactgtccaaccaggcccaatgagatgaactgggtacctcagttggaaatgcagaaatcaccggccttctacgtccatctcgctgggagctgtagactggagctgttcctattcggccatcttggcagcctccttacactgagggggattatttttaatacaagataaatagttgtttgtagggtgatggaaaaaatctagtacaagtgatgtcaataccaaagtggaaggacagtgttctgggaacaggatcttagactaagccaaaaggcttgggatctcatccacaaaataaacagtttgcctgaagtggtgggagtgtgggtgcctcatccataggaataggagacaagttagagcatatcggcacagatgtaggtaggtgtgtagatgctgtggtaggagcttcatagtgctgcttttctgattgcttctattttcttagcaaattaggaagtaattagctgaaagagaatgcaagggagtagaaaaaataaagtaggaaataatcatctagaaggaaaaagtccatcaactgagagagagataacggagaggggagaaggtatgaagtaatcatctaggtgagagggagagtgaatggacctgagagacagagagagagagaggctcactcaagttgtatagtgatcaagttaatgtgtttgtttttccagccactttttatctgcatggttgcaggcagagactcagtgacaaggtgaacttaactataaagagctgtagtttagccagaggagtttaacaaagcccaagaagaacaaggaaattgaagatgtatgcaaatatgtaatggtaataattggccatggaacttaaactgaataaggagggaagtagtgtttgttaaaggtcttgattatttgtatatgaaaagcaaaacaatctagtaaatacattgtgtaccactgaaatatttgtttcagactttgtagaattcctttgggatcctttgtcaacctcacagacaacaagtttaataacacattgcagagtgattcttgaagaacattccacttgtgaaaatgaagttagtaaaagcagacaggtaataatttctagagttgcgaactccatgatctatctctaaatcattataattttcttacagatcttggtttataaaagatgcagaagtgattatcagaaaactgtttgggggaaaacatatttacttttgatttatagaaactagactttttctcagactgcactgagatgaaaaaaaaattttttaaactggacttggctattttttatctttataataataagatgaaagaatataccttgatacttctcaacactgtgataggagtggtaatcattttaaattatagacatacatgtaaggacccagattatgactttcattcctattagcttacttttctctgttcagtgatctgatttgtgttctcatggcccaggcagccatctttcaggattatgaatatacactggccctgcagagatgaaccggtataaattcattagtgcaaattcatttcttctaaaggaagacaacaatactcattacctttgttcttttggcaaaaatccagtggcattgtggctttgcttgaacaatggtttcaaaattagactgacacttattgtattaactagttatttgtagtctaccaaataatagtagtctctttaaggattcaaagttcagtaaaacagatcttaatcttacaatgatctagaattgaattcagtgaacataagacatattggggaactttttagagtgatgttgctgagaatcttctcactctttcattgtagcatttttttttattgtttgttgatgagattgtagattcatgcagttttatgagtaaaccaattttaggttgagctttaggaaattaaggagaaattgacagactggagaatgcccggagtagaatgacagaggtggttgaaaagcaaggaggcatatcatattcatattatgagcaccattaagttttagcccttggaactgtgattacaaaggaggatagctgtaagaaatgaaagggagaaaagggataccagcctaattctgccttcaagaagcatgtaatctcagagaaaataagatgcacataaactgtaacttaaaactggaagtgaaaaggagaagtagggaagataacaaacacttatttaattccaattgtgtactaggcactctgtaaggtcttgtacctgtcatcttaatcccagcagccctatttaaaaaatgggtgatcgccaggtatggcagatcacgcctgtatatctgagtgctttgggaggctgaggcaggaggatctcttcaggccaagagttcaagaccagcctgggcatcatagcaagatccatctctaccaaaaaaataaaaattagctgggctcccccttgagcccaggagttgaagctgcattgagccttgattgtgccaccacactgcagcctgggcaacagcaaaaccctgtctcttaaaaggatgacagcctcattttatagatgaagaaaatgaatctttaaaactagttgtcacagtgctactatgaatgagcactaggatttgaacttggatagtctgcctctaaagcccaagtttgcctcactgaccatgttgcctccccttgagcagcatagataaagtactgtgtcttcaggagagagacaggagagagaggttaccttcagcagtggggataaggaaataatttatcttaggggtggcatttgaactgtggcttgagggaaagaataggatttcaacatgtggcaacagagagagaggcattttctgcttacctccaataggataaaaactcaagtaaaatagatggaaactgttgcaggaattagagatatttaatttgaaagatgtacagagagatgctgtttgtattcaaagaaggtatagatttattctgtgctgttatgcagcatagaaccaagattagtagttaaaagctacaaagaagcagatatataatcctgcatttgctttccatatagtattgtttagttataacctaaatgtaaatcattatgctttaccatttgttaaatactttcacattgtctcatttgatcctcataaccctgtgaaatgtatttattttaattgcatttttacagatgaagctggggcccagaagggttaagtcatttttgaaatacttgaatactaagtggtagacctggctctttgtgatcactgaagcccttcagcagtattatggattcactcatgaagtcttttttttttttttgaggcggagtcttgctctgtcacccaggctggagtgcagtggtgtgatcttggctcactgcaacctccgcctcccaggttcaagcaattctcctgcctcagcctcccgagtagctgggactacaggcacctgccaccatgcctggctaattttgtgtgcttttagtagagacggggtttcactgtattagccaggatggtattgatctcctgaccttgtgatccgcccacctcggcctcccaaagtgctgggattacaggcaaactcaagcagtttttataatggatgtttttattctgaaaccgctctgctgtgaatgtagaaaatgggttgttttcataagcaggagaatagattacatcagggttttcagtctcagcactacattggcatttggaacagataattttttgttgtgagggtttgtcctgtgcactatagtatgcttagcagcatccctggcttgtgcccactaggtggcagtagcactccccggtcttcacaaccaaaaatgtctacacattgtcaggtattccctagggatggcaaaatggcacttggtagagaatcacttacactatataatgccccatgttgctaagacagttcaccagtgggatcactccatttcttcagtgatgaaagagaatgaggttcaagaatgaaaattgagtcagacaacatagtttctgttttcaaagttagaaggaaatgctgtaagctaatgcctggtaataatagttttgattctgactaaaaatctaaagtaaattattatagaggaagattatgaatacttaaatttaaaaagcagtaattactataatctgtcattgataggattcccaaatacaaatgatacttaacattgtttattgaagcaaattgttattatgattgttcttagggattaaatggggaaatataagcttaagtaaacctaaaaaataatggccagtagggcattggctacctatggggagtctgttagtattagatatcttctcagctttgccctgttcaatatttttattgaactggataaggagttaaaatacatactaatgaaatgtgtcagtgacaaaaagctaggaattctgtaagacttgtggatggtagaattagaatccaagaagatttcaaaagattgtagaaaattgactgattcaagaaattgtgaaaaaataaatgcatgtcccacccatgcgtttaaaaattcaactatataagtaaaagatgagagagacacagttttgaagcagcataagtaagacagattataatcaataaacccagcgtgagtcagcagtgtcacttgagtaacagaaaacaggtacatgggagtttctcctagtatgtgtgtgctattttgagtaagaatggcatatttggtgataatacccacagattagaccttcctgggaatattgcatttaattttcggtgtaagcatattaagtggagagtgtcttaagatagtatgggaaagagaagatgtaaaaaaaaaaaaagtatgatattcatcttaaaatctagaaaattgtcatgtggaagtggggctagttctattctatatgatcccaagaagtaaaccaagaccaaggagtggaagctgtgggagggaaaagtttgttaactctcattgttaactgaaatctaatagtccaaagttatgggcagcctcaggagataatgatcccctatcagcaaatggttttagacatggctggtggaccatttagtagaaatgtgaaaataagtctaaacatcacttgggagttcagatagattttcagactcattttttgttttttcttttttatcaacagaatctatttcaaataaatcttacgcaatccgatacgcaaacacacatacagaagtaaaactgctcctactgttgtgagcacctgcctttattcttccccaaccatccccaacatttgtccaggccatcctgggattacctccatggatatagagaacagcataaaaaccattggcatcacacaagtgcctctttaaagctgtttcaaagtatatatatatacacaaagggttgtatgtgagtctgaaagtgtgattcagaatgcttgttaaaactgtttggagaaccttattttccatcaaacaaatgatgttatttaatacttagaaaagttaatatctcacggttttaaaatatgtgaatttatgggaggtttcttttcttttttttgtttttttttttttttttgacagaaccttactctgtcacccaggctggagtgcagtggtgcaatctcagctcactgcaacctccacctcctgtgttcaagcgattcttgtgcctcagcctgccaagcagctgggattacaagcatgtgccaccatgtgtggctaattttttctatttttagtagagacagggtttcaccatgttggccaggctggtctcaaactcctggcctcaagtgacccacccacctcagcctcccaaagtgctaggattacaggcatgagccacggcaaccggccagtgaatttatgttttgttttaaacaatttatttggaaatattaatactttgaaagaaaactttcatgaataagagtagtatttccatattccctttaccaagatttacttgtcattaatattttgccccattggctttatcattagcccttccattttaaatatatacatacaatatgttttctcctgagtactgagaacagggtgcatatttgttaagacaaggatattatgttatataaccagagtagttagcaatttcagtaaatttatcaacacttaatctaccatccatattccacttttgccagttgattcaataatgtcctttataacattttcaatagaactattttaagaaacaaaatttaaacaatatgggaacatttgtcaaggccagcatccaaaatcattaaaattaaatgaaaaaaatcaaagcagctttttttgtatcatgaacacctaactcagtaagttacataaactcagatgctattttttggagatactgtctagaaaatgcttttttttctttgaacagaattcagaatgtttaaagaatggagtaaaatacaactgagttttaatttttaacattaaataaatgttgatatatggccacttgaggaatatgttatagataattaagtggaaagagaaacgacttcaggtcatgctttttaagaaaaatatatttgaattctacatttatggataattcagttagtatatagtatgtgacagttgaatttgtgctgtatacattgtcattgacttaaaaattaacttttactctaatgtgtagtatgccatttttatttttcaaatatgaataagaatatcattatataaataatataaatattgctaatatatgaaaaaaataaacactcattgtctttcatcctagtacaaggattaataccatcgtaggatattttcatcctggcttttttttcaaagttataatcctaataggcatgtaagttagtatactacttctgcttaatgttatctcattgcgtatttatagttgtctgttactgtagtcatcataatcttcagctaaagtttatgatagattcactggagcgatgtaacatctccttaaaattccctgtgattgaatagtttggtcatttccaatttttttatgtacaaacaaaatggatttccctaagtggattttccaacaaaggacccacagctggagtatataaaagacttgtacaaatcagtaataaaaagacagaacctaatacaaaaaaatagcaatgttggcaagcagcttaattaggtactttgcaaaacggcttgccaagtggcaaataggaatatgaaaagatgcccaacagcacattactcaatgataattaaatgagaattaaaacaacaaaatgaaatatgactgcatacccactataattgcaaacattaaaaaacaagaaaatgccaattatcgtaagtatgtagtgaaacaggatttattttatactgcaggaatgatgtaaatgggatgccactattctagaaaccgtttggttttttgtacgtagttgaacgtatggacatgaactgtactccagccattccatttctatttatatacccattagaaatgtatgaccatgcatactaaatgacatgtacaagaatttttatggcagcattatttataatagccaccaaaccagaaatcacctaagtgttccatcaatagtattcatgcaacaaaatactatatagcaatgaaattgatccaactatacccatatgtagcaacatggataaataaggttttttttgtacccaattgatagttattttaacagctggttatgtgagtgtggataaatttgtactgcagttaaaattactttttttttggtaaatacatttctatcttctatcactgatgcttttcaaatttgtaataataggatttacttaaatccattgtttcaagaatgaaaaaggcagtagaagatgatgtttttattcctctgtatccaaagaggtaagcgctgttaatttctagattgttggaaatagctgatcatagaatacagatttgtttaagaatgcaatgcaaaagaaactacagtgttttattttttgttttgttttttgtgtttcttttttttttttcttttgagactgagtctcactctgtcgcccaggctggagtgcagtggcgcgatctcggctcactgcaagctccgcctcccaggttcacgccattctcctgcctcagcctcccatggctgggactacaggcgcccgccaccacgcccggctaattttttgtatatttagtagagatggggtttcaccatgttagccaggatggtctcgatctcctgaccttgtgatccgcccgccttggcctcccaaagtgctgggattacaggcgtgagccaccgcgcccggccaactatagtgttttcaaaacatgtgtacacatactctatgaggatgcaaattgagatttcaacaaatatttctcagtgacttacataaagccgtgctttatcttggcgcttagatgaattttgtttggttggttttggttttggttttacatatatcctaggaacatagcaggtgatatagagtggtaaagagcacacgtccactgttagtaggtatttttatgcacttgttttctcatctataaaataaggataaaattagtgcctacctcacaggatattagggagatgaagagaatgctcagaacacaacagggcctagcacagaggaagcacaatgctgaggaacgagaaactgcacctgtaaattctgcagtcactttaaattataaaacgagtatttgatgtatgatcataactttgctaagaagccatcagttataatgatgcatgaactgtagcaatccagtgagtagtgacaggatggaggagctttatggagggggaagaaaggaacctcaaagctttctgattcattttgaatcatgagatgtctacatgtaaaaattctgccttggtaaactttgtttataatgttttagataatgcattcacatggttcagatgtatgaatgtgatatattagttatttgtttataaatatatattttataaacatatttataaatatataaatatatattttataaacatatttataaatatataaatatatattttataaacatatttataaatatataaatatatattttataaacatatttataaatatataaatatatattttataaacatatttataaatatataaatatatattttataaataaatatatattttatttataaaataaaataaacaatctctatttatattccattaaggcttagtttggttggtttaaaagaaagtctgatcttaaactctggttctgaaagactaatagttctttgcattttctcttctctttcgtttgtttctaattagtgctgtagaaaacaaaacatcacctcattcaaagttccaagaaagacagttctggtcaggcctaaaggtgagcaaaaactgcaaaaatgaaaaggcaatttttgtaaaaatcctgtttactatagaacaaagaacaacaaacttcttctataagaattagatagtattttaggctttgtggtcacatggtctctgtcgaattactcaactctgccgctgtagcacaaaaacagtcatagtacataaacaaatgaacatggctgtttgaataaaacttatgaacactgaaatttgaatgtcatataatttcctcatggtacaaaatattttgtttaaagacagttttaaaacgtccttgaaaagtgttaaaaccattcttagctcacggaccctataaaaacaggcaacaggatggatttaacccacaagctatatagttggctaacccctggccttaaaattattgctaagtcagtggcagtagggatgagaaggagaagaaggttcaaacaatgtttgggaggaagcattgaaaggagtcgataactgatcaagggaagataagatctattttgtacataatgaagatatatgtgggacaaatagagatacagaggtctaggaggtggttggatacataagtctgaatttcaggagacagatctgagctagagatttgggagtccactacctgtaggtaatatttggagccatggtcatgaatggcaagctgcgtaaggagactggatgaagcatgagaagtaggccaaggacagaacctcgggaaatactaacagaagaggagaacatggaggcttcagggaatctgtagaatcaattatgagccttaggatgatcacaagagaatggcctcaaggaagctaaatgaaagattttcaagaatgaagaaaagagtgttaaatgccaccaaagagtattaagagaaagactgaaacactgtttattggatttgacaattagaaggatataggtgacctcaccaagagtagttttaatagtgtgaattaatatttgtcatgtggttgaatcagggaaaaggctttctgggaagagggaacaacatcaacaatgagataaaatgtgaaaaagcattacattttagtaaaacagcatgtagttcagcactcagagtaatgaatatagtactgcaaaaaaagaaacaccttaaaattcacagaaagatctgaatttagtagagggaaaggacaaccaatattttattagaatttattatggttacttaatccaagttatcttcaaactcaaaggtgattataaatctttatgtatcagaggaatgaagctctcagcgttgattgccttctcaaggtcacatgttggtaatggcggccctagttttgacagtagttctttatgaatcacgtggtcctgtggtcttatacttgatggcccccggctttgagagaaaatggattgggaaggaagattattgatctggaaaggctctagtgaagttatttgagatagatttggggatggttatcctagaaaatgaaaataagatgagcaaatacatggagtttggaaagaatcaagtatttattcagagatattgtattctaaaattgacagttccaacagggctaattgtagtgagaattttagtttgaccaactcttcatgtttgttagagactattacagtttctctttggagaaaaggtacatatttacttgatattttattttagctcttccgcaatattcttctttggaatggactccttacagatgacaccttgcaagaactaggactagggaagctgctaaatcgttaccttattatagcacttctcaatgccacacctgggccagatgtggttaaaaagtgcaaccaggtaagttgtgaaggaagactgattctaattttatcatttctaaaaaatttagctattaaaatctattatttagcaaaataattaaatgtgtggtactcatatatagacaaatgggccaggcacagtggctcatgcctgtaatcccagcactttgggaggctgaggcaggcggattgcgtgaggtcaggagtttgagaccagcctcaccaacatggtgaaactccgtctctactaaagatacaaaaattagccaggtgcggtggctaacacctgtaatcccagctacttgggtggctgaggcagaagaatcgcctgaacccaggaggcagacgttgcagtgagccgccattgcactccagcctgggtgacaagagcaaaactccatctcaaaaaaaaaaattgacaaatgaatttaacaaagctaaaatgcagagccgctcttctgtatttaagaaagagtatactggtttgaaatatccccagtagggaaaggaaaaattacttaataaatgatgctagatggctggctgtttacaaaaagaatgttaagtcctcacctctcactatacaccaaaaaaatttcaggtaaaattttaaaaaatgtaaaaatgaaactataaaatatactaagatggtaaatgactatatttgagagtgagggagttccttctaaacttaaaggcaaaagaagaaattatgagaaaaagtaataaatttgaaaaaatataaaactttagtggatcaaaaaggtattgggattaattgattattattaaaactggggaatgtgttcattgggctcattatactattctttctactgctgtttgtgtttgaaattttgtataatagaaagttagaaaagttaagaatctaggaaataaaaagttgttaacatgtaacaagtgttaatattcacattaaataaaaaagctctttacaatttagtaaataattcaaatgttctgactaaaaatggccaaaacacgtgcaacagtaaagtcacctaaaaggatatgtaaaactaaccttaaaatatgtgaaaataattaatagtactaataatcagagaaatggaaattatttataggaaggatatttacttgaccagttgtgttggcaaacattttttggcgttgttattttacttacgatttccagtgttataaacacaggaaaacaacagttccatcattgcaggggcaccattcactgtatgcagtgcagtggttctggaaaacagtctcctgcactgggggaaggagggatacagctcttttggagagtattttggcatgatggatacaaaacttttaaagcttatattctttgacttagccaaagtaagttaagtcaaaaattagagatgcacatatagattttaagtacaaagaatattgttatagcattatttataatagaaaatagttggaaacacctacatatccctaaaaacatgatggtcttctcataagataaaaatgtgaaaggaaaataaatctcagaacctgtctcagatacttttgggttcacaaaagttatgtttttgaagaatttttaagaatatgggaaaataattattttataattaaaaacacatacacactaaactgttcccagatagaatagggtccatctgcttgttcttgcagcccaataacaagatgcagacagactgggaaagaaaggagcttatttttgcaaccagttacagggaaaaggttgtagcaactcaccagaccaactgaaagttacaatttggttttttgttttgttttgttttgttttgttttgttttctttagcacttatatgcattctaagctccatgctacatgggagagtgcatctacaagtgagagtgtttcattcagtctgtacaatctaactaccgtctggggtctgtaaagctttctctaaagtcttggaaagttttttaatcttaagtgggccctggtacaaagagtatgtgtaagaatgctttcattatttgatcagactttaggatctgggaaaactcaggcagggtcttaatgggtttgttttcgcattccagttcttgtactcaggcaccagtttctctagctctttaatgtttaacttacacattcatcaaaattatagaaaagggttagtggaaattgattcatctggttgctaatggaaacctagtctgccataaaactatatatcaattagtagccaaccatgattgttctggctatagtttttatatcatagttttaagcattatatattaaaaatttaaatcatcatccatgtaatgttgttcaggtttagtttagtcccctttgaccatagggtctattatgaagtggagaagaggaaatatatttacacagcattctttccacagcatatggttagaaaaccaggccaagaaaatcgacttttagtgctgggatcattaacgcaaaagctacatggttaaatgagaattttactgagacttgtaatacaaaacaaggggaaaacaagtgcaaatgacattcaatagtaaagggtggttttaaaacttttaaaaagagtttacataacaaaacttgtaggatcttctgccttaggcagtcagtgtgtcagtatttttcctgaatagttgaaacaggtgattaaggagtagaattctttttcctcaaccatgttttaaatgctgaccaatcttagaaagagcgcattccagaacgtttatttaatatactgtataatatatagggtgcattttaattttttccccaactctctgctttctatattgatcttgatgttaccaaatgtagcataatctgtatgattatctaggaatttccttgaatagtgtgatattgtgacaggccaggtttccattagcaaacagaacgatcagtttccaagaacccgttactataacgttaatgaaagtgtaagctaaacattaaaaaactggagaaactggtgcctgagtacaaaactggaatgcaaaaaccaacccattaagaacctgcctgggttttctcagcccctgaaatctgatggaataataaaagcattcttacacatacacctcattctgtcttaagattaagaaactttccaagactctcgagaaagctttccagaccctagtccctagctaaagatgagatagagattgaatgcaacactcccacttgcagttacaatcccacacgtagcacggagctttaaatatatacaagcactagaaaaaagcttagaactttgagttggtctggtgagttactctgacctcccttctttcccaattgtctgcatctcgttttcggacctcaagagcaggcagccatactttgttctctccgggaacaatatcaagtttttttcctttctccccttttccctcccttctttacccttgtttctgctatgaggaagttttttttttttttactttttaaattttttctaacatttttctgtttttaccaaaacttttctcaaaatcttgtattactcttaggatgacaatgataaaatgtaatttccatttccaaaagaaaaattgaatgcacctacattgattcattctgctgctttacaattaaggcaatgtattacactgatagaagattaaaaacataattaatttatctttcattctttgtatcttagaatcacccatttggttccttaactccatatagatcatatgctaggccatccaatttctttataaaataatagtgaatgtatgtattttagagttgtattgaccaaatattttgtgtctagacatttttggtttttagttgtaaattatgttttgtacagatttaatgactcacaaatacaagaatatagaaagaattactagtactaccagggagtgttcatagagagtagtgtattttaagttcttagcattaaagaatgaattccaaaatatatgtagccttggacacaaagggaaatctttagaaatttttatttaaccataaactataaaatggggagaatgatactcagcttacagtatcactatgagattatattagcaagatttcttagataactgtcattgtaaaccagccatgtgttttgattaacaggtagcagcatgtctaccagaaaaatggtttgaaaattctgccatgaggacatctattccacagctagaaaacttcattcagtttttattgcagtctgcacataaattatctagaagtgaattcaggtaatgcatattttattttcacttctataaagagagttcatggattctgtatgctctcaacaacttttagaaagatttgtatttttactgtacttttaaaaatttgttaaaactttgtagagttagtagatatttttatggttacctttgggatggcttatgcatatccatattttaaaatgtaaatctcccccaaattaagcaaattcaaaaaactatagcacaggggaatatagaattaaaactataaatcaaaaacattttattaagcactttttaaatgtgtttttaattttcctgtccatttttagagactcaacagttgttaagtacaggtctccagcttggtatttatccagcagtagctagctctctgttctgaatgtttcgttcacagcaccagctgtttgggggcttaaatacagtggtattcctgttaactccctctccaaaaaaaatttttaagcccagatttggccgggcatggtggctcacgcctgtaatgttagcactttgggaggctgaggcaggaggatcacttgagcccaggagtttgagaacagcctgggaaacatagcaagaccctgtctctagaacaaaaaatttaaaaattagctaggcatggtggcatgcgcctgagtcccagctactgaggatgcagaggtgggaagattgcttgagcctgagaggttgaggctgcagtgagctatgattgtgccactgtactccagtctgaccagcagagccaagaccaagtccctttaaaaaaaaaaaaaatcagatttgtattatttgctaatgtcatgatgtgtgaatatactcccaccattgcttccaccacaatgtctcatacaagctaatagcaacgcagcactactgaaatttctgatagacttactatatgcttttctaccttttacagtaattcacattgaaatttgccagaatacatccactaatgatctgtatttgaactttataattaagtggagatggcagcatctctctgtgttttatgctactttagatattggcttaaggtaaagcttttgttttagattaacaactgatgatcaggttctgaattgaccgctgttccctcatacattgcatttttaaagggagaaatttgttttgtttttcagggatgaagtcgaagaaataattcttattttggtgaaaataaaagctttgaatcaagcagaatccttcataggagagcatcacctagaccatcttaaatcactaattaaagaagattgaataaactttattggaaaatgctaaaattttaatatagttacactcagttcctttgtttgagaagaagctggtgcctctctcttctttattccctgtaatagaaggtaggatttgaaaaaaagcaggactccacctctgtattcccccgtgctttaccttctggcatcatgaaaagctgccatgattctgtggtgttctaaggaattaaatgcactggagctttaagagctcaacgtgtttccctttgattcttttggctggtctttcaattttcttaagaggggaactggagaaaccttgctaaaggttttagcttaagtgagcatgctactaagtcttctgtcctgaaccacaataatatcttttagttctctttaactacctttatttaaaaataagtcaatatgaaaatctcagttggagtgaattatttgctaagtattaaatgattaaggcatgtgccgattgtcaaattatccttcagaaatctgtaccaatttaatgtaccaacataagcataagtgagtgccaatgaatccctaccagcagtagttattatcctttttaaaaatgcattgaaaatttgaaaggtaaaaatcttattttaatagcgtattttgtgttggctattagagagtaaacatattggttttggccatttgtaattatttctgaaatatccatctttttcttatggactttaagacctttatatttttaaagatattgattttttgcccatgcttgtggcagaagttttccttatttgccatttttcttttattttttttttaattgtattttttgagacagggtctggctctgtcacccaggctggagagtagtggcacaatctcggctcactgcaacctctgccttctgggctcaagcaatcctcccacttcaacctcccaagtagctgggactataggcatgcgccaccatgcccagctgatttttgtaattttttgtagagatggggtttcgtgacattgcccaggctggtctcgaactcttgagctcaagcagtctacccaccttgacctcccaaagtgctgggattacaggcttgagcaaccatgtttggcctttcttttaaatttgttgatgttttttgaagcattaagtcattacttattagcaagttactattttgtttttttgtcattggtggtaggactaagaaggaaacagatattttaaatactcacaacatgtgattcattttctgataaaatatttgtctaataaaacagaggcaagataatttaatcaaaagaaattaagaaaattttccaaaaatgttagtttactagtaatttttctaagtctacttattaaataacttaagggaaactgtaaatatattttgcaaattgttgttcaaaagataattggaaaaaattgaatatattgtaggatttgaatatacagcctacttttatgtcacctctaccttcaaaactacatataatttattttaggagttggatttgttatgtctgttgcagtgaggacttgtgattcactggtatgaagaattttttgatgtttatattagtaacaaaattatacaaggatagaatctcatctagaaaatgcaaactattgttgaaaagcagttagcatttccacacaaccgctgtccccagagataactgctgttttcattttaatgttatccttttagaccttttctctatttacaaaaatgttacgtgtttctatgtgtacatagttttgggttttttttttttttttacgtaagtggcagacactttattgcacatgaaatttgtaatttttttctatttaagtacacatttggaaattatcctctgacttttggatttttaactaaatatgttggacgtgttcctttatatatttaagttcagcacagaaactttcctacctttttgtggaagataaaatattaaaactgctttcaaaactacaaattgacttaaactgctatagtaattttcaattaaatttcattatacctggagtttgaacgttaaggtttttatcatatactgtaattcaaaaatttacctaaatctcaatgtaaaattcttttttttcttattactatgaaatggatggaataaggagggggaacacaactagcaagaacaaaacattgggttggcaattgatatcacatcttaattctttccctgaatttctttcagctttttgttcacataaagaatgtgaaatttttacagaatcagacagatgactttaaagaaatttttttcatgatggaaaaatcacctcaattgatttttccatttcttaggtccttgaataaatgatacttaggtatacctcagaaatgccatatatgatacaaatcctgcaaaagacatcatgagaaaataccagcagtatctatcatgaatgtagaaataaaagtccttaaaataattagcaaatcaaatccagcaatgtataaaaaagataatagggtttattcctggaaagtaaggttgttttaacattagtcaaccagtgtaatcactcacgaacagaataaaggagaaaatccacatctcgatgactgcagaaccaatcatctcaattattaccgaaaaagtgtttgacaaaattcagcaccccctcatactacaaaaacctttcggcaaagtaggaatataaattcctcaatctgataaaaggcatctgtgagaaaaatctatacctaacatcatatataatggtgaaatattaaagcaaggatgtctgctctcaccatttctgttcaacattgttctagaagacatagtcatacaatcagtcaagataaaagaaggcataaacattgaaacacaagagttaagatagtcattagttggccagacatcccaacactttgtgagactgagctgggaggatcgtttgaggccaggagttcaagatcagccttggcaacaagcttgttgtaaacattaagagaaatgaaatgtcttgtacagcatcggcacataggagccttctaatgaggagcctatccctgaaaaagtgaaagatatatcatttttctaatccttcgaataggataaactaagtttttgatctctctgagttattcaaaaggctcagggatttatttcccatcacaacactacaaggtagtttagaaaatatacatacttgagcaacatggtggagtaggcacattgaaaaacaagcaggggctgggtgtggtggttcacgcgtgtaattgcagcactttgggaagctgaaatgagaggatggcttgaggccagaagttcaagaccagcctggtcagtatagtgagaccccaatccctaaaaaatatatatatattttttaaagcaggaacaggcatagccaattttatcagaactctgaaaaacagtaaaaagtttatagcaatgaagcaaatgctgagtcaagaacaggcaactttaaaatggcaagaaagctttgtgacatttctgcttgcccttcccccacaagctccctggtgttgcagcagtcttgaaatcagcaactgcattctgtcttggaccctgatccccatttctagaggaagctgagcagaacttacaaattcttgtttaagtctctggtagcctgtctggggctacttaaaggattgacagagcactcatcgtaagcagtaggcaatgcttgaaaaaagtgtaaggtgaactaacaaccgcaaacacctgggtcgaaagactatggtcaagatatccaaaaaaccatctatgttctgtgagaaaaagctgcaaaggagtttctttgggaaattagaatattcaacagcacatacagggagatttagaaaactacgtgcatacacagcaagaagcatgctcagacaagatctgcaaagaccctacgcttttgggcctgattgttaggctcagtacaagcctggctaagtattaatggaaaagcccagcacagaaccaatctacaaagactggaaagactgggagagagatttttctgctagttttaactcctttcaaggaaatctatgtcaaactattaaacacaaactaaggaacagagacttcagtgatgacacacagaaggaatacagtctttgcaaaaatagtttggaaatgactgcacatgtagcaatagactgctacaatcttcaataataaaaataaaactaactctcaggaaggggggaatatctgattttcagggccaccacgttatgatgttcaaacatacagttttcaacaacaaaaagacagcatacaaagacacaggaaagtatggctcattgaaaacaaaataatgaaaaccatccctgaagaaacacagacattggacttactatgcaaagactttaaacaattgtcttaaataagcccaaagagctaaaggaaaacatggacaaagaactaaaggaagaaagagacatatgaacaaaatgagaatatcaataaagacacagacgttataaaaaggaaccaaagataaatcttggagctgaaaagtacagtaactgaaataaattcactagaggagttcaacagttgatctgaacagggagaagaatcaacaaacttgaaaaaaataaaaagaagggcaactgcaataatcaagtctgaggaacaaaagagaacacagcctaagaaactggtgagacagcatcaaacagaccaacatatacattaagaatatttcagaaggaaaagaaagaagcagtgaaaaaaattgaagaaataatagccaaatatgtccaaaatttgataaaagacataaatctatgactccaagaaactcaacaaactctaagtgggataaactcagagacccacactgagccgcgttataatcaaactgtcaaaagacaaaagctgagcaaatccgaaaagcaataagacagaactgactcatcaagaatgaggaatcctcaaattttataacatctaatatctcatgagaaaccatgaagtcagaaggtagtgggatgacatatttaaagtgctgaaagaaaaatactgttaccaaaaattcatgtatctggcaaaattatccatcaaaaataagggagaaatcaagacattctcagataaaacaaaagctgagggagtttattacaattagacttgccctgcaagaaatgcataagggaatcctttgggccgaaatggaagggcactagacagtaactcaaatctatataatgaaataaggatccaaaataagataaatatattgacaaatataaaagtcagtattactatcatactgttttctaactccactttttatttcctaaatgatttaaaagacaaactcatacaaataactataaattatttattaggcaatttgtgccatcaataacataaggggggcaggggcagagctttacaggagtagagattttgtatgctattgaaggtaaattggtatcagtttaaattagattgttttaagtgtaggatgttaactataatccccatagcaaccacaaataaaacatctaacaaatatacacaaaggggagtggaaagagaatcagactagttcactacaaaaaaacagaaaagaaggccataaagaggaaatgaggggccaaaaaagtatatgacatatagaagaagtgttaaatggtagaagaaagtccttccttaattactttaaatgcaaatggattaaattttccaatcaaaaggcagaaattggcagaatggacagaaaaaacaaaacaaaacaagatagtgatatgctgtctacaagagactatagctccaaagacacaaatacatggaacacatagaaaaagatactctgtgcaaaaatttttttaaaaaaagagaaccttaacacattgtaaaccaccttgacctaagagacatatagaaaactacagtcaacaatagcatgataaatattttgctcaagtgtatgaggaacattctccaggacagaccatctatcaggccacacaccaattctcaaaaacattaaaatcatactaagtatcttctctaatcacaatggaatgaacttggaaatcaataacaaaaaaacagtgggaaattcataaacatgtagaaattaacacactcaaccaggggatcgaagaagaaatcacaagagaaataaaacatgacattatctagcaattctactcaagatgtatacccaaaagaacttagaaacaggcaatcaaatacatacttgttatgtcaatgtttactgcagcattattcacaatagccaaaaggtagacatatcccagtgttcatcagaagatggatgaacaaaatgtatatacatacaatggaatattatttagtcataaaaacaaatgaaattctgacacatgccacaacatggatgaatcttaaggactgcttgaggccaggaactcaagaccagcatgggaaacatagcaagaccacatctctacaaaaaacaaaatcagccaggcgcagttaatgtgtgcctatagtcttagctactcaaggaggattgcttgagcccaggattttgaggctgcaatgagctatgatcacaccactgcactcctacctgagtgatagaatgagaccttgtctcaaagataaaaagaaagatttgaggttacctggggttgggagagatacaggaatgaggttattgctcaacagttacagagtttcagtttggggtgatgagaaaattttggaaatagtagtaataatttcacaacattgtgatgtaattaatgcctctgacttgtaaatttaaaatgtttacaatggcaaattatgttttatatatatatcctaccacaataaaaaaaaaaagctttagattatgcacatttaattttatttctgggggaagatttgctttacttctggggaaaaattcacaagaattttaaagatattcctacagagtaaaaagcatgattgtttacatgtttttgagcacctgtacttacaagctgatcatacatttgcagagctttaggtcctaaaatatactgtcccatctaccattctaccaagattgaagtgtgtttatcaagacagaaaaagaacaggttttaatagctatcttctaacaagataaagagaagaaaaatataagatataggctcttgttaaccttttattttgagaggttcttttgagaggttatctcagcaaataatctaaacaagtgaaggataggatatctattacttgttgacagtagttagatgactatataatcattagtgaaaaagatcaaggaagtagctgaaagctgctgtctgacagacccctagacaatctccttcctggacagacccctccaggaaggagattggaagcctctattctagggaatctgacaaaaccaaaatattcatgtggaggaggggactcccaaaaaagcccattcagataatcctaaagacagccccttcccacaacccaaaggctttccaagctttttagtccctctttcaaccataagaagacagccaaagattatcagatatcctggaaaagtctgaaatatagacaacaaaaaataaatacagaaagaaatttggaggaaatagatgcgcaaacaattttaaatgaaaaaaaaatacactatattgaataccccttatctgtgaacaaatccatagataaaggctttttggttgtaagaaaaggaacttctacaaatcaagaaggggtcttaagattttaaaatacaatagcaaagagttggaagattgagctaaagagctaaaaaacagagactggggtcaagggagggaggtaagaaaatagatacccagtgctggatatccaacatccaaataatagttgggagaacaaagcagcagagaataaatcatcaaccaatgctaagtgtttcccagaactgacagaaatgagttactatctggaagggttcacctaaaacccaatacaatggataaatatagacccacaccaagacacatcatcatgaaatttatgatggggaaatcaaaatggcattggatttctcaatacaacaatagaaacaaagaaaatggagcaacaatatttttaaagtcctgaaggaaaattacctcctacctaaacgtataaagtatcaatcaaacatgagacatgcaaggtctcaaaaattttacctccacacaaacttcctctagaagctaccaaaggatgtgctgcagcaaaacaagttagtactcaataaaatggaaaacatggaatccagaaaacagctgagcgcaggaaagaagttagtcccaagacagctaggaaccagagggcagatctgaaggtaactcaatggataggctgagagttgccttcaagatttaggatagtactgtattttttaacctgaggaacagtatatccaggtgagtatggaccaaattacatgtttttctttagcatgtgtgcttataccccagctttccaatccatgctgcatggatcagcaacaacactcatatcataccaaaggtattgttttaacctaatcctaagatacagagtttgattcatcatgctgtgagcatcaaaaaacagtttacttcctctaaccacatttctgcaacatccagctacccagtataatcctgccagataccttgtggtgagccttctgtttagcagaactcactcataaccttagccatgaatttgctcaaaattggcctctgtaaactctcagaggaagctgaagccagactatgacccaaagactgtaacgtttcccttgaagccttcatgcaataatagtaatactgcccctttatacttgctaacaggttttttttttcaggtttttcaaaattaaatatattgttgaagaatatatgtgttggcagtaaactaaaagaaatgcaagggaataattaacaagtcaagatgatatttacatttaaaaaggagagagatacaattgcagatttactggagtcttctgagatcttattaaatgttttatttcttaacattcctacatattaataaatgttctatttcttaacctgatagtgggtacatgaatgtttattattctgtaaatcatattgtgcttatgaattgtttcacaattaaaaaaaaaattcatcccacctattccctttgctcaggttccatgctcattaaagaccattctggtgatgctctgacttctattgtagctttgcctccaataagcaaatggacattggtccatttggcatgtgtaattctctttttagagtaataaactggtgtacaagttttattttagaaaaaaagtattaataaaacaatgaatgcttagttcacttaattactatgttcttataaatgaaattaaattggtctcaaaatatatcctcttagagccaatgtatcttctgcaactaaccaaattcattctcagaatcaagaccttttcgacgcttcaatttccttccatattgcagcttcaatttttgaagtatcatattccctcatcatatcaaattcaagccatggctgattccacttctgagcttctttcatttgctgttcagttaaacaaagatcaaatctgattcctttaatattaaaatttggacgttcccagcgtttagaccagggcttaggcttcatttttactttcagctaaggaagattaaaaaaaaaaaaaaaaaaaaagcaataattaggctgataggcatgagcaaaaattcttctgaagttttcattaagatgattctttctttcttattttatacttgaacttctagtttcaaatgtataacccatacctcattaacaggaactttttggttaggctcttgtactactggcttcatattcacatcaaaagtgctatattcaggaagggcatctcgtaagtatagcaagctatcatccagccgtttctctaatttgaccacctgaatctcctggacccgaggattataaagttcaaagcaaatctcgacacctaaatagaacagaaaacatattcttacaatctaagtccacgttcctatacatgtttcatactgcagtaaaagcatttcataaaggaattagcacaaagttttgcatgtagaaaatgtgccgttaatttgaaatttttaagataaagattactgaaagaaatagaaataagctaaaatccatttaaatataaagttagaaagtctgaattggaatgatagtctaaaaaagaaaaaaatggcttctagaaatatgttgagtcacatatctcttcaattctcatagtagtaacttcagagaaagtctgaattcttccctatgtcacgttttttatctcccaattacttgaagaaaaatcaatcttccatgttaagagtaataagactaatggtacaaaagaagtaaaatattaagttccaactttggttagaagctcctttgattaaggattagtggattaaagggatggagagaactagttttgccttttgcccttccacctttcaccatgtgagggcacagtgcttggcccttccagagcacacagcaacaaggcaccatcttggatgcagggaaggaggcctcaccaaatacaaaacctgccagcaccttgaacttagatttcccagcctcccgaactgtgagaaataaatttctgttctttctaaattacccagcctgtagcattttgttacaacagcacgaacagaataagccaccagaaatgtaaaccagagagactgcacaaatgcaagcagatgatggtgacatggatgagggtgatagcaatgtagagggaagaacaggcaaaattgtgatatattttttggagactgtgccaagaaaacttgattgactgcatgtgtgaaagtaagtgggtaggcagagtggtaccatttatggaaatagaaaagactgtgaatggaacaccttgcaaggggaaataaagagttctgctttcaacttatgctggtaagacatccaaatagagtgttgatcagatagttgcagatagttgcaaatctggaacttaaaaagggtcagtcctggagttataaatttggaagttatcattatacagatggtatacaaagccaccgaacaagaaggaaacactaatgcaggaagcagtgatggggaaggttgaggcaggttacaacagtcagacatactacagagaatggcaagagggagctaatcctttttgagtattctgtgtccagtacttcaaatacagtatctcacagttgattggctagaaccatgtagagtagaaactattactatcttaatgcttaaagaaaatcaaatgactcactcctatgctcatttacttctattacaaggcctctccaagtatttgaccagattgaaggcacaaatcaattaagtcctgctgaattcctgcacgcacagcccactgtcattacagaataagcaagacagcaactgctttcacattttcaatttctttgaaaataagaatactttgttgttggaacttcatgaagcacacaacttgataaacgtaattgttcctgccattttaattaataatcttgctagagttttactccttgttcctctattaggcatagtatataaacacaattttgcctttttaaaattcctcccaagtcatataagacagtgataattttgttttgtgtcataacataaagtaaaatgtgggtattcattttaggagcaagtaattcatgaagacattaaaggtttgtcttaaagttttactcatgggttatttgctcctaaaacaaatatccccatactgctttatagtaatttattcccctctttgatgttgccatggtttgcaaagtctacttctaatgactgttgttccaataacataagaagccttcaagagaaagaagtccatcaaccatatttaatcattaacttcaaatctcaatccattctaaagccacaggctccacatcttccctcagagtctccttttactttcaaatttcagatttcttatcccaggatgcagaaacaaaaaggaatcctgagataacattttctagacaatgaaaatgatgaaataaaacttaccttgtccttcgataacattcctaaggatgaaagtagctccaagtcctcttcctgatctctgaatgcaaatccccagaaactggctgatttttccactggcatatgggtcagctgtagtaacacgaagaatacttcctacaaattcaaaagagaagtgaacttttttttcagcacacccagctgagaagtaaactttatataagatgcagaaacaaacaaatagcatttctagataacttaacttcctaaatgttttaatgtaggaataaatacttcatatgagcataacccagatatgtaaaaaacaatcttcttttgctttttaagaaaactaaccatccaatcacaaactagccatcctaattactaataataaaaacatacagctcttactgaccaacatagaactctggaatgtggagtacttttctcctttctaacatatcttttctttctatttgaaatttcagaggatctgttcttccccttcgaggaatgaattcaggactcaagaacctgtaaaaaatacaaataaataattaaaagtaaactcaaaaggctgctagaagaaaaattgttgcttttcaaagaaattaaatatgatattgatgtattttattcttcattgtctaaataaaagtcaatcttatttctaaaattgttaatgctcatgaaaatagctaacaattcctgagtactcacctggtattttgttaaaagctttatgaaacatctatagcataaattaatccttctagcaaccatgtgggtttggtgtcatctcctttttacagagcaagaaactgaagcttgaaaaaggtaaataactaacccattgctacattagctataaatctgtcaaatcaagatttaaatgtaggtatgttggtcagtctccaaagcctataaccattactacaggcctcacactgagctatacatgctataataaattatgtcagaaaagacatcaacatataaatcactaattataaattgacttttaaaatgatcttcctgatcagagaagatggccctggagatggtgctgaaggacctggggcatctgcaggcttgttggctgtgtttgctggtcaagactatagaccagtttgaatatgaaggttctgacaactgtaacacctatctacagacgaagagtaactgagatggtatatgactgcactagctcttcctttgatggaatcattgcaatgatgagtccagaggacagctaggtctccaagtggcagcgagtcagtaactttaagccaggtacatatgcggtgtcattcactggtcacctgccccaaggaatcgtgtaggagctgaaaagtcgaggagagacctacaaatccagagacacagctgcagcacatcgtgtccctgaaccattttctcttccttggatgacaggtgcgggtgggagggatttgggttggtggattaacagatcgaactgaagagaaagtaggatgctgattttcctatccatggcccagggatgcaccttgcccatggcaaggactctaggtcaaatgccaataaatatgaacctctagaaagttcttaaggccatgatacattccttgcctccctctccctttctcttaggcacagtaagagcttgtttatgctgtaagaatcttcccagaacagcagaggcccttctactccctactgactgtctctgagccttctgtactgcagcctttctagtgtgcttccttgcttccaatcagaaggtgctgtccagaggctaggtaatcccatcagcttggtagtcctggggtctcgtggttgtatctttctgccctctagacctggcacagcagtatcccttgaagaaatcctgaggcttcatagtgctcttcgctccttgaccacgtttaataattcttgcttttccccctcctcgtctcttctcttctgtttaccgctcttcctataccttaggccagtctcacatccctgcatttcacattctcctaactggagacccttgggccttaggcaactgctgggtcctagtctgccttgtttgtgcctctgtaggaggtaagtccttccttttctcctctggcctagtaggggaccttgggtaatgtcccattttggccaaggtgaggtattcgttttagaataaaaaattcaccataaattctcatttacttaaatttccacagaaatcctgttagtgtccccgttttgatttccctaagttgctggttctccctctgtaaaaagagaatgattagaccctgcctgtttacctcaggattgttgtgattgtagaaatgaagctatgtgaaaattgtgtaagtcttacaaaggtgaaatccttttgcttaaaaaataataatcttctttttttcttctttaactgattttaagctcattatgaaatatttaatctacataaaaagtataaatgacagtacaatgaatattcatgtctttaccacccacctcaagaaataaattatcaatattgtggaagcccctgtgtatttaggatagttcattactatcctaaatttggtgattattcccatgaatttctttctcttcctcaattttctactttgaaaattttaaagcctaccaaaaaatagtaatacaatgaacacctgtagatctttcatccacttttaccaactgctaaaattttgctatatttgctttatatacacatatcatttttttctgaaccatttgaaaatgtcagccaggtgtggtagcttacgtctgttatcccaacacttgggaggccgaggagggtagatcgtttgagcccaggagttccagaccagcctaggcaacatagtgagacctcattctacaacaaaaaaatttttaaaatagccaggcatggtggcgggcacctgtagtcccagccacttgggagactgagtagggaggggcccaggagtaggagttgcagagccaagatcatgccactgcactccagcctggatgacaaagcaaggctctgtctcaaaaaaatggaacagcaaggcatttcatccctcaataatttagaaggcttatgctaagaataaggacttgctcctatattatcacgatacccttctgacacctataaaagtcagcattaatttgataacataatctaatacaaaggtatccaatcatctggcttccctgggacacactggaggaattatcttgagccacacataaaagacaccaacaatagctggtaagcttaaaaaaaaaaggcacaaaaaaaatctcatatgttttaagaaagtttacagatttgtgttgggccacatttaaagctgtcctgggctgtgggttggacaagcttggtctaatacagagttcatactcaaatgtatgtcattatcctgggaaggtattttacatctattcgttgcccaattcaaaatacaatcaagcttcacacatatttggtcattagtctctcagactaggacttttttccaactttgtatttttataacattaacttttttgaacagtcaaggcctactatctcatctctggattctggattgtttccacatgcctagactaaggttaaataattttagtaagaatattacagggagatgatgtgaacaacttattctgtcacatcaggagacacataatatcaactggtaccaatactggtaaagttaggtttgactgtttggcaaagtttcagaaggccccccttacatttctttttacttttcatatgcatgtatgtctgggcaacatatattgtttcgtataattttgtttttgtttttttctgagacagagtcttgctctatcgcccaggctggagtgcagtggcacgatctcggctcactgcaacctcggcatcctgtgttcaagcaattcttctgcctcagcctctcgagtaactgggattataggcacatgccaccacacctggctaatttttttttttttttgtacttttagtagaaatgggggtttcgccatgttggccaggctggtctcgaactcctgacttcgtgatctgccctcctcggcctcccaaagtgctgggataacagtcgtgagccaccgcacccggcctatagttttaaaacttcataaaaatagcatcctactacattaatgattctaaaggttttttttacacacagatttgtgaaaatcttccatgtttaaaagtgagctctaattcactcatttttcactgctatacaatattctgtcatatgaatgtatttgcctgttcacctactgatggatatctaggctgcctctaaattttgttacaaaaaatactgttacattcattctcgtgcttgtctccttgtacatacacgttaggagtttaagttgtgtgctttctgagtgagaaggtatacacaacttaaacttagtaaattctgtcaaattgttctctagagcatataatttacattcctatttaagtgaattctattaaatgccactgtttaaaagagatattccatttctaccctcaaaagcaaagttttatgaagaaatattttctgaatctcttagttctctaactccaagtttacttctatttaaatccgtggaatattttaaatgttaaaaaaagaaaagaaaaaaaaaagccaggcgtggtaccagtagttccagctactctggagcctgaggcgggaggatcacttgagcccagaaatttgaggctgcagtgagctaaaatcaccactgcactccagcctgggagactgagagagactctgtctaaaaaaaatttaaaaaataaaaaaattaaaaatcccagaagtaatccaatcaataatctacagccctttcaaaaagcctataatcatatcaggtttttcctctgaaaactggctttttaaaaaggttgctacatagctctcttttcagaccttaagtcctttaaatttacatgtacctccaagattaccaccattcatataagtttttattcacactattttgatgagtaagtttcagacacaatttagtggccagttttactgtgctttgtctgccaaaacttccaacctaaaccatagcaaattttttaagttggccaatcgattcctatccagggttaagggtcttttgagagaaaagaagagctcttggacgtaaacaggtataaacaggatatacctcagagaaaaactctggtacaggacaaataccacagagaaaagagtttaaaatatggggaacccctacttgaagttctgactcaataaaactgcaaagaagttcaatgctggcttggggagaagtgagaaagaaagaacagtgtggtgcgctggctcttgaatcctacacacctgctcgtgcagggggaggtgcagcccccaccttagagccgggacctcgaacgcgaacgcgctcacgcgcgcaccgaccccagttgccggcctagcgccagggcagtgcctcacctgcgttccggttccacggggcggtgcttgtccacgatgaccggtttcggcggcggttggaacgcaccgggctcggaaggcccagtgctctgctgccggacaggccccgcgtggacccctgcgggagcggacgacggaggtcagaactctcgtgccaaccctgagatcccgcagagccccgcaatctcccccaacccggcgtcccacgggggaccaacgctggggttgcctctgatctccaggttcgcctcccccatcctgaccctgggcccctaacgcgccccagctcgcaagtccggctccacttactgcaggcgatagaggccggcggggggagcagagtcctggcggcttggaaactccggcctaggcccattgcagcccagtgccccgctgcaatgcaggccgccatgccagctagctcacgtcaagactacagctcccagtaatcagtgcgacgaggttgttgctgtctgccaccatatggcggctgctatgggacaaaatggataagtctctcctcgctcctttcctgatgtcttaggaaaagtgcacgtttctctagttcctcgtaatgcgccaagttacacccctccacaggggtgttctcccagcctagaaagctttttcctccccctatgaatccactctatcttctcagacaagctttcgctatgcgaaaatcccattgtaggccgtctttcccactgggtgccttcgattggcagctctgatctcatttgcaattctttcttgtgtaattattagattagtatttaaatctgccattatactataatgaggcaagggaagggataaagtcttctttttgctcaccatgttatcccagcacctagcacctacctgggccctcactaacatcttttgttttgttgagacaaggtcttcctctgttacccaggctggagtgcagtggcgcgatcatggctctgcagcctccaactcctgatgtcaggagatcctctcacctcagcctcccgagtagccaagactacagtctcgcaccatcacgcccagctaatttttctaattctttgctgaatgcacagaaaagagaatagaatagttcctgacagaactgctggcccatagtccttgagactacacaaagcattaaccctttgaggaacccaaatgaatttgggctgggcaactgtgggtatggataggtgggagaagtaaagctggaaaaggtaaattgtaagtcttgttaagaaatttggaaaatgactgggcgtggccaggcatgcctgtaatcccagcactgtgggaggccgagacaggagggtcccttgagctcatgagttggaaaccagcctgggcaatatagtgagaccgtatctctaagaaacaaacacacagccgggcgcagtggctcacgcctttaaccccagcattttgggaggccgaggcgggcagatcgcctgaggtcaggagtttgagactagcctggccaacatagtgaaaccccgtttctaccaaaaataaaaaaaatgatccaggtgtggtggcaggctcctgtaatcccagctacttgggaggctaaggcaggagaatcgcttgaacctgggagacagaggttgcagtgagccgagatcgcgccattgcaacaagagcgaaactccgtctcaaaaaaacagaaaaagaaacacacacaaaaaaagaaatttggaatttgttatttcagcagtggttatataaggattgaacacttagagtaatgtgataatttaactacataatagtcattccagttgcattaatgtcccaaagctacctcaaattcagcctatccatactgagttcatctttttcagctccagacttccttcccagtattggctatctcaaggaatggcttcagcatccactctcttgcctaagccaaaaatctcagtgccattcttgattcctccctgtctcctcctggatgaagttccaaaaactatgcctgacaccgtcaaatatctcaggaatccatatactttctcatcctcccatccatatttccaatctaggtcaacatattttctctcttcaggatccctggagatccctgcaacagccttctcattagtcttcttgcctctggttacctccagtccttcacgcagcaaccaaaaaaagatggctcagaaatgcataccctgttctttcctttccccagtttaaagccttactgtttacttttgacagaagtcaaatgctcataaaagcaaccaacctctgcagcttggcctctatactctgacttgccatcctgaagaacatgagctgttacatcagcctgaggaacagggccatgttttgagcacagaattcaagatgctgtgaagaaagacagggccttctattttaactctagcttctttgattagaacaagaatttattctataaatgacaaggaatctcacaaccaaaatttcagatgagcaatattttggctcttctacctacccgaaaaagtagacttcaagcccttaagagtaaaagggaggagaggcaaagataatcatgactggcagtggtgaagatttttctgtattaaccatgcccagaacacgtggccttcactcttgctgggattggtcctaaaggtaggggcagagaaataaaagacagaccttcacaggaggacagcaggatttactagacattgccaagccactcctgctgccctctcctcttccacagatgaaggaatagttgtgtagagttttacaaaattggaagaatgaacctaaagaatcttatctaattttctcccgtattcttgctcatccaacatatatcaggccgttttgaccttatcttaatttggagaacaagctggagtttaaattattccaacttaagttgttattaaacaacttcatagagcaaaatcaaagagcacagagctggctcaaccattttatgagctgatcacaggaatagaactttaattatttacttctgtgttttacacccttggaaaggagatcatgaacatcattacataatgttcagccaagggaagaaagtattccaggcaaactggctgcttcaggttattgtgacatcaggatccttgtcggttttgcttgttattacatcctctatatttagtagagtatctggcacccaataaatatttctaagtaaaattagatagatcattctgattgtactttagaaaatggctgggaagcaggaaattattgaaatattccaaaagagagatggtgctaacctggaacagaaaaaaaaaaaatggttcttaaagtgtgagcccttgactagcaacatcagcacaaccagggaacgtgttaaaattacaaattctcaggtcccgcccccagacttactgaatttaaaactctgggcacagaacccagtgatctgtgctttagcaaatcctccggtgattctgatagttgttccaatttgggaacaattgaggtagaggcaatagagatagaaagtggtatttttttttctgtctctccatctatttgtgaggtagagtcagtaaaaaaaatttctgaaatgtactaactggagtctttgagagaggttcccatctctgccttttcttcttcatgggtaataggatagaggtatgcctacctcattgggttggtataaggattaaattgtgataatgcataaagtttgcagataaatgtatagatcataataaaattctttttttccaactttactgagacatgattgaaagataaaaatttgtatatatttaaggtgtacaacatgatgatttgatatatgtatgcaatgtgaaatgattatcacagtttagctaattaacatatccttcacctaattaaaaaaaaaagctttttgtaaaacttattttaaagatgccagcaagaggaaactataatctgattcatgtattaacacatccaaaaaaagaatctcctattcctagaaaaccgtaaagatgctaccaaaagacgcctagacctgataaacaacttcagtaaagtttcaggatacaaaattaatatgcaaaaatcagtagtatgtctattcaccaacagtgttcaagctgagaaccaaatcaagaatgcagtcccatttacaatagccaccaaaaacataaaatacctaggaatacacctaatcaaggagatgaaatctctacaacaagaactacaaaacactgctgaaataaattatagatgacacaaacaaatggaaaaacatcccatgctcatggattggaagaatcaatgtcactaaaatgtccatattgctcaaagcaatttacatattcaacgacattcctattaaattactatcatttttcacagaactagaaaaaaaaacaattctaaaattcatgtggaaccaaaaagagtccaaatagccaaagcaatcctaagcaaaaagagtaaagcaggaggaatgacatgatctgacttcacactatactacaaggctacagtatccaaaacagcatggtactggtacaaaaagaaacaaacagaccaatggaacacaatagagaacctacaaataaagccgcatacctacaaccaactaatcttcaacagtctacaaaaattagcagtggggagatgacatcctattcgataaacggtgctgggaaaactggctgaccatatgccaaagaatgaaactagaccactacctctcaccacatacaaaaattaactccaaatgagttaaagacttacatgtacgacctcaaactacaaaaatcctagaataaagcctagggcatactcttctggacattcacctagacatagaatttatgattaagtatcacaaagcatagatggagtggtgagattaagcgtgttccctgcttttgcaatttttctagctacattttctgtaataggtacattttggttttacaatgaaaatcaatacactattttaaaaacacagctgagcgtggtggctcacacctgtaatcccagcactttgggaggccgaggcaggcagatcacaaggtcaggagtttgagaccagcctgaccaacatggtgaaaccccgtctctactaaaaatacaaaaattagcagggcatggtggcgtacctgtaatcccagctacttaggaggctgaggcaggagaatcacttgaacctaggaggcggaggtggcagtgagccgagatcgcgccactagcatgccagcctgggcgacagagcaagactccatctcgaaaaaataaataaatttaaaaaaataaaataaaaacacaaatgcactgactatgatagttcttacttcctttgcttcactctgagggaagccaggtacctgttatgagctgccctatggaaaggtccatatggcaaggaaccaatgtccccagccaacagccagcaaggctgcttcttgccacaggaatgagctggcaagcagaccttcccttagttgagccttgagttgactatagccccagccaacctcttgattgcagcattgtgaaagacctggagtcaaaatcactcagctaagccacttctggatttctgacccacagaaccgtacaataataaatgtttgttgttttaagctgcttaatttaggagcaatttattaaatagtaatagatagtgaataaaggagtgtatgtgtggtgggggtgagcttatgtggcaacatgaagttccttcatccaggcaaaatatatacttcaaggcctcacagataatattgactttggagaatttgtcatggccttgggtctgacttttgattttggaagcccagaacctgattttcagcacagcattaaatagatacatcatttagggcagacttacatgaaccaaatttttgaaattgatatgacaaaactaaatgctagtttattaacttataagtgaacaaaaaataatatgctgaccagaataccagaacatttatgtctttgtgaccacgactttctctctcggaaggcaaaatttaatgtcacatatggaaggggttgcttgatgaacatggaacaaagggagtttaatataggtttcaagtgtttattggcaacaagctaagtctcctattagggaggatttcatcaatggaatcagagaacttgacaactgttgtctacaacttccttcatttatgtctgcaccagaatggactcatcagtgggcctggaaattccccaaattacttggctaaggctctttccttttctggctgggcactggccaacttcctttgcatttttctctacaaaatgactaaaaagatgcattgatttcatattaagcagatacctacaatgacagaaaatggtgagactaactcacaggaaacagttataacaatcaacttataatgggtaggagataatgtaatatatttgacaatgattttcctccacgtggctggaagaaaaaaaattgtttctcagctgtgtggaaaacattgcaccctcagggctctggaaggcagagttccacagcatgtgtggttaggctgtcctctggtggccacagcaccacacagcaacgctggacggtctaggtcccctctagcttttctcttttttcccttattaaaaagtctctctctttcctttcttttaaaaattgggacatcatagtatatattttggggatacatgtgatattttgatacacttatacaacctgtaatgatcatatcagggtggttgggatgtccgtcaactcaaacatttacctttatgttgggaacattacaattctcttctagccattttgaaatatacagtaaattattgttaactgtagtttctccactgtgctattgaatactagaacttatcccttctatataaatgtatttttatacccctcaaccaacttatctgtgtctccctgctccctcaacacacatacacccccccagcttctgataaccaccagtctatgcactacctcgatgagacccacctttttagctcccacatatggtgataatatgcgatatttgtacttctctgcctggattattttacttaatataataaccttcagttccattcatgttgctgcaaatgagataattttattctttttcatgactgaatagagttccattgtgtatgtatatcacattttctttattcatacatccattgatggacacttaagcttattctatatcttgattattgtgaatagtgatgcaataaacatgggagtgcagatatctctttgatatattaatcttttttcttttggttatacacccagcagaaggattatgggattttatgatagttctgtttttagtttgttgaggaacctgcatactcttctccacagtgctgtaccatccaccaacagcactgggattccctttttctctgcatcctcaccagcatccattattttttgtctttttgataataagcattctaactgaggtgagatgatatctcattgtggttttggtttacatttttctgatgaatagtgattttgagcattttttcatatatttgttggccatttgtatatattctttgagaaatgtctatgcatgtcttttgcccattttaaaattggattatttgtgggatgttttttttttttgctattgacttgagttccgattttctccaattctgtaggttgtctgttcactttgttaattgtatcctttgctatgcagaagcattttagtttgacgtaatcccatttgcctatatttgtttttattgcctgtgcttttgaggtcttacccaaaagatctttgcccagaccaatgtccagtagtgtttcccccaaatgctttcttctagtggtttcatagtttcagatcttacctataagttgtcaatccattttgagttgatttttatacatggtaaaagatggggatccactgtagcttttctacagagtccctttagagtgtttctttctacaattgaatgcctggcactgcccacccaagatgataagctggagaagaaatattggagcataaatagaaagttttatgccatcatattttgcttagtaacccaattcttactaagactacatcaatactcagttaagccttaccaccacgttgtaggctgtgttattctggaatgacgagaaaactgaggattacagaagagcaatgacttggcaaaggtcacacagtacatgtgttgggtgttccacatagtcagcagataaataacgtgtacctactataagctagtcacagaagtggacaaagagaaataattttctctgaagacaacattataatacaaaatgataattgctgggaggatgtgtgttctgtggactgccatagcacatgggaatgcattttgcccaggcaaggtcagttgggaaagtttctcagaagaaaggagacttgaactgagtcttgaggatataatactatatatatataaccagggaagccagaagaggttaagactaatcagaataaattagagaatgttttcctcccctctcaccccatgcatgagactccagttagaagacagaagtagaatactgtgttatcctggagtcttcattatgttggacaacaagttttgtagaaagctgaaggttactgctttgaacaatatacatatatttttaaaccagcagcaaatactttaaaaaagcattacagatatccttattaccaaaagcagatccttataattttccctagattgttcctcctcctggttctcaatctcaagaaatagcaaatcgaactccctgaccacccttccaaatggagtctcctgttattcctgttttctattttcatagtacttagcatacatgatagatatattttcagtggtttgtttgctgctttttcattttcctcccctgctcaactgtaagtcttaaaaatcaggaatccagcttgctttatttgtttgcatattacctgagcagaaaatgagagtgggaggtgggctgggtttagggaatgagggaatttggaagtcataataatgagtgtaagcttcttcaggagggcactgaggagtgttcagataattttttaaaaaagaatgacaaggccaggcttacatctcagaaagtttcctgtcactgcagagtggagaatgggctggagctgcagcttatggagctaatttaagaggtagaggcagtgatccctgcaagatgtgacagtgctctcgactcagatgcctggggctgaatgagaagtggtggtagaagtgggcgctgaggacagggaattaacaagccctggtgattgacaggttatgggggaagcccccggactccttcctgggaatttggtggatggtggcatttctgtgagatagaggatgggagaaggagcagatttgtgggaacaggctgcatgtgtgctggaaacattgagcttagggtgcatgtctgtcacatgcaaggaaagaagtccactagagggctggaagtgagcctgaagttgaggagacagacctgggcaagagggacagcaagtggagccatctggatgaggccacacaggaggggctgtgtgtgagagaggaaggggtcaggacagagccctggagaacagcaacttctaagggatatgtggttgaaatgagcagcagggatgcagagaaggagctgtctgaaagagagtcaaagggagtcgggaaggcagtaagctgatgagagtgaggtggtaggagagggctggctgacagccaaagatgtcctgagatgcccaggcagaggaagctgaaaactggcctttggatatataattgttcccttccacatcactctttgaactgtatgggtccacttatatgcaaattttcttctccctctgccacccctgtgacagcaatactaacccctccgcttcctccatctcctcagcctactccacatgaagacgatgaagatgaagacttttatagtgatccatttccacttaatgaattgtaaatatgttttctcttatgattttcttaatcacattgtcttttccctagcttactttattgtaagaataccatatataatacctataacatgaaatatgtgttaattaactgtttatgttatcagtaaggctattagtaaagtttttggggagtcaaaagttatacacagattttctttttttctttttcttttttttttttttgagatggagtttcacttttgttgcccaggttggagtgcaatggcacacaatctcgtctcaccgcaacctccacctcccgggttcaagcgattcttctgcctcagcctcctgagtagctgggattacaggcatgtgtcaccacacccagctaattttgtattttttgtagagacggggtttctccatgttggtcaggctggtctcaaactgctgacctcaggtgatctgcctgcctcagcctctcaaagtgctgggattacaggtgtgagccaccgcacccgtcctatacacagactttcaactgtgtgggagggggtcggtgtcccaatccccatattgttcaagatcaactgtagtgccagagacttgaatgatatcattagtgtgaggactgtttagtttttagtgttggtactatttagtttccatttattgccagtttttatgtatttattacctttaccttttagggagggcacaggagttgaggaataaaacattgagtatggatgttacagagtaatttgctgagatagaggttcattggttttagcattccccaagctgatccctaggcaggtctccttcaagtttctaaaaatatgagttggtgggttcctccttcctacccaccttctaacccaagtccagagcttatgagttttaggactctgagaagatgatgcttctccctaagaagaaacgatagaggtcaatgtttagagaaggcaaggttgaagcccctggacctaggaaaattagcagctttagctgccattgaataatgagggatggggatgaggaatgcacagtgtgtgaacagagacctgtgcccactatcaggcatatgtgaggctagatggggagctcactgcagatgccaaccttggaaagagatggctgcagggcccaccctcagtctaagcaggagaattatttttactagaaaactgaattttgctgagagctgaggaatacgagcttgagaaatacagtattttttaaaatctgaaatgaagtattaaatataatgacttagaatcccattttttgtcttttgtttagagaaacgtatcagtgctttttaatcatggctaccaagagaatcttggaaggaaataacaatttgttagaaaagaatattttctaattttgtaatcatagcaactgatttgctattataaaagtaacacaaaattgaaggagctgggacttgattttaccctactttaaaagtaaataagttagcatcttgtttcatgaacactggtagaagacatagactcttgggctggagacaaagcactttattattcatgacatagcgtgagcatcagcatgtttgcaaaggttccccttgtcctcaagtcccagatgggtgacaccacaggcccagatgaatggtgcccacatagtaagttcatttcacagtgaaggagcactgagcttaaggaatatgctgcttttacgggaagcaataaacacacctattctttatttcaagtgacacaacctcatctcttatggttggccacagcaaacccacacctgagaaatgtcctgggtaaagagggctgagggccttgcattcttggtatacccagcaagacgtgtaggagctcaaaaaacaaaaacaaaaaatatttactataggaagtgtgcataataataataacaataacaaaacccacttcctacttacattgcccagaaactacaaatggttaatttagtcctacaagctagatccagagttgagagaagtttatggcagctgctggagtcacacttgaagttcaggtgataatattatttttttcatgtcaaatgagtaagatgtcaatgttgtaataaggttagagggaggcacatctcacacaggagtgtgaaaactcagtcatcatgcttatgaatcataacaggatccaggtgataatatttctgaagcaaatattcctgttaggacagctgaagttcatcaaatacctttgcgctcactacttggggttgggattagtctttcaggctgaagtcactaaggaaccatggtccatttcctcaaatttcaaggactgtctttcagatgtctcagagatagcactgtctgtgaatacagtgagggcttccttgcatagtcggtctaagattttctgtttctaagcccttgcctcttcccaagcatgtagtgaaatctgagctagttacaacaaaacaggttagaataaggcttgatcaccacagcaggcaggctatccacctttttttttttgacagagtcttgttctgtctcccaggctggagtgtagtggagtaatcacggctcactacaacctctgcctcccgggctccaggggttctcccatctcagcctgccgggtagctgggactataggcgcctgccaccatgcccgactaatttttgtattttgatagagacaggattttgccatgttggcaaggctggtctcaaactcctgccctcaagtgaaccacccgcctcggcctcccaaagtgctgggattacaggtatgagccaccacacctggcctctaccttcaattctgagctcagaaaactccctgttcctcaagctttgaggcctatttactttgcttcatcatgtattcattattaacccttccttcatcctgtttagtaaatatatgttgagttactactaggctgggagctctgcgaggcaatgagggcacattcttcctgccctcgggacaccaaagccgaggaaatctcatgcaaacatttttttggatgaactctggaatgttgtatggaaacaaaccaagtgttttctatgctgttagtcaactatgatatgtaatttgtgtgtgtgtgtgtttttaaaaaaatagccaaataaaaccctatattaccattcaaaattaaatttgcaggaaaaataatcgcttgatctgtataaagtgcttgaacatgtttatatcccttgaaattattagcaaagatgcacttgtgattttaaaaatgtaacaaaaaatgaattaaattatacaagaaatcatcaacagatctcttgatagtctttttaaaaaggatgaaaagattgaacaactaactaaaacttagatcttagaaattaatgacttaggttgtattttctgcctttcacttgcccaaaggaaaaagagaacagtacttaggtgtcagcccaggcttgccatgtgcatgctctcagctttaacgctgaggtatgaatgagtattaacgctgttggtatgagtgagctgcaggtccagaaataactctccagtaacacactttagaaataatccctcacagggtagccatgtcacttgtattagttgtaaaacacaccactcactttttgatagtgataaagtgatttcttcattgacgttttggaaaaattgcagcaacatactgtcttagcaaatgctttgaaacaagtttttttatttttagagaaaagtgttttggacactattgattagtatttatttaagaaagttttatgggcatggtggctcatgcctgtaatcccagcactttgggaggtcaaggcaagacgattgcttgaacccaggagttcaagaccagcctgggcaacatagaaagacctccatctctacaaatcattttaaaaaaattagctgtgtgtggtggcatgtgcctgtgatcccaactactcaggaggctgaggcaggagcattgcctgaggctgggagtttgagtctgcagtgagccatgattgtgccgctgcactcaagcctgggtgacagaaagagaccctgtctcaaaaaaaaaaagaaaaaaaacagccaattactagccactagattttagccaatggcaccaacattccttaggccaacttatcagaaaagatgtgaaatgctggcaattgtagggacagaattttatagggaataaacttttgacgtggcagaaatctaactaaacagtatttgattgaggctatgcccccacctttttctctactgaggagacaaaagctgagggctccagtctgatgggccttggtacccagccaaccaagggaatgcattcaggtcaagggcatgctggagagaactctctgtgttagctattattaatggttccaaatttataggaagaacattagtttgataacttgtccaaggtcactttgctcagctaaatgagtgatgagtgtttgattcaaaccaggcctatcaaatccctaaatctgtgcttttcagggccaggaagagagaaagtttgctaaggtggaaatcggagggtggagcaccaatccttacctcttccctccccagccagagcagctctggctgagatcacatttgaagaaatccttttgctgttaagaagaaaagaaaagaaagaaaataagaaaaaaaaaaggaaagaaaagaagagaaaaattccagccttgcactagtctgagagattttgaggctgaattaaataaaaccagatgttaatttattatcaaaattctcagcctataacagttctcaaatcttgtgtacttaggaatctgcttgagtgcttgtttaacctggagagtcttaagctccaccctcaagagattggattgaataggtctggtctggggtgaagcacaggaatttgcaattttcacaggagtcccaggacaattggacacaggtggtaagagaactgcattttgaaaaactgaacaaagatgttttgaaaagaaagaaaaatgaaagccgagagcgccagaagtggtttgatctcacccatttggcataagtgctactccctttggaaagccctctgtgaatgactcagcaaggcctgtcttaaatcgtgggtctcttccctggtttgacattggagagagagtagttaccatcacggaaaggagaaagtgagtcttaggactcaatccttcgcctgtaagggagactactgaacaggggaaaagaaggaaaagctcaagagtgctccaaagccagcggaagaatatgtgagcagaaacaaaagaaatgaacagagcaattttcctcctgaacgatactgagtagaatttcttaggaaggcagaggcagggggcacattgctacccactaaatcatggcctgacagccagtcacagtccagtctctttcagccaagaggaatgttctgagaacccttcctgcttggactcaacatcacatccctggcaaggcttcaggacaagaatatgggctccaggaagcatcagtgatggggttggtggcagcccagatttttgttgctgaaggagctagatgcagtagtctgtaggtagggagaagatgaaggtgaatttgctgaggatttcgtataacactgaaaaaatcataatccatatcaagttcatgtccttgatgacattaagtgagatcccatagttgtggccacccatgcacatgtgatagaacttgatgataagttggtttcactgtctttcctaatctctgctgttttccccaggagagacatgggttgtgaaggctccagtgttactgaatttttactcggcttgccaaggtttggttcagctccatatcagggagggcccacatggagagtcaagatcagcccagactctccacatgctggattctcaaggtcccaggtaagctgccttggggaaccatggctggcttaggaaccaggggtctgtgtgtgttgctggagcatttccctcagatgctactaatccatctgaacatgtaggccatgagtggtttctaagcctgcctgttccctgtctctcatgtgtgaattttttccatacctgtttcttacatgtgcagaaactcttggtttgctgggcatccccatacaatctccccacagcgacctcaaattcacaatgttctaaactaaattaacatttcctacctatgtagacctgcttctgtatttctatcttggatgaaacagccacccagctgctcataccacatcctcgggaatcttcattgactcctctctcttgcttaccctgatcatccaactgagaccaagtcctgtggagactaccccataaatcatccttcaacccattctctcccctggaggctttgccactgctctggttcagtcttcattttcccagtagatttgcaattgcttccttaccaatctctcttctggggtttctcaaagaacgtgtttttggcattttcagaaggacaattatgcatttgtgcaaaatgtttccgacattgtattttttttttttttcagacagagtctccctctgtggaggctggagtgcagtgtgcaatagcacgatctgttacccagcctggactgcagtggcaccatctcagctcactgcaacctctgccccccggattcaagcagttctcgtgccctagcctcccaagtagctgggactacgggcgtgcgccatcacacccaaccaatttttgtatatttagtagtgacagggtttcaccacgttgggcaggctggttttgaactcctgacctcaagcaatccatccaccatggcctcccaaagtgctggggttacaggcatgagccaccgtgccccagccccatatgatttttttgcatctgtggcctgaatgctgtaaatgttgatagtgcctttcaattgtaagaaccaacctctccttccgcaagtggtgctagaaaggagttaagttctgttcaaggactcagggatgtgaaaggacaaattagagccaccggagccattggggtgatctgagcaaaatctgaaggcaggagcctgtgctttgggtgcggcttctataccctcctagggtaggaatgcagctcccacagggagctttgatgcagcacacattgtatctttaccccatgtcctgtcctccttcaattgtgtcttctatcacctttattttcttctaattctacacagtacctctaggagactgatttcacttgttatatcctccaaatatcatgtaaatgccaatttctcccaaacttgcatatctacttcaaggtatctcttctcagggctaggcacagtggctcatgcctgtaattccagcactttggaaggccaaggcaggaggatcgcttgaggccaggagtttgagaccagcctgggaaatatagtgagaccctgcctctacaaaaaagaaaaaaaataggcaattgtagtggtgcatgcctttagtccttacttatcaggagcttgaggtgggagaatcacttgaacccaagagtatgaggctgcagtgagctatgatcgcgccactgcttccagcctgggtaacagagtgagaacatgtctctaaaaaaataaaaatttaagttgggcatggtggctcatgcctgtaatctcagcactttgggaggctgaggcgggtggatcacttgaggtcaggagttcaagaccagcctggccaacatggtgaaaccccatctctactaaaaatacaaaaattagccaggtgtggtggcacatgcctgtaatcccagctactcaggagactgagacatgagaatcgtttgaacctgggaggcggaggttgcagtgagccaagatcacaccactgcactccagcctgggtgacagagtgagactctgtctcgaaaaaaaaatttttaataaaaataaaaattaaaaaaataaaaaattagatatttcttctcagctcaagacctttgagtatattaaaatttagaatgtgaaaaaattgcctattcaaatcagttcagaaaggtaaactagtcaacaaacactgtttatacactcaggaaaaggttaagatagatccttgaaccatttatagaaacatatacttgattgttaaataaatataaacataaagtcatagaaaaaatataaaaggtacgtaaagtcttcttaaaacacaaatttaaagaaacatgaaagaagagattgataaacctgattctatcagtattgataacttctgaatatcatatcataaacaaaattaaagacgagactggtccaaccaagaattaatattcagaatatacaaagatgtgcatgcaaaaaagaaaagcatgcacaattcagtattgagctgtatacatatattaatagacatttgcagaagaaaaaatatgaatgaccatgaaatataatcatttcaatctagttagtaaaaaggggaattaaattagagtggtaataaggtgttatttcttctgtccaggttgaaagagagaaagagtgagattaagagaaagaggcagagagaaagaacggaagtggggaccagatatgtactccacacactgtttacggggggtataaaatctcagtgctgaattgaaagacattttggtagtagcttagaacttaaagtatagatactctttgacccagcaattccacatcttatttactattaaggaaaactcatggatgtgcagaaaacatacaacgatgttcattgcaagcactgcttgttctagcaaagaattgaaagcactgagagaaagccaatggttaaatatactatggcacatcactggctaaataaatataccataatttattcatatcttaagatactatacagaagataaaaactaattagatacatatgtactgatgtggatgtttagtgagaagacatgtttaaaattaaaacagtatcatatattgttatataaaaataagcaaagaactaactgctttacttgaaaaaggaagtttttggtaaagggtgagcaagccaagaaagagatacaccttcaatttatctttttgagagttttgttgtcaaatgcatccttagtatggccataagaaaactgaaataaagaagatactagatgttacccgtttcctttatggaaaagtgaaaggaacaatccctgagagtgaagaacaaaatacaagcaatcacatcagaaaggaacccgcagcttgtgttctctctctctcttatccttgtccaaggagcaaagaacggtcatcgacagcaagcagtggctaccaccaggtggcaccacctgccagcttcatgctcaggagagctactgcagcttttcattgagatttctccccctactctgttcagaaacatttctctagtaacctactatagaattgatccctgaaagtataaagatctgccctctaccttagttggcactaggaattttattcctattttgttgattgagagatttctcccacctccatccctacaaccaatatatatatttttaaaatgcataattacatatataataaatatattatgtatatataatatataattacataaattatgtaacatattatatacatatatacatatatacatatatacacatatgtgtatgtgtatatattatatatattatctatattatatgttatatacatatatgattacattccacaaatttaacatatatagtatataatatgtaatatatttaattatattttatatatgtatatatgcatgtaattatatgtgtatatataatttatattttatatccatgtatgtacatatattttatttatttatatatatatatatatatatatatatatatatatatatatatatatataaaaaattccattccacaaatttaacaaataccttgggctcttcagtatcatttcttggctgggcatggtggctcgcacctgcaatcccagcactttgggaggctgagatgggaggatttcttgaggccaggtgtttgaggccagtctgggcaacatagcaagaacctgcctctacaaatgtttctttgatttaaaaaaatatttttttaagtttaagtcacaaagttcccaattagcatagcaccctccaactgacaatcagaagccatcactatccacctgacagcactcccttaatgctttcaggacgttactctctgcacacagtacctaggtccccagttggtgtagggctcttctctgtggtgaggagatactagaaagatgatgttttctccacagaaacaaaccatatatgtcttgctcaagtgtagatttgagttatttctaattctcctttgtgtcaggagttctgtgccactgaaaatttttaatgctcaaaagggcaaaaatcacatcctatcatgttcccttggatatccaagtggacatggtgagttggcagttgatataagagtctgtttggggtacaacagagtgatctggagatataagtaaacacaactattagaatattttgagatactaattgatgttttcttcccttgcatatttcatttaaaaaattctgaactttcccccttaccacctccattcaagaaggtagacctgtttaaatcaactgccttaggggaggagcacaacagcaaaagacaatctgctgacctctggctaaagcccacactcagatgcctctgaggctgaacatcatagcagagggaatgcgtttgagtcgaaaatcagagttctcttcagtggtatggggctgggaggaagtctggtgttggagtctgaaaggttaggaagatcccagaaaggaatggccatagcctcctagtgatttccaagccccagaggcgcaaagcagtgggtaggtcctgaggagacaggccatgcatggtgctacccaggcagagttcttgggggagtggggaagagcaaaggatgataggactccagagggtcttagggggcctgaggccagtgagcaggcagcaaggggaaatagatgttttttgtttctttttttttttgagatagggtctctttcggttgcccaggctggagtctagtggcacaatcttagctgggactacagatgcacgccaccacgcctggctaatgttttaattttgtgtagagacgggcgtctcaccatgttacccaggctggtctcgaactcctggggtgaagtgatcagcccacctccacttcccaaagtgctgaaattgcaggcgtgagccatgccacccagcaagataaagttgattctcaagaaaggcacagaggaagtagagagctgctgcctcacttgaaaggactaaggtgacctctgtgtggctggggtcagggtaaacctgaagatattgggattcttcccatggaaaagaggcaagagtggggctccacatagaaattaagttaaatctaaatgaagatatattccttttacataaacctgaggactgagagtcctccttaaaacacagacagatcttgtttccttatcagtgctgcacaataatgataatttatagggaacctcccagaacatttatgctttttccatcatgaggtggccagatggctccctggtttgctgaatgaagtctggaaaaaaaattactatgtgtaaagagacaaaacagtctaaaactataagcaacaggaggtactgggcattggaggttggctgcaagtaaagaataaacatagaacgcttcaattaaatgatcatatattcactcatcctttatgctttggcatcttttagaaaatcttccagtgctttcacccaagccttcttatcttctcagcaacacatttcgcttagttggtatcctattcctatctttggcttcaactaacacctctttgctggtggcttcttgatctacttcttcccaaacacctaagccaagctttgggtacagacctgaaactgcctgctggcctcattccaggacacatcctgtgggcaatacaatttagcatgtccaaatcataactcatgtggtttaatttttctggccaaataataagacaaaaaccacaagagcattgaaaaaaataaaacgtttattaaagtgcctggcaaggagtacacgtcagtgaatacatccactgagaactttgcagaggggaaaagttaggagggtttgagtgctaggaaagggagagttcaggctaggatgctaattaagggttgaatgagtccatgtgtctcttccattgttcactggtcagcaaagatcttccagtagttctgttaggtctgtcttcttagggtcactcaatttcatggttctttctcaatcagttggaatgaaatatctaattttatgttgtcatcttctggggcaagtgtaagtggaaaatttccctttgacaattttacctccttttgccattaaaatcattgtttgttttgcatctaaacactgcttgttttctatctgtagaatagatcctcaaaatgagatttctagtccgataggtatgtggatttgtgattttattagaaattgtccaagtaacgactggaggcggtggctcccacctgtaatcccaacactttcggaggccaaggagggtggatcacctgaggtcaggagtttgagatcagcctggccaacatggtgaaaccctgtctctactaaaaataataataataaaaaattagctgggcatagtggcgtgcaccagtagtcccagatactcgggaggctgaggcaggagaatcacttgaacccgggaggcagaggttgcagtgagccaaaatcacgccactgcactccagtctgggcaacagagtgacactcatctcaaaataaataaataaataaatgtccaagtatctttcaaaagtgtagggattcactcaccaccaacaatcataggcgtttttatttccttcctctttgtcagttctgcatgttagctcttttaaatttttgttacaaatatgcaactagaagaaataagacctgtgttcaatagatcaatagggtgaccatatatagttaatattaatctattgtacatttcaaaatagctaaaagagaacaattcaaatgttcctagcatgaaaaaaagataaatgtttgacgtgatagatatcccagttacactgctgattgtatgaacatatcaaattatcacaagcaccctgaaaacatgtacatctattatgtatcaatttaaatcagtaaaaatagaaatcttttttactaaaattatttaaatatttgccaatcttagatgtgaaaactatttcatttttgtgttaatttacatctccctactagtgagattgagtttcctattgtaggtttgttagttatctgcatttcttcattttatcaatggcctgttcaactcctttgcccatttttcttttagtctgttttaaaataaatttgtaggcattctttgtatattaggtatactaacctgtgtatcacatgtattaaaagtattttgtctgcgctatcatttgcattttctttctggtaacttttatcataaacattaaaaaatgatagtataatataccaatctaatcatttataacttctggattttatgtcttcttaaggagtcctcattctcaaaattttacaccaattcttccaatatataaataaagtaccctcatcacatatgattttctttttttttttttttttgtagtgttcttcttgtctgtcttggtagggcacccaaagagatgagttgattccttcctgcagcctggtagccactcagattcttggagatgcttcagttgactggagcttcctatctgattacagcagtccatgtggggatgtcagatgccagtgcagagccagcctttggtgaatggagacgtgaatgggaaagcagagaagggaggcacggatatgtggatgtagctagatactgcatggaactcaacctcccacagtggaagtgaagtggaataaagtgggtgctgaggacccacttcgggaaggcctcaggtgcctgctgcatgtggggtcagagtgactgatgcttcgtgtctccgaatgataaacctcatggaaggtagtgaaagatcagagagttctccctcccgatctgagagaatgactcctttccttgctagtgcccatagtgtgggtgtttagattttttctgccttacaagtgcatgtgatagaagaggctgcatttccttgtttctcttccctcccagacatcagcaacacctgtggccactctccaaggtgttgaagttgcaccctgccctctggccatgtccacagtgctgagatactctttagacacttacttctagataaagaccttgatacatattgggccattaggcagcttgtggattgctttttgcttcaccctagctggccatatgtgagatagggcactactgacgagcagctctcatttgggggatataagatgagaggaacacacaggctgctgtggttggtcacctactcccagtgtttttcctagttctttgcctttccgacctagaaactcccaccatcacctcaattatctagattcaaaccttctgctgagctgtggagtaatataattctgccaaagactgtttggctgtatcctttgtctcattcctgaaatcctacacatgaatctagcatagaatgtttttgcagcagacctcaggagagctgccttcatcacatagcagatgactagccttgcctccctcactctgtctcttcttgctcaattcaagtccccattttggaaacacttctcttgctatgccttggaaccctctccagaacatgatgcttctctatttttccttcggctccatttgcatggcaaagtttgggcaagggttgctcatgtaagtacctccttagaatcaactaaccatgcctacttcctgactagttcagggaaggagtctatcacagagaagggggaactttggaaggagactaaggaaatacaggtagaggcagtggagaaaaaccaggagagagcagtggcatagaagccaatggaaaaaagaattccaggaaggaagaagttttctatctttgaaaaatgaaatctccctggcagagcggatgagaacaatggacatttcaaggtgcctgcatgttttgtgttcctaactggagcagtgcctaccaaagtggagcacagtgggcaagggtaccagtgggagtgggtcctactgggcaagggtaacagtgggagtggttccagtggggaggagtattttattgctgagattgttagaattgctggcacatggtgataatagaaagcagatgaatattcagttgagtttattattgcttttaaattatttacacccaggcgctcccttattgcacccagggcagaccactcccatcctccatcacccccttagtacactgctgaaatggagaaacccattacgaacaatttattttgtccagaatggatgagtttggtacaggcagagaggcccagaactacaaggaaggcgaactctgctattttctgcttaataaagcaagctattgatttttaaggcataccggaagagagtgacatgcctgacctagaaaacagagaagcagataatatttaggacgaaaagaacagctagacttatggtgacatacatctccactatcccaaattctggggaaaagccttgtggattggcttgggttggggtgaatgacgaatcctggaaatggggtaaagaaaagagacaacccatcacaggaaacaaacacaagtgatatcacgagttcatgaaaagctaggactcagagccaaagggaccatgaagaatcttgggagtcttggaggggcactggacttcacatggcatcatgtagaagcagaacctttggaatgtgagtgtaaagaggcagaaatccatttgtttcttcctggcttctctgtagtaagagggacaggcgagtgggcccgggtgcattcagaaaaaggaagtgtagagcaggcagccctggcctggcctctcgaggtcttaagctcacatacagaagatccttgaggctgatagaccaaacaaagagattcacagtggaagcctaccagcaacacagtgtgggtttgaatgctgggtcccttctgatgaatttcttaagaatcaaacatggcagccagagcagtagaaacaaatttgggatcttggtttcaaacattaaccacagtataccttcaaaaaaagtcagttgcattaattaaaatgacccaataggagtgaaaagtagtgggaaaaaataggatataagaactcaaatttacatatttagaggtgggtagagttgggctcaaataggtcctggagcaattactcagtggacacataacaaacaattactgagcaactactttgtgtaaaacattacactagggactagaaataaaaaatttcttaagaccttgttcttaacctgtggagtttctgttacagagcatgtcattctgacatggggcgagttgtgccctcccccaattttttcttctctaccaggatttcctgaccatctttcaagatctttcttgatgaaactacccaacaatgccatgaaaaaaaaatagctctatccctctttgcttctaaagacttcttttaaactcatatcatctaaactttattgctgtttctgtactcgtcttccttggtagacagtgtagaagagaaacattttgtgttgtttagatttgaatctgttagattcatgatgtttattaacatgtgtgcattgacccataagtggggtgtgaaattggtagatttttgactggtactttaaaaaactggagtagaagagaacggaaactgtcaaagtgattcacacattaagaatgagtaatgcttcatgaaatttgtttctattatttatgtgagtgtcttgagtcacaatgtaaaatatttttactaaggatcatttaaaaaatcaataaaacactggaggctcagtaatttgggatagactataggaagaaacctagacctagagattctgaagttttcagattataaacagatctatactatacatagaaagcaatgggttacacaagtttatagcttaagtaaaccaataaaatagcaaacatgtctatacattaaggcaggagtcagcaaactatttctgtaaagatagtaaatattttaggttttatagactataagtttcctgtcacgactctgcaactctaccatcatagcacaaacgcagccacagatgatgtgtaatggaatgacaatggctgggttccaataaaatttgaattttacataattttcatgtgtcaggaaacagtcttttgatttgtttcaagcatgtatgaatgtaaaagccattcttagctcatgatgttttaaaagatagtgtattaatagaaaatttgagctccaggaaggccaacagattgagagatgattgccttcaaaaacagtttgtcgaccaggcgcagtggctcatcccagtaatcccagccctttgggaggccaaggtgggtggatcatttggggtcaggagtttcagagcagcctggccaacatggtgaaaccctgtttctactaaaaatacaaaagtagctgggtgtggtggtgcacacctgtagtcccagttactcaggaggctgaactaagagaatcacttgaacctgggagatggaggttgcagtgagccaagatcgcaccactgcactctggcctgggcaacagagtgagactctgtctcaaaacaaacaaacaaaaaagaagaaagaaaacatagtttgtgacttgttactcgcagctcccaagagaaggaggcatgtcacaccttgggggcccacacagggcctgtgtgttggaagcattggggctggtcaggaggcaaagggggagggaaagattgctagagcctttattgtgatttttgtggaaaggaatggagtaagctagatatgcaggtttaagcttggctggtttgaataattacagtgggctctggggataaaaactatgcctggttgtctgatacctggtcctggggtaattagggcaggtggataaatgcctggagtgtgaaagctcaataaaggagatgattggggttgtgggctctggatttggttggtttgtatttgaaaatcacactcatgggtgagttcatctttaggagttagctaatcctaggagaggcaatctccagtgttaccaaggctccagatgtcaaagcctcagaatatagaaaagatgaggttaatacacatgggctgtgtacaaataggtgatgggctgggtttggctcatgggctatagattgccaaccaatgggctaagagaagaaagataatgtcaaataccaaacatgcagttgtaaaaaataaattaagagtaaattaggaatatctcatgaagcttcctatctttgctagtaaacactgaagaaattgttatttatcataaacactgagcatctctaatctgaaaatccaaaagcctaaattctttgagcactgacacgacaccacaagtggaaaatttcacagctcatctcatgtggtgggtcccagtcaaaacacagtcaacactttgtttcatgcacaaaattacctaaaatattgtatcaaattaacttcagcctaggtgtacaagatgtgtatgaaacataagtgaattttgcgtttagacttgggtcttatcccccaagatatctcattctgtaaatataaatacttcaaaatctgaaaaacctcaaatctgaaacatttctgtcccagaaatttcagataaaaaatactcaacctataataagaaacagcctgtatccacttaaacttaaggaagacttttccctgatttggccaattattctgttcattctgctcctgtagcccccaaaacataaatatttcctaacctgctcttttcttatcttcactgagaagggaaatagccagaacagacacagaattctccgagtgtttagcgtcaccctgaatatatcttcccaagccctgttttaaaatagtagtatgatctcttttttgtgttctcataattttacccaaggctaaattaacatttttggagcttctaatctaattataccattgtgaattccttgagggcaaggatgatttttttttcttattacttccttctcaaattctctcactgtcttctcattgcagttggggggcaatcccatgtctgttcatggccctacaccctccccaatctagtgcctttccctccctgttgtttcagatgcatctcttgacaagttctcccattttcagtagccatgttgttggtcttctgatggagaaatgtgttgggcctttttattggctgttctttccatctgcaataacttccaccctgtccccatctcattcctaattcttgaggtcttatccttctcatcagattgtttccctgcaagtctttccctcagctgcctgtgatcttccttcatagaacattttacagtttgtatctgtacaattataaatgtcatcacattctgatgctggtctcttccatcaggcctcaggtccttgagggctgagggcctggtacatagtagcgactcaataaacattcatggaatgaatgaatgagcaaaagcaaatgcagggccccttgaggaacagtgaggagtctggagcgcagggtgaagagtgatcactgtgctgtgtatattggttctcagatatttctattagttttgcaatcctcattcatatttgacagcattttgaagcaatagcagcctagcagaaaatgcttcatgcaaactcggtgaaagaattctcagcctgtataggaagataaggaatcggacagaactttagggcattttaatgatgatcataggtgtgcatgtgggggtagggcaagacccctcagtgatgatctcgccactcagagagcaggagaaggtgaggctcataatccttatttagtgtagtttggcaaaactcttcataaacactgttatggtttgaatgtgttcctcaaattttatgtgttggaaactcaacccccaaatttatgtcttaatggcatttgcaggtgaggcctctgagaagtagttaggattagataaggtcatcagggtggggcccccatcatgggactggtggctttataggaaggggaagagagccctgagcggatacgctcttgctctttcactatacaatgcccttcaccatgttttgatgtagtgaaatggccattgccagatgccagtgccatgctcttggacttcccagcctccagaactgtaagaaataaatttctcttctttataaattacccagtctgtgttattctgttataacaacaaaaaatggactcaaacagacgctttagacattttccccaatagtattcttgccatatttacttcaacatcatcaagacatcaactgatggctttactgatcagcataattgctccaattttatcttactggatgttgtgagtaaatgagaacttttacactggttggtggacccagggttctccctgtttttcattatgttcatatatacatatacatatatacatatgtatatatatacacatacatatatacgtatgtgtatatatacgcatatatacatatgtatatatacatatatacatatatacacatatatatacatatatatacatacacacacacacatatatatatatatgctcattacaaaatggaaacttcatttctaagaaatgaatgcactacccacacccagatcttcactccgtcatgtacttttctttgcataatgctgatcggacagctgaagtgtagtgtgagcatgtaggctccagagctatggtgctagggtttatatgttgtgatttgtggccttgagcacctcatttaacttctctggacctgtgtcctcattgggaaaacaggagtaacaatagcacctattttctataaatgttatgaagacttaataagccaatgtaatagaatattcagaatggtgtctgaaacataccaaggccaaagtaaatattagctaacattacgatttgtatatgaagttaatacctaaaaagataaaacatagtgagcctaacttgacacacaatggttagaaaactcatttacaatgttgtgtaaatttacacagtttagaaagctttccattcaaaataattaaaacagttttattgctcaaaacagcaccctgaagtatttgggaaaacccagttctccaaaccatgtgggggctcagaaagaccaaggtttgacccttcaggctgcctccagtggggatctctcaggagagctggtggcttaaggataactaattttttttttagacagggtctccctctgtcagctaggctggatagctcactacagcctcaagctccctggctcaagtgatcctcccacctcagcatcctgagtagctgggactaccagcatgtgccaccacagtggacagtttatttttagttttcatggagacaagttctcacaatgttgcccaggttggtctttaaatcctgggctcaagcctcccaaagtgctgggattgcagacatgagccactgcgcccagctcataatcttatttaacacaagataaaaacacatacacacaagtcctctttactgcttgtacaaagtcattttaaaagtgaactttctgtcttattagcaaatagcccagagcaggggcaggaagaagaaacctgtggtgtggactccaggcttgatgttcacatctgcccttcctgtgaggaccactatgtctctacactgttctttgctgcacaaaacatttgtttaatccttacagctactcctggaatgggcgcatttatgccctttttaatgatgaggccagtgagatttatagaggggtgaggatgtgtccaatgccacacatcaaagtgttgggtcattcatttattcaatgtgtcaagtagacctggggacaaggagctgaataactccctcaaaagggctcatactctgctacgaggaaaccatcacaataccctatagtggttgctggagtgtaggggttgtcagtgggctgggggaatgctcgcaaataacattttagttgggcaagaaaggtccccagaaatggagcaattgtgctaagtcttgaaatagaagaggcactttgaaaggtgataaaagtgaggaatttaggcctccagactcaaattgtaatatatgtaaaggtgacccatgactcactaactaaaatatatatatttaatcttaaattactactttttcacatataatttgcttattattaaaaattttgaagagtacagaataaagaaaaacaaacattttggtgtgcgtatttcagccctttttttctgtacagaaagtcatgtgtggccgcgtacggtggttcatacgtgtaatcccagcaccttaggaggctgaggcaagaggatctctggagctcaggagtttgagaccagcctgggcaacatggtgaaaccctgtctctacaaaaaaaaaaaaaaattacccaggtgtgatgacatgcacacctgtcccagctactcaagaggctgaggtgggaggatcgcttaagtccaggaagttgaggctgcagtgagccatcatggtaccactgaactccattctgagtaacagagggagatcttgtctcaaataaataaaaagtcatgtgtatgtaacttaagaggctatcatgaacattctcctatgtcagtaaccatgcaccttcgacaccattgttaatatttgcccagtgttaaatcatgtggttgcaccacacttcatttggctgaggccctattgctggacatttaggccagagaatgaacaactctgaagctatgccaagctgcactggagaatgtggcgagtagaggcagctggggacaaatcaggtataattatttgtgacccacttctgcctttcttataagccatttgctttagatttagctgcaattttgaaagctaatctgggtgttttgcaagaaaaaaagataagcagaagtaccttctggagcctggcaaggtagggattggttgtgtgcagtgaaatctcagagcttgctgaagtggcctctaggagcaggcggagataggaaaatgccagggaaacatcatctccctgagggcgagttcgtcatgctatgtgggtagattgtgaaatgcaatataaccttgaaggaaaccatagaatatttacatcgaagatgaaatttatattcacaaaagtgtggtgtgtttacatcttaatacaacttcgaaaagttctctgtgttccaacataaacatgaatattttcaaaagttgcagtggtatgaccttgaaatcaacataccttggctgcttcttgcctgtcttcctcctttctccaccctcttccaattttctgagtgccactttgtgccatgtgctttgcaggcatgaaggatacatagggtaaacatgaaggcattccctcaaggaccttatttataggtccttggaagcagtcggctgtagaaacaaatccataaatacatgtgtaagtgcaatgtacaaaggtcttagaggatcataacttcacttagggacatcagaaaagttcacagagtagttgacatttgagctgagctttaccagggaacaagtgagaaatgcttgtgcaaaggcaccgacaagaaatagtgagcactatgtccacagacagaagtatagggcgcctagagtctcaggggtagactggaggtggagctgaggctggagacagcagggccttctactacctggagagggtcttagattttctcctatacacaatgaggagccaccaaaggattccttgtggagaagtcgtgatctttctctgtcccttgtcttcaagcatcctctaccctaaaatggccttcccaaacccactctcattttcatctggttaactgattcatcctttgcatttcagctcagatgtcaccccctccgagaatctttatttatctgccccccccccccccccccccgcaggcccttcccagcaccacatagatccctaatcccttaccacactgcactggaactattggtatagcttatgggtgtctttgggctgtgattgtccagtttgattttttccgccccagttcccagcacagagcatgtcctggaaagaccatgtttgctttcagatccccgcagcttctctgctctgcgtcacagaggctcacccttgcaagctacatttcccaggatcacttgcaggttggcttcctgctgggtttggccaatgggaggtgctggtgggaggaagggaaaggtcagagtatttctctcccctttgctctgcttcgagaggcaccactgacaatgacggcatctcctctaaggctccagctcctactggacaacccctgtctccaaggctcaagctcctgccaagtggccactgcttccagctctgacaacaccatcttcctccttttgtccctttagcattggggatgttaatgggcttctgctgttgccaattctggcctcattgtctcctgcttggcttttcagctctccctacaccattgtaactagttctttgtattcagtttcctctgttgaactccctggcatggcccctgcatctcgactagacattgatacacgtagtgcccaacagataggattgctcagtcaatgcatattgagtgaatgcttaggaaggacactccttggaatggggagccagatgggtgaggggagcagatttgatatagggagaacatttgggagctactgtatttgttaaagtggtgaggtctgagctgaggcagaagcagcagaaactaagaggaagggagggaatccaaggatgctgatgatgtgaggggtaagagacagaggcagcagctatgacagctctcagggttctggcttgggcccttgggtgtaagagtgtgaccattcactaggacatggaacacaggagcagaagagcctttgtaggtctggaggagcttcagaaaggcacttcattctctccccttctccgcggcctcatctctaaactgcaagtcatgcctcagctgtgcagggtaggaccccgtcccactgtgctgagttagaaatgcgagggctacggttgataactgaagaaatgtgaacagttgagaagtagaacaattgatagagaagatttaataatggaatgtgttctgttaagtgaatataccccaagccagagacaccctttgtagttctgacaccactaatcggcattcataagtcattgcccaccctgggtagaagatccggtctccctcacctgtaacatgaagataatggcagggtcccaactctgtgcagggacaggatgagaggtgggagggaagacggacttcagatgatggtgattactgattgatctgtcccagcagcagtagggaggatgaaggagctaagtcagagaggaatggatgctagagaggctacagaggcagggcaggctgtgagcagaggggagacatgaggcactggagaggggctggtaccacgaagatggttggaggatggtggtgggagatggttggaggatggtggtgggagatggttggaggatggtgatgggagatggttggagggtgatggtgggacatgatggaggatggtggttggagattattggagggtggtagtgggagatggttggaggatggtggtgggagatggttgaaggatggtggtgggagatggttggagggtgatggtgggagatggttggagggtgatggtgggagatgatggaggatggtggtgggaaatggttggaggatggtggtgggagatggttggagggtgatggtgggagatggttggagggtgatggtgggagatgatggaggatggtggtgggagatggttggaggatggtggtgggagatggtgggagatggttggagggtgatggtgggagatgatggaggatggtggtgggagatggttggaggatggtggtaggagatggttggaggatggtggtgggggatggttggagggtgatggtgggagatgatggaggatggtggtgggagatggttggaggatggtggtgggagatgactggaggatggtggtgggagatggttggaggatggtggtgggagatggttggaggacggtggtggtaaagtaggggatctatcttctccttctcctcttctgtccttcaaagcctcagcacagacaaaattccagataaagatttgttgtacataccacaacctgaatgttgaacaaacgcaagtgtgtcctaatcaaaacccatctttagttttggcctcctactgtcctttcaaaatgtatttgccctggactcttggcttttctgctcacaatcaggttgtaacaatattgcagttacttagttgcaaatagtctataaaagactagtttgtgtaatagtaagaactcagaacctggctgaacctgtaattccagcactctgggaggtcaacgtgggaggattgcttgagtccaggagtttgagaccagcctgggcaagatgatgaaacccctttctgcaaagtaataataatttagtcaggcgcagtggcatgcacttgtagtgctagctactggagaggctgacgtggaagaatcctttgagcccaagagttcaaggctttagtgagctatgattacaccactcggtgacagaacaggaccctgtctcttaattgggaacctaaattaccattcagtctcgtcccctccttccagctggagagaaggcatggaaaaccctgctttctgagaagacacaatggtcagcttatctcgttctcagctcatgttccccaaacttgctaaagaaggttggcaatgaggctggaggcaaggtcattagggaacaagggcagggtctcttgcagtggggacctgtgtctgatggagcctgcttgcaaggccgatatctgaagctggcttcttctccagtggtgcattcctgggctctttagaggctccctgccggtgcctctgaccacagctctgtgatgtgggcagtgcgttcagccttctggatgtcttcttcctctactcctaaacccctgattcaatgatggcccattcagcactgaatctcactgttgggggcccctcaactccccaggctgtgctcttaggcaggtcttgcaactgcaccatctggctttcccacctcttcgtggtctgggaaacacacacccctgttctgaagaattctgggagtgcagcccagttccagagaagtattgtctatcccgttgcacagactctctcagtcatctcaatgtgagtcagacacgcattttctgtgtccccagcctgtgggaacacagtgcaaggccgcttactgctcccaaggaagccccctcactaggcttgagtgaaggaggcattccctccacactcctccaaagggaagtggggacttggcaacagtgcactccaaagaacctctcacagctcccctcccttccctcctctatggatgcttatacagatccttctatgttctcaagtaggggacagtgttcaagtattgtttaagctgttcctggaaatttttttgtgaattgtacatattttgagccgtctcacactcgaacatacctgtgccttggtggaggcagggaaagtcctgtctaacagatctgcagtgggaatgaaaaccctaacagggttcccgatggcaattcagaaagtctcaattcactcactcctttcctcgttcactcatttgctcacacgacacttgttctttgaatcaggagcctggaaacatcccagggcctggacatccctaatgttcaagcagtctttatttcattctatttgaattgtctttaagtcatcaatttttagcgtggggctactactgcctgggactaaattcagctgctccacacacttggagtgaaaatgtgagcaaatctctctcatttttccaaattgcatagcaagtagtgatcagaaaaccagcatctcctcgagactcacctgtcttagaaggtccaggtgtgtgtgagaaccgggatgcgctgtctgccgctgcccggcgccgccacacggtggcgccgttggacggtcccacagtcttccacaaagcggcttttgtccgtatccccgcacagccgccgaggttctctagggaggatgaccccattccctcagtggtaacctcagccaggggtgaccccccacttgagctcacgaggttgcagctcagctgagttctgccgccagttttctttcacagccgccttccaggtgccagctcgtcccaggagccccagggcagcgcaggctcccatgaatcccagggatcctttgttttcaactcaaaacacaaagggtcctgttaccccctccccttcctggacaacagagctacttgctatccatctagacgtctgagaaaaataccgtcagtgacctcttaggggatcccagggtgctcgacctcctccccgccccttctcctctcccccaggttagcacccctcatggaagccaggctggttttccctctggtctacaagccaaagaagctggcgctattcttaccaggaaaggggactacagatttaatttttaaatcttttgcaagcacccctcttgtaagtcacttgccttagagagagtaacaatgtgtctaacatgctttgaaatctagaacagtcggtagccctgaccttcagagtagacctctgggagcacatttgaaagccgtgtaggaggctgacctttctgactgttaaggaagtgactttggattccaagagcttgttcatgcatgacaattagtttttaaagcttctaagagcaaagggtaaactccatggagatgcagagtggagaacccagtgtttttgcatcagagatggaagtcacagagagtcccagctgtcatgacaggcactaagccacatccctccttcgctgagtagcagccagtcactgaagggagcagagggttcttagggtgagacaatccagctcacaatcagataacatgatctgccgtccttggacataagctatatgcaaagcattttgaggagcactttatatctgttatttctaatcctcatgaccacaccatttggaaaatattattatacctattttacacacgaggaaaacgtggctcagagaggttaagtaactagtccaatgtcacacagctagttattagccgagctgggattcaagatcttgagactctaaaactcattctcttctcacaattaaatgttgcctctgagaatggtgtccatgttggaagaggaaggcaaagagaaggtagttgggaatggatctcaccagataggagatttccttgtgagatttcaagtttcgacaaatgataactttgaatatgtcagtcatgaaaatggatctgacgtgcagcccctggggaaagagaatcagtgggtaggagcaaagggcacagagtaaacctgaccatatgttttccttggcagtgggtgggtttcttgttcatctggctgtcctcgtgacatttccgtgccttcatcctctcacgctgatccccctgcagaaagtctgacaagccaccttttctggacaaggctttcttcccctgatgcctcccagcaaacacacacatggggttaggcactctctcctcagcattcccattgttcttgcccatgcatcagtacagcaggtattattctaggtacagtcattgtttgtgtaggcctggggctgccacacctggaggggaatcttttacccaagacgagagcagatgccaggaatcatcagagttccactcattcaagaacaaggagatctgaagggaatctgcagaaccccacaaccaaagagggctatggtcatgggtgaagcagggaccatgaataggaacttggactggtcgatgggagcaatactaacaagttaggcctgaaagggcagcatctagcatggcgccagcacatagatggtcctcaggaagtgagtgataaatcggggaggaatggatggtacatgatgaacagtctttattaagccgaatctcaggctgtatttgttacaggcagttaccgcagtctgggttgaagtcataattctctcaagaactttgcatgctcctggaacttcccactatatttctcaactgatttccccatgagtttgactaaggatgtggaccacttgagttggtaaaccacactgaccatccccgccacactacaagcagcagcagctccctatccaggctcctgtttgcagagctggaaatggccgagctctgcatggtggttcagcatgactcaacctccttgtttgggggccagcccccactcctggccatgaatctaactgagcctaaaacccccttgtttttctaagtgggtgttgggaatttccttggttaagcctccaggtcttccctccttccggatttaatgagctcatttattttactttttcacttagcaggttttagggccagttaatgaatggtggggttctctttaagagccaagttgggccggggctcagggcacttttcttgccatttcccactctcaagtcccctgtgtctctagaagtctctccacaatgctggcaactgctcttcccactgcaatccccatatatcgaactttctggaacacaaggacagggagacctccaaatatttttgtggttgttgttttgtagtttgttctgctttgttttgtttttcccctccacacatttttctgggatggctgtttcaatatgagcttgtgctttctaaaaagaaggaggtgtggatgcctcaggaaaagagatccatttttaaatgcagggcctccactctgagttctgtctgaagtatttggtagatttttggggtggagcaagctggttgtgaattccagggagacttgccagatgctgtttaaacctcctttgtgtgaagttggctgtaaagagccgccaggagggcgcactagtggaaaggaacttggaagccaacctttagcccagaaagaatgagaaagaatccagggtccacatggcaagaatgcatgcctgcagcaactcaatgactgactcagttcctagaagctcctcttggtaacgccctctcttctgctaggttgaatcacatactggagaaagcttagtccaaagagtctcctgtacctttgtccatctatccacccatccagtaaataaagattgagcatttactgtgggtcagacactgagctaggcactagggcatcaggaggaacaactggccacagtcctaatgaatgcccacaggtcagaagagtcaggattcctgtgtggtgggaatgacagacagtgggggaggcactagaggataagtcatagaaacctcagcatgtcacgcttggatagcttgcagagcagttgctaactgcttgtttactgctgaagcaccaaagcttggatacgatgctcccaactggcaaggcagagcccacggcttgcttctgcctggggaccaggctgtgggtggcaatgggagcctgagtttctctgctaaaccttcataccaggcaagagtctggggccagtattattaaccaaaaacacattttgaagcttgttgtgatctgactccctacgtgaccccagcaaaaaacagagagaagggctcaggtgggggaaggcagcccaccttcatctgcattgggttgctgtgtgtattggctccctagagctgctgcaacaaagtactacagactgtgtggcttaaacaacagaaatttattttctcacagttctggaggctagaagtccaagatcaaggtagcagtagggttggttccttttcagcgctatgcaagagaagctgttccctgcttctcccttagcttctggtggtttgttggcaatctttggcattctttggcttttagaagtgtcaccctaatctctgcctgcatcttcatatggtgttccccctgtgtggatgtctccatgttcaaatttcacctttatataagaataccagtcatattggttaaccacaccccaccacgactttatcttaactaattcaatctgaaatgactctatctccaaataagatcatattctgcagcactgggagttagatttcaatgtatgaattttaggggtatacaattcaacccatagcaccatgattctgacgttatccttctcctccagccatcagcagtacctatgaggaggaggtcagggctgagtccatctcaaggaggatcaggagtggtgtcctagggagaaccaaagggtagtctacaagcagggaaacaactactagaaggagagtttgggctagagaggagtctggcacatggatgtctcataagcagctgcagaaacgtagaagagcagttatcagggtgcacagatttggtcctctaccccattgtgcttggagatagcaggagcctaaaggagaagaaagccccaagcgggcagctatttttagcctgggacagagttgtcagaggatggcagggggcagaaaggcccctgggatctgggtgagaagaccctgggactttgaagaaaggggagaatagctatcaaggtccagagctccggaggacttttgagtcgtttagtgtgcaggaatgagaatgtgagactgtgagcgagggcacctggggtgactctgcttgcatgaatgactgggtgttcattcatagccatccagggttagctaagactcttagccacttcctctttgaaacacaagattaatttaattaaaaagcataattgtggtgggatattgtcatatagccttgtagactttggcagataattctgaaaaagaaaatagggtacatttgccttaccaaatattgacatttaagataaagtgattttcatcaaaataatatgttttggcacatgaacaagtggtccactggaacaggctagaatccaggaatgggtaccgtatgtttgcaaaattagtatttgataaagacaacatttcaattcagcaggaaagttaggattgattcaagaaatagtgctgacctaattggctcttcatctggggaaaaaaagtgagatgggttttggttaaagatataaatgtaaataagtaaacacaaaggatttgaagaaaatctagtggaaagtttctataactttggcatagagggcataaatttaatggtagcaagaatcccaaaatccaacaaggagaaaacaaatgacatattttctcacttttttttcaaattacaagaacaaaacattataagcaaagtcaaaagacaagctatagtctcagacaaacatttgcagcatatatgaaaggatatgatccttaacttacccaaagctcataaaaattggtaatgaaatggccaaaagcaacaggaaaaaatatgaacaagcaattcacaaaagaggaaataaagatttagatgggatagagaagttagagaaaataaaatttagttctttattccacatattgggcaaaaattaaaaagaccagaaacatcctatgaatgagcacttttatatcttgccagtgggaatgtgaagtactcaagtctccagggaaaaataatctagcaatgcctgttaaagctcaaaatgcacacccattaaatcaggaaccctattgcgggcagtcattccagtagatataaagtcatcagtacccaagaatatgttgacaagggtgtttacagtagcattgttcactgtggcaaaatattgggcaatgcacaattattcaccaataataaaatggccaaataagcatggtaattccatgctgtgggctatcctgtagttatcacaaagaaaaatgaatgagttagatctatgagcatattcacatgagccagctgcagtggtgggtgcttgtgatcccactcacttgggtagctgaagtggtaggattgcttgagtccaagaattcaagatcaacctgggaaaaattgcaagatcctattaaaaaaatgtacacacacacacacacacacacacacacacacacacacacacatattctcaacatgtgaatctatatgttatatattacatatatatgtttatgcatggagagacatgctagtcttatattaaatgaaaaaagcaagttatgagaaaatgtgtatactatgactcaatcgttataaaaatgttgaacaagcaaaacaaaactcaacacacatgtctgttctgtgtttgcatgtatttataccaatttggataagcacagtttaacggtgtaagttgcctcaggacatagaaataagaagtgattttaaacttcctgtttctctatgtttggctgttttgcctattacaagcatttttttttttttaattaaaagctattggatacaggcaatttaaaagggaaaaaaaggacaaagtacttgaaacactcctatgactcactgggccctcaggataaagtctgctctctttagctgacttacaaggcccttggaatctggtccgtgcggcaccagccgttcccttgttctgccgtttccctctgttctccagctgtacaggaccaggagcattcttgacacaaggctgccctcttatacaccttaacctcatccaccttgggaatctctgaggctcagcaaggtactccctacctattcctatagcagcttgtacctatctccttggtggtattgttggcttccttgtgatcacctgtttactttagtcttattccaaattagactgtatgttccaggagggcaggcgtagtgttcctcatggtgttcccaaagacatgtttaggtaattgtaggtgctaaatgcaacaaatatttgttgaatgaataaatgaaagaggaaagaaatgaatgccaaacattagagatgcaaaaaaagaaaccccacagtctattcccttaaaattgtgtagggcagcagcaagcatgtaaacagcctagttacagtataagaagataattactgtcatagaacagagggaatataacctacccaaaatagcctggggaaagtctggaagcagtcaccactgagaaagcacttaatcaaagacctgaaggatgaatagatatttaccaggaaaataagaggatagagtgatgtttctggcataacgaccagctcctgcaagagcaaagagaacgtattctgaaaatctcaagaaatttagtcttgcttgagaataaagttcaaggttgaggaaaggagtatatgaaggataataaatggaagcaatcatactgaaaccaaatcattcaagtagggtcctgcaggtaatgcccatgggtttagaatttatattgaaggtagacacagggaactattgaaaaaagacttaagcaacggtgtgacatgaagggctttggatcacactgacaaaataaagatgggttagggtggggataggagatgatgtcagataaagggaaattggccaggggcacaaaagaaaggagttttctacaatctcctgatgaagttatcagtctgaaccagggcagagacagaagtgagctcaatcaaggaaagattagcgaagtacaaaggagatcaagttgacatgactgggtgcttgatgggctgtggtgggatggagaataaaaatgacccttacatttctgatttggcaactcatttcatttattataagaaacactggaaaagaaggcactttgagaaaaataaaaatgaactcagcttcggccactcatttcatagggctgacatagcaaggttacactaactatgtggctgaaacaaaataaatcttctcttttctcacagttctggaggctggaagttcaaaatataggcgccagcagggccgtaatccctctgaaacctgacggggagaagccttccttcccggcctcctccctggcttctggcagtggccgacagtccttggtgttcttggcttgcagctgcatcaccccagcttctgcctctgtcatcacacagcctctctgtgcatctctgtgcatttttgcaaaatgtcatatgacattttcttcttcttataaggataccgggcatgtattggattaggaaccaccctaatgacttcttgattacatctgcaaagaccctattttcaaatgaggtcacatttacaggtacaggttaggctccaacacatcttttggggagggggtaccaattcaacacctaataacagtttaaagttcgagtttgaagggacatgggacctttgggggaagatgtccaggaggccttggatagatgggggagagggctcaagggacaggtctggtctgcatagctttaggatctacaagcaaggagacacagcatggggtactcacagcaagtaggtgagtgacctgagaagagaagccttgaggaaggttgtggttaagaatcccacacagggagtgactgtgaaggaaggaccagagcatgtgtgtctgccaagaaccctgtgtgcatggctgtcactgagccagcctgtgtccctcctttcctgagagctgacctttgccccttagaaccccagacgctgtgttttctggttcttccacatgtgaattcctcccttaatatttgacactgcttctcttccttgttcagcaagcactggtgagacctgcagccacctctcagagtcagcagggctattacaagatgttggggccagccgcctccttaaactcagcactacagtacagcattgataaagcaaacaaggcaagcttgtttgtacttcgtatgtcttcagaaatgagctggcagttttgtagtaacactgaggaattacactttagtgcatcactgaactattcctgcatgtccatacaagtgttgtccacagagtacacatcttccccgtcctatcccatacccccaaccctaagacagtctgtcaagccagctttcaagtatcagagaaagctgcagattctatctagaaggtgaaatgggaggtcagagcagaccagaacgagtcagccaaacgcctctatacccatgcctctgaaaggggtgcctttcaagtagggtagagcaatggaacatgttctccgtgagggcaggacgcttggctggctagcctcagcacattcagcatctggtgggctcatggtagacactcaacaaatctgcccaggctctgggtggcctaggatatgagatgtttgtccacactgggatcagaaaatgactgaccagtgatgcctggctaatgtgggattcccactctgatgcttggagagcaggagtgagatgctatctctgtcatcttttcttttctctggggatgtggaggaggcagtggtcagtggccaggcctactgcagtacggcagttctgagcctcctactgcttgctcccacaaggtccactctctttgcctctgggaagtgaagagcaaacaatggtcaggatgaatgttgcattaagatttagtaaaaacaatggctaatatttatcaagtgcctgttagggagtaggctctatgtgtcttatatgcatatctcaggtaacccttggtacaactctatgaggtaaattctatgtctatcgccattttttattttattttatttatttgtttaattttatttttttgagacagagtcttgctctgttgtccaggctggagtgcagtggcacaatctcagctcactacagcatccgtctctcaggttcaagcaattctcctgcctcagcctcccaagtagctgggactataagcacatgccaccgcatctggctaatttttgtatttttagtagagattgggtttcatcatgttagccagactggtcttgaactcgtgacctcaggtgatccgctcgcctcggcctcccaaagtgctgggattacaggcctaagccaccacacccagctgtttttattcttgagaaggagtcttgctctgtcgcccaggcttgagtgcagtggcgccatcttggctcactgcagcctctgcctcccaggttcaagcacttctgcctcagcctcctgagtagctgggattacaggcgtgcacaaccacacccagctaatttttgtatttttagtagaaacggggtttcaccacgctggctaggatctcgaactcctgacctcaagtgatctgcctacctgggcctcccatagttctgggattacaggcatgagtccctgtgcccagccttctattaccattttaaaaatggaaaaaatgaaatttaaaaaggtgaagtcactctacaccaggtttcacagctaggatgtgatggtgcaggtgtttggacccagattgtctggatctagagcccactcattgaaccctttcattccacttgcgagctgtgttgatctctttttgaaatctcctccactggttacacgttttgcttatgagttattgcccatgagaaagggcaagaatgatgtggaaggttaggaaaccctcagggccagtgttgtcaggttccaggaattagaagacgacttcggcttcgtgaagaaaaacagcagtgagtttggagggaaatgcagaggagcctgggtgtgtagcgtcgttgctgcccgggagctctgtgtgtctggctggctgagatcagctgtcaccatgtacaagcctacaaaggatgtggactcacagactgtacttgtcagtcagcaaattatacatcagaaccagtgattcacagcctttgaagattggtggggacctcaaagataatccaatttgactctaatttcacaggtgagaagcctgaggcccacaggtcagagcaaggattatggtggattaaaaatgacagcgaattggcccaggtacacagggctgccctacatggtgggcgtcctgtaggcgtctcagttggcttggaggacctggggcttataattgggcgccagggttgggggtggctgcttctgcggggcaccgcagccttggagaggtggctggtagttggagggcagcgagtaggcattctggtgggctttgcggaaggagggcgggggtcatggactgcagggcgtttctgaagtcggcgtggacggcttgctctgccagggagaggggccccccacaacgaggccatctccttggcccataatcctacttgtacttcatgcgccggttctggaaccaaatcttgatgtggtgctggctgtggtacagcaggttggccatctgtaggcgcgaggcccacgcaggcggcatggaagtggaactcgctgtccagccccacccactgcgcgctcctaggactccctgggactcgtgtcttcctcaccgccgctgccgccccctgttggatgcaaagggcaggggtgggaaggggaaaagtaaaatataataactggggggaggggcgaggaggctgggaaaggtgactggaaaacaaacaaggtgaccgaaaatgccttgacatttctcccatttagtggtgggaactacatccctcccgcaccacttcgccccaccccaccccgattctggacaggttctgtaattgcttggcctgcctaagtgacactgtgccagtttatggcctcaggccttacgggaccagcggcttccacttcctgctctgggaatctggactctcggaacccaaatgccatactgcgaggaagcttcagcagccccagagacacatgtgggaaggagttagggtccctggtcagcagcctctgccgacagtcagcattttggagctaactaggaagtggatcctccagctccattcaagacttccttgttggaaatacatggaacaagaacagccgtctgctcagagttctccccaaaatgcagattaatgagcaaactagatgtttgttgctatgtgaagccactgagttttgggatggtttttttgtttggtttggtttggttttttgagacggagtctcactgtcgcccaggctggagtgcagtggcgcaacctcggctcactgcaacctccgcctcccggattcacgccattctcctgcctcagcctcctgagtagctgggactacaggcgcccaccaccacgcccggctaattttttgtatttttagtagagacggggtttcaccgtgttacccagcatggtctcgatctcctgaccttgtgatccgcccgcctcggcctcctaaagtgctggaattacaggcgtgagccaccgcgcccggccgggatggttttctacacaacactaggtaaccagaacaaggaccgagttgtgggctttctgactctcagccagtgtttctttcactctattttgctggagctcagtggttccctgtgagtctcctggtcactcagtagtctcagcgctctgtgaggttggacatgctggtaaatcaccctgcataaggacggctggatgactcaatgtcttcagcagaagtcaccaaacctaatgatcatgagaatccctggggtgtgaagtaagaggtgtcctctactcaacgaattctctgactcatctattaattcaattttgacactaactgcctggagtgagtgtcaggcaacacagggttaaggtctcagacccacaagactgctctcacttcaggagccagtcacaagtatcaagcccccaaagttaccaaattggccacaaacttgggggttctcatagcttctcctggcccaagttttgataatttgttagaacaattcacagaactcagaaaaatgctatatttactattgaagttgattataaaggatacaaatgaacagctaggtgaaaaggtacatagcacaaggtttgggagggtcccaagtgcaagagcctttggggatgtgtttgccagtttggaagctctctgagccccatcttttagggtgtttttttttttaatggagattctgttacaagggcataattgattaaattattggccatttgtaatttgactcaatttccagctccactcccctcccgagaggttcaagagtggaactgtgtagctcaaagtttcaaccctccactcacatggctgatccccctggaacccatgagaagctatctcaggcccaccctgagtcacctcattagtatagactcagatatgtttgaaaagagcttgttatgaataacgagacatccctaacacttctaacagtcagaaaattccaagggtattagaagctcagtgccagaaatgggggacaaggaccaaataagcctttttattttactacagaggattaagtatgtagattcttgggacctattccaactgtatattgaattaaaattcttaggaataagactcagacatctctttttttctttctttttttttttttttcctgctggtttgttgatcttggacattcctagtttctaaagcatccccagtgattctgatgaccagctagctttgaaaattactgatcatgaatcatttgtgaggaatttggagaaacatcccagcatcacctacatgcacagattattctaaactagacattactggatttttccacttatgttaagattcttgggcaggatgagttttttctacttcttggttaagccaacctgaggcctccaggttctctccagacctgtgcttcaacttggtgttggcctgggatcctcaatatagatgtctctgatgcccctgggccaggctaatgtgagttattaatgttgtttgccaactatttatagctcttctctcttctgggcacatggcagaattgcactttcttgcatcctttgattaagtgggcccatatacctagctctggccaatgatcagaagtgatgtgtgtcacttctgggccagaacattttattaccagtgcaagatcctccagaattctctgtctttctatctgcatggtgggagtggcaactttctgaatggcagttgctctgttagtatgagttcctgagtgactgtgatgtacaggacctccttgctgacttacgatggacgtgtagtattagcaataaagagatttttattgtttgaagccactgagatttgggggatgtttgttatggtagcatagtctagtctagcctgattgatctaggcagagattgtaggcttatccctctgaagctttctcattcttttgtggctttgggattaggatcatgcctcttaaccaatttgggtttttttttttctacttcaaagacttattaatgacaaaagtctctccttattaatgcaggaattagcactctttcacccagtaaacttgtcaggggcctgtcagtattctcagaacaaccagtaactgttgagaaaatgatgctatcagttgaatggtagtggcttttgtttgcttatcatgtgcaactcataattatgaatgccgggacataaactaacaaagaaaattctagttaacagtgtttaaaatacttcatagagtattgtctttttaaagggctgtcttacagacatgcttcacaatttttctgaaaagccagtggtgtgagataatctgtctgtcagtgaaattagtgtcgttttcctaccctcagcaaaggtgatatttattaaaactgttttttagagattatttttctctcttactttagtacagaagtcaagacccctggtaatcaaagagaggaagcactgcgttacctcctgagtcagcacatagatggggctgcgtctatgcagctgtgacttgtcattgattgccattcttttccttgggggaagaacataaacttttttatggctgctttctttcatcttttatgcaaaaatagccaccaatgcttcttgtgttggtatcctgggtgatgagttttctttattcagtttataggtaattatctccctattagatcaatcatttaattttatttctacatatagaagtttttaccttttgtacaagtaatatgtgtatacattctgtttataaataattcaagtactgcaaataatgctgaaatccccgtttgccacttctcattttcctctccagggtgaattatatgtgtgtatcccttcgaatttttacatacatatttacatgcacatgtgtacttgtgaaattataatatttttatgttttaatttttcacacaaatggaatttattgtatgtactgttctaaaatggctttattcacttaacatatcttagagagttttccatattggtataaatggagaaaactcattctgtctgtttattttctataatatgcatgtgccatattatttaataattaccctactcacagacactaaggttatttctaagattttattattacaataatgtggccacaaatgtttttatacacatgactctgtacagatgtgaatgtttctctagaattgatacagagcaatgaaatggctttgtcaaagaatctaaaactttaattttagcagatatttcccaatctccctccaaattgtctgaatcattatgtaacaactatttccccttatttttgccatcattttatattaagaaacatttaactcaaaggtaaaaatatttcatttcaattttcatttcttcaattagtagagaggttaaactgtttctatatttttatttctattaattatttctttagaaaatttgtctattttcgtattgcattgtttgtctcctcctcattctcctcctctgtctccttcttcttaacttaaataacagacttttatttctcactgttctggaggctgggatgtttgagattagagtgccagcatggctgggttctgatgagggctgtcttcctgatttgcagatggctgtcctctaactgtattctaacatggtggggacagctttttccttttgacttattggaattctttttatatcctgcatactattcctttcatattcattgcaaatattttctctgaatatgtctcctttaactttgtcttgtggttgttttttctgctcagcttattacctctgttttccattagtcagattcatctattcattgagtttgagagtgcctctttttaatggtgctagcttttctcacatgtttaatgatttgtgattgcaagtgattctttgtatttgttttttcctgttaattgctattcattcattatgtactcacaagtgtacataggatagggtgagaggcaggagagagaggcattccgtgatgctgcacttatactttgtgtgtgtagtgagcctagggaagggccaatgactgccagctatgttactttgatagttagactgcttctctgtccaaatgcacatactcattgctcatctctaagggcaaacagctctgttgcctaattgccttgggcaactgacaaccctgcaagtatgagaaggaagggtgggaaggtgggaagttggaaggagaggaagattccatatacctggtggctctttctgcgggaccttaaataataagcctgttagtgattccagtataccgtcgtcctgtgagtaactgctccttcctggtagggtatgcccggtagagttatctcaccttttttatttgccctctcctgtgtgcatgttgcttgtggttttcttcttcagtctaattctatacacgttctatgttttagtgattttttttcccgatttttggtccactgagggtacatcttattttccagagtaagttatcctttctaagaatttggggtgaagaaagaggttgccacatgtgatctgtcagccatcttgaaccagaagctcagaagtcatcctacctgatttatattgcactattcagtcagatacttctgaaatattaaacacttctcttggacaagaaagaacagaaggagactggagggtttgcctcattaatgtaaatattctcatccaggcctagttctcatcagtccatctaggctggactgattatttaattaagctaaagagggtaaataaaaggaggaaaaccagacaaagtaaaaaaaaatccatcttcaaatttatctctgactgtattttctactggaatttccctaaagcccccatcctggcttgcttataagctgcttttatctattttgtgtctgaatataatttgcatattcatgtctgagtcaattttcaagttgcaacacttccacggccttcattcactgatgattcgtctgggaacaaaactgtcctttaacaaacctggctgttaagtggaaacaaacaagtcataaatcacacagagcaggtttggcttgtggcttatggctcaggggcagtatttttgtaagttgctcatgcccatgacaaatatgtgcccttgcaacttctccttgaccagaccttgctgcatgggggtagggtaaatcctgctcgtggctatgggccttggcgagcagtccttaatttctcctttgtcttttacttactatgagggggtccaaggcctctattttctgatcctgcctatgagaatgggaaaggatcaaaaatatttactgtatatctcagtcaatgtgttatttgatcctggggtaatttctagtgggctccccttctccctgataatatatacaataccttggaaaaacttagtttacatgccacaggtgagccacaccaattaaaagaactggcatctacatttatatcaacaaagaatatgagcgaccccaacttccattgatcttctattcacgaattttctcctgtgaatgtttatatctgttttctcacatggttagataaggtaagcaagactgaatttttttcaggactatactttcatcagtgctagcttaaggaatacttcaataacttgaagcagaaaatagaagtttattttatttaatgtagtcagaggaggtttacttaactttgttctcagatcaatgattttggaaaatgaatatgccctgagagaccccatccatcaggctcccaatgactcaaagaattgtatatctttaatgatgtgaaaaaacatctgaacacattaaccttgaaattatgagggaaaagtaaagaagatctgtaatttttttttcagcaccgagatggaatagaaagacctgtaatttattgaatgaagttgagtatttagattcaaactgggcatatttttctttatcaaactgccctgagttcattggaaatacagatttgtggaaattgtagatatttcctggaaatgaagtcattgtaaaagagcatcccagaatttttaaaaagatgtatatgaatcattctttaattttgtgtagctgcttttggaatagaaacctcaggatattcagaactgctaaacattagcttgagcagcgtggatgtttgcattataagtacttcgtatgcactctactataaagacacatgcacacatacgtttattgcagcactgttcacaatagcaaagagttggaaccaacccatatgcccatcaatggtagactggataaagaaaatgtggcacacatacaacatggaatactatgcagccataaaaaaggatgagttcatgtcctttgtaggtacatggatgaagttggaaaccttcattctcagcagactaacacaggaacagaaaaccaaacactccatgttctcactcacaagtgggagttgaacaatgagaacacgtggacacagggaggggaacatcacgggcctgtcagggtgtggggagctaggggagggatagcattagaagaaatgcctaatgtagatgatgggttgatgggtgcagcaaaccaccatggcacatgtatacctatgtcacaaacctgcacattctgcacatgtatcccagaacttaaagtatgtatagatatatacctatggatatctatatctatatatatgtgtatatatatatatagaagtactttgtatgcaccaagagcatatatatatatatatatatatatatgtactttgtaggcaccaagagcttcacatacctgaagttttgggacaaggatatacatactagactaaattgcgaatatattccatagttttgataatgactcagcttgttgataccagttctataattaacaacaccgaaggtgaattgagactggtaccaggcctatgaatgttttgtagaaacaacatttattaaaaaaatgtgctttgatctgctttggtattggagctaacaaatttatgtttctagctagcacacagaccctcagtaaaacttatgaacagtacacacacacatatgacatatgatccatcactggaaaaatgaaatgcccaactggatagggtgtctttgaaaggtttatgactcatggctaatctctgcagccatattaggatttctaaatacccaggaccattatggaagatgggcacaggtcctgttatcatttggccataccaccttttccctatctaaataagataatgctctttcatctgtgcatgaggttctgttttcatcagcgttctctaaggaaccctcatggggagggaatgactagctcattcaagtaaagtctcttctggatacagttgcaatccttgcatactttgtgttctgttttgcctgtgacattacagctctctgacttgaattttctctgctctgtctttgaccattacatgaagcatttttgctaatgagacgtaaatctttatgctggataaatgccatctgccactatatacttttcaggttggattactgccacacttcttttagaatatttgtctgcactaagatataattttggtttattgtccaaagtctggaacagattctaatccttctccctctggtttgttttccatctttgtgtgtagtacacttatctctcattgagatatctttggcatgctcctctatcttgcctcttaagtcattgtgactgcttagaagcaccaagagtttctttccaggactaatagatttagctatatcctatgttcttaaaaaaatccttccgagttattttgtgttgtgcaatcttatggctttcattctcagccttttaacatcgtatagttagtcaaagtctgggggagagaggatagattttgacctctaactatttacacgatgaaactagctcaaatccttttatggatttttttttggattatcaaagtaatatatgcttgttagagaaaactataaaatagagaaaaagaaaaaagagaaacaaaacaaaatccagagaaaatacatattgtttttgagtatcttttttttttttttttttgaggcagaatctcgctgtgtggccaggctggagtgcagtggcgcgatctcagctcactgcaacctctgcctcctgggttccagagattctcctgcctcagcctcccaaatagctgagactacaggcgtgtgccactaatttttgtatttttagtagagatggggtttcaccatgttggccaggacagtcttgatctcttgacctcgtgatttaagtagtacagaaatttgggctacattcatatttgtattctgcttttaaatttcatattatatcataagcatttcctcatgttaataccagcttcacaaacatctgtaatggctttaagacatttaatcatagaaatgtaccatgatataagtactcatatatagttgaacattttgcttccaaatttttactagtgtacaacatctttgtatgtatggctttttaaaatgtttcaaaaattagttttttaagttggtgatttgttgactagaacttgactagaaacttcagaagtatcatcaacataaagttaaaatatttaaaagagaaaaacagaaaaatctgaataaatatattacataatcatggcacatttatcaaaactaagaaactgacattggtaccatacactgactacagtatagatttttttcagatttccacagtttttccctcatatcattttcttctttcctaggatgcaatccaggataccatattgcatttaagattcaacttttagaggctggtgacaaatagattattcagaaacgctgctgaagtgtacattttctgggtttttgcatagctaacaatgtgtttctcataccttgtaaatggcagccattttgtgggtggattcttgagtcacaattttccctctgtgttacgtttttaaatattttaacatcatgatcattttccttaaacatttctttttattcggtctaatcattctgagtcccttggattttttctttatgattcagttcctcatataatctggctcctcctgtgatatttgaaaccttcacaaatctgcttgtgcctggcggaacctcactggttgtttgttgctgagacctggactcaacactctggaagtctcactaatacagagtacttgagaattcccgctacctattcaatacttggcttctgtcatcaacacttggatttatgacacaactcatgactatagtacctccttagcagctgtatttctctattgactcacactgattagtgaagaaaccttagaatttacaatggtttgtggctctccaaagctcaatcttactcaaccaaatcttattccttggtatttaatttctctcagggagagagtaaattaaattaaaatgttctctttaggggaggtgacaatgaaagttatacagttactgtcttccacagaatacaggttatcttaatctgacagtataattttaattctacgaaggcttaaatgtttatgtatctttattatgaattgatctaaaccatcaataaaaaataaacatgttaaacgaagcagcaccttggttttaaacaccttggccacccttaagactgacatagtggtaatagctttgtatgattattcacagactgaaagattcctcctcataaacaacaatatcattcttagtataaaaatgtgatataatgagagatcggctaaggtctgcctgatttgaaaattcacacacttaaccacttgaatagtatctctcattcatatttctattcccacattcactaatatgttctaggctccatctaattggcatataattactgggattcactttttcctatttgaaaatttggttattttatcaatctctactttttctcgggaattactgcctacttccttaatcacattctgcaagttccttcagcaaactggcatggtatagatttgggcctgggaattaacttcacttaattgatatcagcttaccactgccagcacaattatagttagaacttagtatagaaagagtttgggaaccatccagattaggtaattaaatcccttgggagactgagcatttactggagaaataaacccctccttactaatcctgactcccagggaattc

SEQ ID NO: 1481 - DNA, 1083 bp, Homo sapiens
ctcaagatgaggaggtgcgcggggccggggcggagcagtcgcgttccccgcgtgtgagcccccacccatccctggcgccagcgcttccccgaccactcgggttcggctatgcgggagccgtgaggaggaggcttgcagtcgtggacctgagacctcgggaggtcatgctgtcttgcttttaagtggcttggggaaagtgaagaaaccccaaaatggaggactttgctaccaggacctacggcaccagtggcctggacaacagacctctgtttggggagacgtccgccaaggatcgaatcatcaatttagttgttggcagcttaacatccttattgattctagtaacgctgataagtgcttttgttttccctcaactacctccaaaaccgttgaatatattctttgctgtctgcatctctttgagtagtattactgcctgcatacttatctactggtatcgacaaggagacttagaaccgaaatttagaaagctaatttactatatcatattttctatcatcatgttgtgtatatgtgcaaacctgtacttccatgatgtgggaaggtgaggctgccaaggagaagtacttaccaggactcttcaaaatgatacattaggacagtgagtaatttttggataaggtatgctgaagaatctcctgcagaagtctgatacatgattttcatgttaattgtaaatgttaattccctcttgcaagggagacatatcctagatcactttgctttttctttaaggagctgatgttgcacctaaacattccaacccttaaagctaaaacagcacaaaaaaatttcacttttgaaatgaaatttttataattgtatggcaaaaggctatgtaaaaacaaatcttgcatcttaagacaaatattcttttatttctgttaaactgaatatacaattgttccctaggcaaccaacttttgcttataactacaatttaatttcacgttgacaaaacacagtgaaaagacaactttgtgaagatctaattacaataataaataaaataatttatacaaaaaaaaaaaaaaaaaaaaaaaaaaaaaaaaaaaaaaaaaa

SEQ ID NO: 1482 - DNA, 497 bp, Homo sapiens
tttttttttttttctttcccttctctcttcctccacctctccatggtcgtctcactatttcctaagagatgtgaggttttgacagaagtgccaggaagccagaggtgtgtgagtagtgggccaatctcacgtgaaggctgtgggacggggcaggagaggggcagccagcatttcctgagcgccagctaatggcggggacctggcacctttgctctgtgactctccagctgtatggtgacatgaggctggcgttttctttggtttcatacgtgaggaagctgaggcttggtgatgtcctgtgcatggctcggactccagagctactcagaggcagaggccgtctgtaaacaccttcaggtggttggaggcagggtgctgcagccaatgctgatcactcacaagccaaggctttattgttaggggtaaataaaataacatatgccctagcatttatacagcacgggggctttttaggaaatagtgagacgaccatggag

SEQ ID NO: 1483 - DNA, 2272 bp, Homo sapiens
gcgggcggctgtgagcggcgctcggggcgcgctaggcggggagccgagccgggctggcggcaggcggacggggcgggcgcgtgcggcgcgagccgggcgctgaggacaagggccgctggtagggccggccggccggcgggcggagcgccgccgccgacgcacacgaggtgaccaggcattgatgcacccccaggaaggccacgcgctcaggaggcccccccgccccgctggctgctgctcacatggtgtctgggcccttggcactctgttcatgcgggagatggcaggggctggcacatgacagtggagcagaaatttggcctgttttctgctgagataaaggaagcagaccccctggctgcctcggaagcaagtcaacccaaaccctgtccccccgaagtgaccccccactacatctggatcgacttcctggtgcagcggtttgagatcgccaagtactgcagctctgaccaagtggagatcttctccagcctgctgcagcgctccatgtccctgaacatcggcagggccaaggggagcatgaaccggcacgtggcggccatcgggccccgcttcaagctgctgaccctggggctgtccctcctgcatgccgatgtggttccaaatgcaaccatccgcaatgtgcttcgcgagaagatctactccactgcctttgactacttcagctgtcccccaaagtttcctactcaaggagagaagcggctgcgtgaagacataagcatcatgattaaattttggaccgccatgttctcagataagaagtacctgaccgccagccagcttgttcccccagctgacatcggcgacctcctggagcagttagtagaggagaacacaggctccttgtcgggcccagcgaaggacttttaccagcgggagtttgatttctttaacaagatcaccaacgtgtcggctgtcatcaagccctaccctaaaggcgacgagagaaagaaggcttgtctgtcggccctgtctgaagtgacggtgcagccaggctgctccctgcccagcaaccccgaagccattgtgctggacgtcgactacaagtctgggaccccgatgcagagtgctgcaaaagccccatatctggccaagttcaaggtgaagcgatgtggagttagtgaacttgaaaaagaaggtctgcggtgccgctcagactctgaggatgagtgcagcacgcaggaggccgacggccagaagatctcctggcaggcagccatcttcaaactgggagacgactgccggcaggacatgctggccctgcagatcatcgacctcttcaagaacatcttccagctggtcggcctggacctctttgtttttccctaccgcgtggtggccactgcccctgggtgcggggtgatcgagtgcatccccgactgcacctcccgggaccagctgggccgccagacagacttcggcatgtacgactacttcacacgccagtacggggatgagtccactctggccttccagcaggcccgctacaacttcatccgaagcatggccgcctacagcctcctgctgttcctgctgcagatcaaggacagacacaacggcaacattatgctggacaagaagggccatatcatccacatcgactttggcttcatgtttgaaagctcgccgggcggcaatctcggctgggaacccgacatcaagctgacggatgagatggtgatgatcatggggggcaagatggaggccacacccttcaagtggttcatggagatgtgtgtccaggctacctggctgtgcggcacaggtttagccccaacatgactgagcgcgaggctgcaaatttcatcatgaaggtcatccagagctgcttcctcagcaacaggagccggacctacaacatgatccagtactatcagaatgacatcccctactgaggaggggaccttcgagggcctctgccccatgtgcccttgaagctgccccacaatcatggagccctgcgacctacccgccctgccgccacatgcagtggaggagaggcctgtggcccgaagagcctggtagcgcctcctggggcagcacgtgggtggcgcaggcttagtaacgccgtggactgcagcgacaatcagtggatggtgctgtctatgcacaggtgtgagtcctctgtttgcactggacatattccctacctgttttatttcataggtacatgaagtattgtgtataaaaaaagagataagatttaaccaacatcaacaaaataaaaacccaaaatagtgctgtgttggaa

SEQ ID NO: 1484 - DNA, 3681 bp, Homo sapiens
gccgtaaagcgctccgaggcggagccgccgccgcgcggccggggcttctcactctgacgggcccgcgcgcacgatggccggcgccgcgccgcgggtccgctacctggcgggcttctgctgccctctcgggggcctggcggcgggcaagccccgcgtgctgtgccatgaggcagaggtcttcctgtccaccgggagcgagctcgtctacgtgtacgaccaggagggcgggctgctgaccgcggcgttccggttccccgaccaggtgtggcacctggagctgctggcgccgcgcaggttgctgtacgcgctgtgcgcccggaggggcctctactgcctgtcgctggaccacccgggcaggagcaggtctacgagccaggatgacagggacagcgaggacggtgaccagccttcccccgtgatccctgtggaccccgatgcctgcatccttcccgatgctgcgctgtgcgcgttcaccttgctggacagtgtgctggtcaccctggtgcagggccctgcccgatggaagatgcagctgtttgagcagccctgtcctggggaggacccccggccaggaggccagatcggtgaggtggagctgtcctcctacacgcccccagccggggtcccaggaaagcctgcagccccccacttccttccagtgctgtgctctgtgtcaccatcaggctccagggtcccgcacgacctcctcgggggctccgggggcttcacgctggaggacgccctcttcgggctcctctttggagctgatgccaccctcctgcagtcacctgtggtcctctgtggtctccctgatggccagctctgctgtgtgatcctgaaggccctggtcacctccaggtcagcccctggtgacccaaatgcccttgtcaagatcctccatcacctggaggagcccgtcatcttcataggggccttgaagacagagccacaggctgcagaagctgcagagaattttctgcctgacgaggatgtgcactgtgactgcctggtggcctttggtcaccacggccggatgctggccatcaaggccagctgggatgagtccgggaagctggtgcccgagctgcgggagtactgcctcccaggccctgtgctctgcgctgcctgtggcgggggtggccgcgtgtaccacagcaccccttctgacctctgtgtggtggatctgtctcggggaagcaccccgctgggccctgagcagcccgaagaaggcccgggaggcctgccccccatgctgtgcccagccagcctgaacatctgcagtgtcgtctcgctgtccgcgtctcccaggacgcatgaaggtggcaccaagctcctggccctgtccgccaaaggccgcctgatgacctgcagcctggacctggactctgagatgcctggcccagccaggatgaccacagagagtgcaggtcagaaaataaaggagctgctgtctggaattggcaacatctctgagagagtgtcttttctaaagaaggcggttgaccagcggaacaaggcactgacaagcctcaacgaggccatgaacgtgagctgtgcactgctgtcaagcggcacgggccccagacccatctcctgcaccaccagcaccacctggagccgcctgcagacacaggatgtgctcatggccacctgcgtgctagagaacagcagcagcttcagcctggaccaggggtggaccctgtgcatccaggtgctcaccagctcctgtgctctcgacctggactcggcctgctccgccatcacctacaccatccccgtggaccagctcggccccggtgctcggcgggaggtgacgctacccctgggccctggtgagaacggcgggctcgacctgcccgtgaccgtgtcctgcacgctgttctacagtctcagggaggtggtgggcggggcccttgccccctcagactctgaggacccctttctggatgagtgcccctccgacgtcctgcccgagcaagagggtgtttgcctgcccctgagcaggcacacagtggacatgctgcagtgtctgcgcttccctggcctggccccgccacacacacgggccccctccccactcggccccacccgagaccctgtggccacttttctggaaacttgtcgggagcctggcagccagccagcaggacccgcctccctgcgggccgagtacctgcccccatctgtggcttccatcaaggtgtcggcggagctgctcagagctgccttgaaggacggccactcaggcgtgcccctgtgctgtgccaccctgcagtggctccttgctgagaatgctgctgtggacgtcgtgagggcccgagcactatcttccatccagggagtggcccctgatggcgccaacgttcacctcatcgtccgagaggtggccatgactgacctgtgcccagcagggcccatccaggccgtggagattcaagtggaaagctcctctctggccgacatttgcagggcgcaccatgccgttgtcgggcgcatgcagacgatggtgacagagcaggccacccagggctccagcgctcctgatctccgtgtgcagtacctccgccagatccacgccaaccacgagacactgctgcgggaggtgcagaccctgcgcgaccggctctgcacggaggatgaggccagctcctgtgccaccgcccagaggctgctacaggtgtaccggcagctgcgccaccccagcctcatcctgctgtgaccaggcgggcctgcccctgggctctggccacgcttccagcctctgtcacagcccccccaggcctcatgggttagagggaaaccgagctggcctggccagagccgtcagggaaggtaggacctggccacgtaggagcagaacgctcatgaaagtgcttggaggccgtggagcacaaagcagattctgattgggagcaaccgaggcgggctctgaacctggccggtccagcttcgcgtcctctgctggtgtctctccttctctgaccgcggccgcagcccctgcactcgccttcctcactgctgggcagccttcccaccaccgcagcagcccctgaggccaggaggcagtgcagggcattctggacccggagggccagagaaacaggatttctggggtttggacttggggtgagtttgtaactgttgctgccacaccaccaggagcaccggctgcccctctgggtggcactaccaggtgccccacggtacccttgtcacactgttcacacctgcccggctgcccactctgggaccccgaggtaggagggtgctccctgagaccaaagcacaaaacagcatgcagggagctcctgcaagtgcccgtggtctcgtgccacaccaaggaagggccagcgggtggcctgtggccggaatgctcaacaactaggtgcctccagccggggcagtacccagcactgtgcactattttcagggccactcagggtggcgctgtggcccgggggggggccctgagccccagcccccagcctcctccctcagcctgggctacggcccacctcctggtgctggtgttttcatctggggagggtgctcgcgccgctcccgctgcaggcactgtccgcgatgagtgcgggtaggagccgtgaggtgcttctctgctgtgacaaacgaccctgtctgtccgtgaaccttcaaaaaaaaaaaaaaaaaaaaaaaaaaaaa

SEQ ID NO: 1485 - DNA, 1827 bp, Homo sapiens
ggctgttgctgtctccggctccttcgctaacgattgcaggagaaataatgaggatgtaattattacagccctgcgcggagggctggggggcggcggacgcgggctcctctgcctgcgcgcccaggtggggctgggctgggctgggctgggctgggctggactggacgcctctccccgcccggccctccctcagcgcgcggcgtgtgcggtgcccgaggcttcggagcaggctggacctgggaacccggggaggggcctggaggagagatagctgggcgaggtgggcgccggcgagaaggcggagcccccggacagcgtaggttcgcaggtggagagcggacgcgggggcgagggtgcgcggcgggtctgcgatgcgcgtcggaaactcgcggcccccggtcccggccctgcgcgcttggagcccgggtccttccagcccctgcgcgacgccgccgccgccgccgccggtgaatggcgatcccggccacggcctggaattggaaattcgtgacttgtcggcggccccggtcttctatcgattaaagataaagcgatcagcagtgaatttatccttcgtgtggatgaactcggccagcccgggctgtggggggtttgggaactgtaaatattctccaaagcgccgccgcttctcccgtcttcccggactcgaggctggaggcagctccggcgacgcgaaggggggtaccccccggagaggtcgggcctggggcgcggcggacagagacccggtcccagagcctggcggagcccgacaatccgccctgtcaggaggaatctcatcaacagcccgtgaattaattgtccttgcagttgggaaataacccggtacctcggcgtagcccgagggagtccaggaggctctccaaggagccttcccccgggtcgcgaagctgcgctaaaccccggccccagcgcaccttggaaggcgcattttggcctgaggtgaacgcaccttacaccattttcattttacttccttttctctgagaaaggtaatagataaccaaggccaaaaatggcgaaatgatgaaaaaatggtaattcttggcaggtcaagttgttactctgggtttaaaaaaatgtcattaatcaggattttccagtagccaaattgtcttgtgccggcagctgggtgactcacagatttggctccaatagtaattgtagagtgtgcgtaccatttccttctggatggtgtgactttttcattgcttggaagagaacacattagaatattttatcccctacatctggcagcatgtggagcaggctgtaggcaatactctgtccaagcacatctgggcggggaggccgtggagggaccgaggtgacacagagccggccctgtcctcggttctgtctcgggtcacctgaggcatcttcaccgcggcagctcgggcgcgtgggatctgctctcagtgatgacctgggacgcatcctgcctctgtgcgccattcctgccccttcactgtcactccttggtgatcgcccgtgttcttgggtaagcagtggagaggcacagaatggcttcctctgttgatctaccgcgtcaaatctgtatattataatttcaggttaaagggtaagagttgtaagcaaaatgagtactacgtcaaataattcaaaggaacgaagtaattaaaagtaaagctttctcagcacgaagatgttttctcagataagcattctaagtcaacttttcatagtattcaatgtctatttgttattcttcgaaagaactttgcacttatgattgtccaaagtggtacagcttgagacagaaataaacatgtatttatttaccaa

SEQ ID NO: 1486 - DNA, 2760 bp, Homo sapiens
ttcatattaaaaaaatagctggtaaatctttctaggtagtaacttatccaaacaatactttgagtatcatattttgtgaatgacttgcttaaactgggaaactgaatattctttttaaatcatataattcctgtattaaatgtgaaacacacagtctccaaagtcacctgattctctgtggaaaatgaaaggcattgaaggaaaccagatacattaatacttagttttggttgaaagtgcaacattactgtacttagaaggggcttggtttatttttagatatttaagctatcattaattttagaccaatggctaataataagagagatttttggttgctcatttatggagagacaaagaacagcatggcataaacaaacatcccagaaataaatgaaaagttttaagtgataaaattgtgttttctatgaaccagtgttgtacatgaaccaacattgtgtttcttagctctgacctgtacagtgaggtacctgtcaggacccctagtcttggcactggaaatgacaaagttctcctattactaaattctcatgccttccttttctgacttagtagattgaaattggtaggtactaatgatttatgtttgataaacttaagttctgctgatatcctgttactggtaattctggtaccaaaatttcaaacggtttgattattagtagcattttgagtacctaggtgcatataatacagttagcagacccttacagagtcaaaagagattttggaatctggtgatactgttgtttattacactagcctattacattttctttctttataataactgtttatgtgagtttcattgaaaatcgtggctctattgctttattcatggtttccacaactctttttgtaacaccttaattttctctcttaggtattttcctgttaaataagatatcaaaagcatcaatcacaagacagagaaaacgtattaggaaaaacttgtattagtatattctaaactgaaatggaaaaactcattattcatattttaataaataaaactcccaaatgatcttgctaaattatcccactatttagaagtagaaaataagagaagagtgctttcaaggaaatttgtcatattctcccttctatctagaagttgacaatgaattgcaataaaactaagaaataactgaatgctgaaaaataccatgaattaatgttatggcttctttatttttgtatatccattcccacaaaattgaatttaagattattaatgaaaattctatattaagtaataatgcttgtattagtaatgggcaaagaagtctttctttgttacattaaccgttagtaaaagatgtactttgacatttctgatgtaaaacctatatgtaaatattgtaatttaaatatgattggacagctgttaagttttggggagggaagcagatgccagcgttctctgctgaaaagacaagatggcgcttgacggaccacagcagatggagctggaggaggaaaaggcaggcagtggactctgccagtattatctgtccaagattgaagaactccagggtcaactgcaatataaattggatgggggaaagccacaaggaacagttctgaactccaggtgcatttgcagctgattttgaatgataagacccaaaacctctggaggcggcaggtgcacgggaatgaactaaatgttaaagtgtgcctattacaggaggagctacagctgctgcaggaataggactcctgtgtcagggaagtagtccaggccatgggtaagaagaaagtgttggtcaaggtgcatctcaaggacaagtttgtcatagatgtggacaaaaatatcagcatcagtgatgtgacacccagttccttggtggttctaagaaatgacagctacactttgcacaagatcctacccaacaaggtggactcattggtgtcactgatgatggtgaagaaagtaccagattcagcttatgaaatgattggtagactggataggcagatcaagaagatcaaagaagtgatcgacctgcctgctaagcatcccgagctcttcaaagcactgggcattgcacagcccaagggaatgctgcttggaagagactgttggcctgggctctggctcatcatagggactgtgtacctttattcatgtctctggctctgaattggtacagaaattcattggggaatttctgtgatggcagagaaaatgctcatctgtcatcttcatggatgaaattgactcttttggctcctcagagctggagggggatgctggagggaacagtgaagtgcagcagatgatgcttcgagggtggctttgaggccaccaagagtatcacggtttatcacggctgctaatacgattgatatcctggactcggcactgctttgcccagggcacattgacagaaaaattgaattcccaacctgcaatgagtaggcctggctggtcactttgaagattcattctcagaaatgaacctgacccaggggatcaacctgagaaaaattgctgagcttatgccaggagcatcaggctgaagtgaagggcatgtgcacagaaaccggcatgtatgccctgagtagcgagtccatgtcactcagaaggactttgaggtagtccaaagtcctatctcatgccaaaggacagtgaggaaaaacatgtccatcaagaaactatggaattgagggcacatcctttgtgtgtatccctacaataaaactcagtgggacaagcaaaaaaaaaaaaaaaaa

SEQ ID NO: 1487 - DNA, 2399 bp, Homo sapiens
gggacgtgcgcgcatgcgcgctaggactccgctccgcctacgctgcaggcggagagcaaccgccaagcttggtgggagtcaaggttttcacatcctttctatgagtttcgccatctatagcttttatcaacaattgtggtttaatcaattagaaatattaaccaggagaaaatgtcaaatctaaaaatgaaagaggcggccctcatctatcttgacagaagtggaggcctccaaaagtttatagatgattgcaagtactacaatgattcaaaacaaagctatgctgtctatcgattcaaaattttaataaatccctctgatgttgttgaattagatgctgagcttggaaatcacattttacaccaacctttaaaagctgctgaagtctttcaatcagtctgttttattgctgttaagactctctcattaattggacaattgcagactgaaacgcaaattaatatagtgctgaaattaacacatttacctcccctgccaagttatggtcttgatctttgtgagtttccacttgattatacatctcagagattttatatgatgcaaggaattgtgattgcaatgacaactataaccaagtatacacaaggggcaagatttctttgttcagatgaagcatgccctctttcaaaaggatttcagtatataagagtgcatgtgcctggtgctacagaatctgcaacgataagaaatgactttttgtgtaatctatgtgcatcttcacttcaagaagacagaaaatttagagtacttggtgataaacaaatagttgaaataattgccacaaaggcacttcgtgcttttcaaggatattctaacaaccagccatttaggtttcaatcacttacaattttcctaagagatgaatcagtgaataaaatgaatataggaaatgaatataaaattattggaattccaacctgtgtaaaaacctcacaaactgctgtctgtatagaagcaaatagcataactttttgtaattcaaaagttccttcaggaattagtgacaacttcaggtgtctcctctccttaacttccagctcatgctggaagtttacagcaatacttgccaatatctttgcatcacaaattacccctcctgggacttacaatttgctcaagctctgtttgttgatgagtctagtacagacaactgaccgtaacaaggaactggaagattgcctggatattttaattataacaagtgatactctactcatagacaggcttctgaattttagcataaaccttgtcccccgtggtatacgtcatctagtctctactgaaatttttcccactctatccaggaataagtatggaactggagcagttagcattcaggctggcagtgctttgctagctaaaggtggtatctgctttataggagacttggcttcacacaaaaaagataaacttgaacagcttcaaacagttctggagagcagaagcatcacagtgtacatcccaggaaagaagtttggggaggatattgatcaacagatgacttttccagttcagtgcagtttttggtcttttgttgatgtggattcatcttcaaggagaaatgcacagaaaatcaacactctaattggtcagatggattgcagtttgattccagctaaccttgtggaggcatttggtttattgattaactgcaacgagtcatctccctgccacccatttcttcctactgtgcaacacactttgaacaaagccattaatcctgaagggctgttttatgcggcttctagacagttcacaactgaagattttgaaaagctattggcttttgcaaagaatttgaatgtagaattcagcttggaagcagaaagaatgacccatggctattatctagcaagtcgcagaatcagaacaggctctgtatgtggatcaaagctgtcagcatctgcattaaaatatctgtaggtattcaattcaagattttaaaatcagcattgagtttcaaatgatatgtttaattaaattgctaatttacctatttcacttgtttctctgcttgattgctagttggttggtttgtaaatggccttgttccaaaaggactaaaggcttcacaattccttttgttatatcatgttacatcattttaatctctaataatttttttactaaactgatttttattggatgccatatgagatatgtctgggaaaagtgcactgatttcaaatgcaaatccttgtttttaaaaatgtggctgttgggcgggcacggtggctcacacctgtaatcccagcactttgggagtccgagagggcagattgcctgaggtcaggagttcaagaccagcctgggcaacacagtaaaaccctgtctctaataaaatacagaaaaaaaaaaaaaaaaaaaaaaaaaaaaaa

SEQ ID NO: 1488 - skipped

SEQ ID NO: 1489 - DNA, 961 bp, Homo sapiens
cgcggcgcctgctctgtagagccggcggaaccgggtagcttggccaggttgtgaggaaccgcagcgcgccgcaggaccgggccgctgagcctgcagccgccccgcgccgtgacctgcgaccctagaccccgactccctttggctcagcccgcgcgccccaggcccggcccgggcggcgcgacgggaggatgagcggcgggcggcggaaggaggagccgcctcagccgcagctggccaacggggccctcaaagtctccgtctggagtaaggtgctgcggagcgacgcggcctgggaggataaggatgaatttttagatgtgatctactggttccgacagatcattgctgtggtcctgggtgtcatttggggagttttgccattacgagggttcttgggaatagcagggtcatttggatcatcttttacactgccatccattatgactgatggtgtacagctcccaagtgctccctatccagtccaaaggaccctcttgattacagcacaggaacttgatcgttggggaaccccagccccttggaacttggaagacccgtgtttcctggaccgcgaatcagtgtgttgggcatcagtgttttctgcaagggttgtgacctgaaactttttaaaaaccacccacctttggggaagcatttctgaatttatccatcaccaaccatttcttcttggataccatcaagtaacagctattatttgccaagtggagctgtcatttaatttgatgcacctctggattcagatgaaacattaaattgtcttcctcgattctccatcgggtgtagagtttttaaactatcaatggcatttcaagtcttctgaaacagcatggctgtatgtgcgtggtccatagcacagtacatgcagcatctaataagagtttccattgtagaatgttttcacatacttgaataaatcaaatctttaattgagaaaaaaaaa

SEQ ID NO: 1490 - DNA, 1141 bp, Homo sapiens
aaggatggcatctacccagctcaactcgtgaactactaggccccccaggggtccagcagggtggctggtgacaggcctgggcctctgcaactgccctgacaggaccgagaggccttgcccctccacctggtgcccaagcctcccgccccaccgtctggatcaatgtcctcaaggcccctggcccttactgagcctgcagggtcctgggccatgtgggtggtgcttctggatgtgagtctcttatttatctgcagaaggaactttggggtgcagccaggacccgtcagcacactgggaaaccgggccagcgtggggctccctgccttctggactcctgaaggtcgtggatggatggaaggcacacagcccgtgccggctgatgggacgagggtcaggcatcctgtctgtggccttctggggcaccgattctaccaggccctccagctgcgtggtctccgcagaccaggctctgtgtgggctagaggaatgtcgcccattactcctcaggcctggccctcgggcctccgtgatgggagccccccaggaggggtcagatgctggaaggggccgctttctggggagtgaggtgagacatagcggcccgggcgctgccttcactcctggagtgagtttccatttccagctggaatctgcagccacccccatttcctgttttccattcccccgttctggccgcgccccactgcccacctgaaggggtggtttccagccctccggagagtgggcttggccctaggccctccagctcagccagaaaaagcccagaaacccaggtgctggaccagggccctcagggaggggaccctgcggctagagtgggctaggccctggctttgcccgtcagatttgaacgaatgtgtgtcccttgagcccaaggagagcggcaggaggggtgggaccaggctgggaggacagagccagcagctgccatgccctcctgctccccccaccccagccctagccctttagcctttcaccctgtgctctggaaaggctaccaaatactggccaaggtcaggaggagcaaaaatgagccagcaccagcgccttggctttgtgttagcatttcctcctgaagtgttctgttggcaataaaatgcactttgactgtttgttgtca

SEQ ID NO: 1491 - DNA, 444 bp, Homo sapiens
gggaggtgggtgggaggtggtggtgggtgggaaagcatgggtgatagttccatgatactggctgagtttgcaatagcaggtggaaccctaactattgagggagtttgcagatacctcaggattcgtgacaatgcctttaaagatccaggagagatgttcagctactaggaactgctagcaagtatagcgcgaatggctccgagctcagacactctacagctgagagtagacacttgtgggaggagtctgctactagtcttatcagctcttaaaaacagaaactcatctgtccaagttcgtggcagaaaggaacgtccttgtgaagacctttatctgagccactgtacttcgttatcactgccatgcagtttacatgagctgttctgcagctcaaattccattttgtgaatgggtttttttttttaataaactgtatttaactta

SEQ ID NO: 1492 - DNA, 2099 bp, Homo sapiens
ttagtcgcactaggggtgggattcaaactactggtcaaagaccattttgtacagaaaagggaacatctccgatgggtgttaaggtaggagtttccatgcagccctttatgtctgagaaatagtctcctctgccattggggtccctgcggaatcttctacaggaattgcagctcttcacgtcatgctaggttaccagcatgggcttcccagagcacttcactctgtttctaactccactgacttttctgacttgtttcttgagggacttggaaaaggggaaggtattattcacacagatgtgtgtatgaagcctaaataacatccaactttttttccaaaaacatagtaagagtttaaccataaatagaagagtaatattcctttaaatttcttacaggcatgtaaaattttatgtgtttatagagagatgctaactgtcagcatatagtatttatattggggcaagaagggttaaatcaaatctttaatttaagtaagcatagttcctttaaagatcagtagtatttatactctgaaaagagtaccaagcttagttcagttatttattcatccattttttttctattgtttctcctctggggggaaatggtgttttgtttttgtttgagttttgtgttttagttttttggttttggttttgttttgtttttttgtcattcagattcactaaatttggggatggttttattaaagtatattaacttctttttaaccaaagctttctgaatatgaccagcctcaggtgctagcgcattaaagagcaactaaacctaattccagtgtcgatttgtgaaataataaaagctaattgaatttctctaagggtgagagagaacataatgatgaacttaaaaagaaattccctttcccagaagggattctgcatgtacctacaaacaatcatgctctaaccacagtaatagtcatgccatggtgacattgcttttacggtaaaccaagataggtaatatgatgcttcttcccaggtgtttctgaaagaaaagcagcggtggagcttaagagccaagtccactgattgacataataggatggaattgtagacagagacatgctccatgaaacaaggaaacaactgactactatttggatctaagttgggatctgatgttaaacaataaattcagtttaaaaaaatatggagctcagaaaaggatgtgaaaaactttgcattttcctttcttcattattacaaaaacacctatgtgatgacataaaatacttgggtgatatcagaacaattatccttaatagtttttataattaaagtttcctaaacttcagtctccaatagtcttttaaggattggaaccacatcactgtcagccccgctgctacaatgcctttgtacaatttttttacataaggcaaataaggcttttgtacaaagcctgaataccttctgttccaatggtgtccaaatggttattatattgtgaaaaacctggccttggtcacaatgcaaacaaaagtacagatgaaagtgctttttggacagtttgcaaattgtgttaaagctacggattttttttaaagtgttcagcatcttaacgtgtattaaagctatggatttttttttaaagtcttcagcatcctaattcaccctttctaacttaagaaaaacatgacttaagacactgcttctaagtttggttgttctttatagtgtggatacccagttatctgtgagcgtatgggggtgggctgagggtcaggtgaggaaggagtgtgtgtgtgtgtgtgtgtgtgtgtgatttgcatgtgtatgatgtgtgtgcgtcggaccgcttctaggctactaagtgtcaatggaaaagaaaatgtattcaaaatacttaaatcaaaactagaagatggggaaaaaaagatttattctatacaaagccttgtctggaccactttagagagacttctatttttttaacccttctataaatatttgatggcacttgaaatattcctgcaataaaatgtgatttgtgtaaagaaaaaaagattttgtaatgtgaaacaaagaaagaaagtaatgtaattttctaaaaaaaaaaatacaaacaaac

SEQ ID NO: 1493 - DNA, 500 bp, Homo sapiens
gagggaagagagctgcggtgtctgctgctactctccgagcttcgcaatgccgcccaaggacgacgagaagaaggacgctggaaagtcagccaagaaaaacaaagacccagtgaacaaatccgggggcaaggccaaaaagaagaagtggtccaaaggcaaagttcgggacaagctcaataacttagtcttgtttgacaaagctacctatgacaaactctgtaaggaagttcccaactataaacttataaccccagctgtggtctctgagagactgaagattcgaggctccctggccagggcagcccttcaggagctccttagtaaaggacttatcaaactggtttcaaagcacagagctcaagtaatttacaccagaaataccaagggtggagatgctccagctgctggtgaagatgcatgaataggtccaaccagctgtacatttggaaaaataaaactttattaaatcaaaaaataaaaataaaaataaaaacgtttgt

SEQ ID NO: 1494 - DNA, 2768 bp, Homo sapiens
gcggccgctccggagaggccgagcggggacgggcccgagatggcgcggggacccagcgctccggcggcgggcgccctgcacgcggcccgggcccggggacagccccggagctggtagccgcccggcaccgatggaccttgacccgcgaggcggcgccgcgctcgtgcccagctgcagctagaggggcgcgcgggcagaacgcgctccaggcccgggccggcccgcgcggccatgaagatgatgctggtgcgccggttccgcgtgctcatcctgatggtgttcctggtggcctgcgcgctgcacatcgccctggacctgctgcccaggctggagcgacgcggcgcgcggccctcgggggagcccggctgttcgtgcgcgcagcccgccgccgaggtggccgcgcccggctgggcccaggttcggggccgccccggggagcccccggccgcctcctccgccgccggcgacgcgggctggcccaacaagcacacgctccgcatcctgcaggacttcagctccgacccctcctccaacctctcgtcccactcgctggagaaactgccgcccgcggccgagccggccgagcgcgccttgcgggggcgggatcccggcgccctaagaccccacgaccccgcgcaccggccgctgctgcgagaccccggcccgcgtcggtccgagtcgccccccggccccggcggagacgcctccctcctggccaggctgttcgagcacccgctttaccgggtggcggttccgccgctcacggaggaggacgtcctgttcaatgtgaacagcgacaccaggctcagccccaaagcggcggagaacccggactggccgcatgcgggtgctgaaggtgcagaattcctctcccccggggaggcggccgtggactcctatcccaactggctcaagttccacattggtatcaaccggtacgagctgtactccagacacaacccggccatcgaggccctgctgcacgacctcagctcccagaggatcaccagcgtggccatgaagtcggggggcacgcagctgaagctcatcatgaccttccagaattacgggcaagcgctgttcaaacccatgaaacaaacgagggagcaggagacaccccctgactttttttatttctctgactacgagaggcacaatgcggagattgctgccttccacctggacaggatcctggacttccgccgggtccctcccgtggccggcaggatggtcaacatgaccaaggagatccgggacgtcacacgggacaagaagctctggaggaccttcttcatctctccagccaacaacatctgcttctacggcgagtgttcctactactgctccacggagcacgccctgtgcgggaagccagaccagatcgagggctcgctggcggccttcctgcccgacctgtccctggccaagaggaagacctggcggaacccttggcggcgttcctaccacaagcgcaagaaggccgagtgggaggtggaccctgactactgcgaggaggtgaagcagacaccgccctacgacagcagccaccgcatcctggacgtcatggacatgacgatcttcgacttcctcatgggaaacatggaccgtcaccactacgagacttttgagaagtttgggaatgaaacgttcatcatccacttagacaatggaagagggtttgggaagtattcgcacgacgagctctccatcctggtgccgctacagcagtgctgcaggatccggaagtccacctacctgcgtctgcagctcctggccaaggaggagtacaagctgagcctgctgatggccgagtctctgcggggggaccaggtggcacccgtgctgtaccagccgcacctggaggccctggaccggcggctccgcgtcgtgctaaaggccgtccgggactgcgtggagaggaacgggctccacagcgtggtggatgacgacctggacactgagcacagagccgcctcggcgaggtagtgtccgccggccgctgcgctgcccgggacagagacagaggggccggacctcccagcaagcgcatgcgcccgtcgtgaattcagtgaattcagaggcaggacgggatcatccggagtcgggagctgctgccacaggaggcgaggctccccaggtctcataggacacattttgtcagtgtttgaccagaaaagcttgggaaggaagcgctgtctgtgctcacggacagaggcggccggcgccggaggcattccatcctttctgtagggaaaggagcctttatttactattttgtatttatatttgatgaataagtatataaacagagacgtgtacacagatgccaatcacctaccaaaccaaacacgaggaccgccctccctggttctgggggcccctcaaggccaagctcacccctcaagtgctctcacactcgggacctaattcaagtaaaaaccctttctccttcctggggcctcggctcctggagggctggagggtctcgtctgaggacgggaggaggctctcgctggacgtctggcctgtgcgctggtggacggatgcctacgcggttttggaggacccgatgaccaggcgtcctgcgagtccgcccgctggcctgcagcacccacctcggacttggctgtggacggttggtgcaagtgcatcctgcagggctggctgtgcgcagctgtgggctgacctttgcagagttttgtggaatagtttgcaatgtcataaaagtgcaataaaggtacagcagatgtgaaaaaaaaaaaaaaaaa

SEQ ID NO: 1495 - DNA, 3045 bp, Homo sapiens
ggtttgcaggcggaggctacagctagggctgctcagtaactgccccaaccactaccacgtccccaagtgcaacgggacccacggaactacagggtcctgctgagctcaggagctgcacggaatggtggcagtcaccttgccagtgcagcaggcatggatcagactgcaagctaggggcacgaggcatcagttgggaagaggggacgcacagctaggcttgaggcctcttcatcgggatgtccccaggccccccagcccaggcccagcataaaggccgtgttggggggcccccctgacccaaggggggcttcatgcgccacgtgcaggcggagccgtctccatcctcagagccggaggctggcccttcacagcctccagtcaggcagggggccctccagggtggcctgctcatgggctacagcccagcagggggggcgacatcccccggggtctaccaggtatccatcttttcccctccggctggtacctctgagcctcatagggccctgaaacgacaagccccatccactgagggtccccgggagctgaagagaggccctgggctgggggccagagagggactaccccctgaagaaccatctactgtggggctcttaggcccagagggaccggggctgggactaggtgtggccagccagcatttctcccaccgtggcctctgtgttgtggaacagagaagtagtgtcacctcatcttggacttcaggggcctggagtcccccctgccccccatcaaatgcttcctgcaatactttgcacaccagagactgggcctccccagatccagggggacaggggtccctgggggagtccccagggccagcccctccaggccagctgcacacacttgacactgatttgcacagtcttgcacaaatagggggtaagagcccagtggctggggtgggcaatgggggtagcctctggcctagggagtcccctggcactgccaatgggcacagtcccgagcacacaccccctggccctggacccccaggcccctgccccaccaagcgaaggctgcttcctgctggagaagccccagatgtcagctctgaggaagaggggccagcccctcggaggcgccggggatccctgggccaccctactgctgccaacagttctgatgccaaagccacacccttctggagccacctgctgcctgggcccaaagagcctgttttggacccaacagactgcggtcccatggggcggaggctgaaaggagcccgtcgcctgaagctgagcccccttcgaagcctccggaaggggccaggcctgctgagcccccccagtgcctcccctgttcctacccctgctgtcagccgtaccctgctgggcaactttgaggaatcattgctgcgaggacgttttgcaccatctggccacattgagggcttcacagcagaaattggagctagtgggtcatactgcccccagcacgtcacgctgcctgtcactgtcacattctttgatgtttctgagcaaaatgccccggctcccttcctgggcatcgtggatctgaaccccttggggaggaagggttacagcgtgcccaaggtgggcaccgtccaagtgaccttatttaaccccaaccagactgtggtaaagatgttccttgtgacctttgacttctcggacatgcctgctgcccacatgaccttcctgcgccatcgcctctttttggtgcctgtgggtgaggagggaaatgctaaccccacccaccgcctcctctgctacttgctgcacctcaggttccggagctcccgctcaggccgcttaagcctgcatggagatatccgcctgcttttttcccgccggagcctggagctggacacagggctcccctacgaactgcaggctgtgaccgaggcccctcataatccacgttattcacctttgccctgattgccagcactctgaacccatgcgggctaatgacctgcccatcctgctccatcttagagaacatatatggagagacagcaagagacccttcaggcttgaattaaagccctcaccatgctcacgcccaaatggattatttgggtgtttaaagcttctgattcttactacaccctgccctacttcgggtactccatgtgcctgtcccctcccttgggtttcccaggccagcttaggtagtagggaggaactggagctaccctgagattttctcaagttcccaggcaagttatgccagcgttgcctccctgtcctgggcaggggccacttgttattttatttatttttaatttataatttattcaaattggattgccttggtaacctcccacacctgataattggcatcactcctccccgcttcccactctcagatattgctccaacctcaggagttgaagaggcttatgcggtgggggcaggaggagaactgctttccctcagctgagggaagaggggctattccagagggactgagtcagtagccaaagactcagcttcccctgtccttccccagtcccttcacttcccctaccctctgacctatctctgaaagccaagttatgcgtatgtgtgtgtgcacaagcttgtctttgtgtggtatgtgtgtgtgagtgtgcatgtatgcacacacacaggggttaaccacccctcacctagggctccagactccagttgtccctctcctcctacctgtgtctccttgttttggggtcctgactgaagaaggtgtccagggggcagagtcagggccaagcactggggtgcctcctctcacctggccagactctgacccacctacctcagctggggtgaggggcacccctcaaactcagtcatgtggttccaaactaccccattccccactccagactctgacccagcctcagtcctaactcctggggctgggctgaggggaacaagcatttgctgaaacttgaaaaaacaaagcaaatcaaaaacaggaaaaaattgtacctggtacttttttttagaaaaaaagattaaaaaagaaagaataaattcttgtttggaaacttgaaaaaaaaaaaaaaaaaaa

SEQ ID NO: 1496 - DNA, 7064 bp, Homo sapiens
tccccagcccgcctcagggaagcgagcccgggcgccggcgggcggccgtcgcgtctgacagaccactgcagaccacgggccgaggcccagcgcccgtccgcagcgcggccggcatggcggcgacaaggagccccacgcgggcaagggagcgggagcggtctggcgctcccgccgcaggaagtgaccaagttcactcctggatgctagctacaagccaagccttagacactgtctggagaatggcaaaaggctttgtgatgttggcagtttcatttctggtggctgccatctgctacttccggaggctacatttatattcagggcacaagctgaaatggtggattggatatctgcagagaaaattcaaaaggaacctcagtgtggaggcagaggttgatttactcagttattgtgcaagagaatggaaaggagagacaccccgtaacaagctgatgaggaaggcttatgaggagctattttggcggcatcacattaaatgtgttcgacaagtaaggagagataactatgatgctctcagatcagtgttatttcagatattcagccagggcatctcttttccatcatggatgaaagaaaaggacattgttaagcttcctgaaaaactgctgttttcacaaggttgtaattggattcagcagtacagttttggtcctgagaagtatacaggctcgaatgtgtttggaaaactacggaaatatgtggaattattgaaaacacagtggactgaatttaatggcattagagattatcacaagagaggaagtatgtgcaacacccttttttcagatgccattctggaatataaactttatgaagctttaaagttcatcatgctgtatcaagtcactgaagtttatgaacaaatgaagactaaaaaggtcattcccagtctttttagactcctgttttccagggagacatcctctgatcctttgagcttcatgatgaatcacctgaattctgtaggcgacacatgtggactagagcagattgatatgtttatacttggatactcccttgaagtaaagataaaagtgttcagactgttcaagtttaactccagagactttgaagtctgctacccagaggagcctctcagggactggccggagatctccctgctgaccgagaacgaccgccactaccacattccagtcttttaagtccgctgggggccgaacagcagtgctcaccagtgacggtggtcacagttgcaataaagtctctctctgaaaccaaagctagcatttcagcatggaaggaattaggaccttttcttcaggattacaggtacactggatgcagccatgcatggatggtttttctttatttttcagtgatttcctctgaagcagctgcactgatacatttgggagttggtggcttgactttgtccataaggggcgtggccacttcacatgatggcgggcctttaagagcacaaagaagtttaatatggacaacaacaggaaaaagcaagaagaaaacaagtagggaaaaacagctaacctggagagaaagaatttctttaacctttatgttcttcattaaaaatcttatcttggactgatttgagggatttttagaaacatggccttattttatataagcattaccttcccaggaatctttgttgtatattaatttttgataaccatttgattaactttaaaattaagtatatgtgtgtatatatacatatgtatgtttatatacacacatgtatctgtatagttttatatatacatatatacacatagacatacagagaaccactactttgtaatagtgtacagtttgttttatatctctttactttttttgttactattttatctggccagcttaatagttttatttagattttttaaaattctgtagattaaagcaaatgacagttattgaactatcacaaaactattaaactgtggtacatttaatgtgtatttaatgtgtggaatctcattatggtaggcagaataatgccctatgctccccaaagatgtctgtgtctgaatcctcagagccgtaaagggctaaatgggttaaatgggaaaggagaattaaggttgcaggtggaactgagatgctaatccaatgatgctgaaatagggagatttttctagattctccaggtggacgcagtgtaatcagaatggttcttaaaagtggaagagggaattggaagagtgtcagagtcagaggggaatgtgaaatatggaagaacggttagagagagatgcaccattgctggctttgaagatggaggaaggggccataagccagggagttgcaggcagcctgtagaattgagactggaaaggaaacagaaacttccccatagcctccagaaggaacgcagccctgccaacaccttgattttagcccagtgaagcctgtgttggacctctaatctgcagaactgtaagataatagatttgtgtttaagccactaagtttgtggtaatgtgttgtagcaacagaaaactagtattctcaggctagtttttggtcgtctttattttggaaatacttttctagtttaatttgatagttttttttttggaggtactttgctagtctgttttgagtttcagtacataagaataatttttaaaatcttgctaattatatattacttcaaagtcacaaatccctttctaagaatgacttacttcacgagatatttagcactatcattttcccagatgttcatattatttctgcaataaattaaaagggagtgtgtcaaatgctgtcatgtctgaaattagcattcatattcttttgcaatggggatgatcagtcgtgtgtactacatgaaccatgtctgatggtagcttgttcccactgtcattttgttttctggttgaagattaatgagctcagccacagaaacaagagttcttcattgacctctacagtccctgcctgtttggaaacatctatggttttgtataacccctgtcatttaactgacagtgttagaagatatccccctgatgtgttactgtaaccaagaaagcatgaacgttaccctttctggtgacagcctgccatgggctgctgtggctgatacttatagaattgttgctccaaaattttggctccacttgagctgtccagaagtgtacctgacatttgtgtattaccactcaccttggatctccttactagtgtaattatttccacatcaatccaggactgaaaggaaaaattttttcaccaggattggcagcctgtagctctgtgacctcagtcaacccatcatgttgtgttgtgggcggggggcaagaattctttagagaaccaagttgcgagaaagatttcaatccagtgaaagtaaaaagtaagaagacatttagatagttgctatattttgggaagatgtcaaaacaggtttttagggaggaggtatgaggtgttgtgttgttttgtttgtttttattcagttgtataatgaatataacaaattaagtagccagaaggagctgcatgtaaattagcaccacttttaaatgtcaacaataaatttgaggtgagcttcctgggtgatgccaacatttaaatgtctttctaaccgtatatgttttaaatggtgagagaactatagcaaaaatggaaacataatgccctcgtcgttttttgattttaggataagtttctctctcaaattttggccttacgtgtccatactgaggggttgtatgcatattagtacaaggctgacttttactgtggtaaaatacacataacatatagtttatattttaacaatttttttttttgagacggagtttcactctttttgctcaggctgcagtgcagtggcacaatctcggctcactgcaacctctacctcccaggttcaagcgattctcctgcctcagcctcccgagtagccgggattacaggtgcccaccactacgctcgactaattttttgtgtttttagtagaaacggggtttcaccatttagccaggctgatctgaactcctgaccttgggcgatccgcctacctcggcatcccaaagtgctgggattacgggtgtgagccactgcgcccggccctaacaatttttaagtgacagtgacattaagcatattcacattgttgtgcaaccctcaccaccatccaccctcagaactttttaaaatctccaagactgactttttttcaaagcaggcaactttaattccctacctggtatctggattccttttccttttcatgctatcttttcatcatacctcttctaatctgagtatttcctctgggcttaaaagagcctcagtggagaagtacaacctaagagggagttaggtacaacctaggagggagtcaggaggagagagttaggttagttagtacaacctaagagggagttaaatggatcaggaaaatcgtgttttatctccaaagtaaaatgataactatgggtggcttctgggctcaatttagaatattatcattgaaaagtccccaagaaactattaattcagagccaccctggtgagttgaatttcttgaatgtcttcatggtcttgaaccaaagtcatttccacccaagggagagtcaggtgaaagtccccagggccctctctaggggaccggagacctccagactaagctggtggaggatgggctcaacctccatgagagaagagcagccaggatcagggggcattaacgttaattttcccaggacttttctgcaaatgggtattggatggaaatatttgttctcagtcagatgagtttctcctattttagtgagaccaaagaaagacaattttaattgtgtccaagctgacttttttgaatgctctggaaatgttggaattccacatcaaagtacgtaactgttttaaactgataactaacccaatatgtgaaaatatatgcaagcatgaataaagggttgactaattccagaattagcaataattttctcttaaatagcaaatttctaaagctgtatgattctctttgcaagaatgtttttcacactgcttaataagaccagttaatgtgtaaaacagaaaaaagtatatatatatcatatgtcttttcatgcatctgaaactttaactgtctatagggttgcttgtcatagttgaacattatttaattaacttattgactatatatgggtatacttttctctatagccattcacttttttaaagttttaattatttaattgacaaattagctattcattttccttcaaatcctgtttttatcacaatgtccattttacagctagacacaaaatttagtgggtccaaattgttcaatcacttctatgttatttgttcagaatagtggatctttgcttaattcacttctgttttaatcccatcatattcctttaggccaagaaaaggaaagctgatttggattatatttatgcttaatatcaacatggtttataagtggacagaaaaacactcactcacgtattcagccacgtatggtctggagtgctctgtagaacagcccgaagtgtacaccatgtctctgcacttgaagctcatggaatgtgttggaggagactcaagctccatgtgggaacagtgtggcccaagagccagcatggaggagggctgtgtgagcagactgctatagaatgctaaagttataatcctagctggtgtctcgttctgtttaaaaaaatcaaatttctgtatgtaattgacgtattggtccttatagtcagtaccatcaggtcttagattgttaagtcattttgctgccaccagaccagtgagagtcactcacttatttgtaatgattcttgggaagtttagtcaagagaatatccttgaataaagaagtacatgttttaagtattttcatcgtagtctagatgggctgtaaaacccatttccacacgagtataaatttaaaacagaaacatcaaggtgtcagcaatcatgattttgttttgcttgttcacaagtttgaaaaggtgcatgaggcaccaatcagtgacactggaatgctttaaggatggtttgtgactttaccccattgtgccttatcatttgtcagcaaacttactgggccaaacacaaatggctgagacactcctggcccatttcttgtcatcgctgccatccccaaagacagactctgggaaacaacttgggaactgcttcaagtccatgccaggtcatggcttcgtccgcctcccagcatgtacctggacttcctttgggtgccggcttttctgctggactaagattcatggaaagaaccccagggcaaggtgaggagaagcagctggtacagactgatgacgaaggagaggaccagaaaagctgcttgggtgtggtggaagtttcagtgtaatgtgattcctagtaggcacatctgtgactcccttaaataaaaagggccagagatgaggggacgcctggtgaaaatggtgtttgttgtaacatcttggtatcattgtgggtaagtagaacaaatatttacatctgttatgaaaagctacctttagccgtagataaacattaaaaggaagactcagccccagagtatatttgatctattggttaactcatctgtcagcaaatggttaagtaagtaaaattaatttttccatttggtgtgtatttcacagggtaacaatgaagtgctccaatctgcttgtgagaccagttagattagtagttgcagttgagaccattcctcctgtatgtctttacaagcaaattgaaacgacatgctcttctttgtactatacagaaggacacaccacagatcctctttttaaagcaggtaataaagtagctttttccttttgaaacatcattgtaaaacagtgctttttaaactatccatggtaaaggatgagttttaaaaattctaatcctttgcaggttggtagttttataaatacgataaaaatatagcaccaagattagattgttataaaagtttctaaacactttcagtttctgtacttaatcttgcagtgtggtaataaagacttctacactttagtagcactaaaaaaaaaaaaaaaaaa

SEQ ID NO: 1497 - DNA, 477 bp, Homo sapiens
cttccgaagccgctgcagtcctgggccccaggctcccggaagtgctgcccggcgctccggaagcgattcatcgggccgcgagcgccctccccgtcgttttccgtgagagacgtagagctgagcgacccagcccgcgagcgaggtgagatgccggtggccgtgggtccctacggacagtcccagccaagctgcttcgaccgtgtcaaaatgggcttcgtgatgggttgcgccgtgggcatggcggccggggcgctcttcggcaccttttcctgtctcaggatcggaatgcggggtcgagagctgatgggcggcattgggaaaaccatgatgcagagtggcggcacctttggcacattcatggccattgggatgggcatccgatgctaaccatggttgccaactacatctgtcccttcccatcaatcccagcccatgtactaataaaagaaagtctttgagtaaaaaaaaaaaaaaaaa

SEQ ID NO: 1498 - DNA, 742 bp, Homo sapiens
  misc_feature (729)..(729): n is a, c, g, or t
  misc_feature (734)..(734): n is a, c, g, or t
tgagaattgttgtgtacatgatttatgaagtggcttacataatataattttggacatgaaagccctgaaaaatagcttcttattttaaggatgaacagactgggatttatttctgaaattctataattctcagtcagttgtaaggctttcattatataatagacttttttttttaaccaacggaagttggacctcttcaaaatgtgagatccaaaaaggttttggatattgtttgaataactctcttctccaaaggagactgtttttgaaaaatgattctttctgacatgttaaaattgaatatttttgacacgccaaatgcaccaaagtattatatgtcatgtttattgccgagagtagctatatagcttgtgggagacagttaacgtgaagctttcttgcatctggaagtatggggagagagaaggcttcttcacaccccctttcatgttatattctacagggaaagaatttctatcatgtagacactaggtgactcccttgtggataatttcatttaacaatgatttctgggtgttgctctatgccaggcactgttctaggagctgatgcgaaggctcagctgatgggctacagacctgaaggcctgtgctcctcagtggcactctgtaggtagatacagagccaccatctactgggtgcttctcctgagtgtgacagtgtaggctgggacacgatgctacccttcaaggagcttgaagctaaggntctgngcacagat

SEQ ID NO: 1499 - DNA, 3742 bp, Homo sapiens; identical to SEQ ID NO: 301

SEQ ID NO: 1500 - DNA, 3636 bp, Homo sapiens
attgcgtcccgctctacctctgtggttctttgggagcgacccccgggaagcgtccaaagtggagttcccacacacgctgcgaacccacagccggttttctctgaactcgcgtccctgagtccgggaggtggaggcggagaaaagggtgcggagcgaccccacgcagggccgccccccctcccaccagcgcgtcctgccgcgccggcagccacaggctggcatagcggctgccgacccgccctcgttcctccaccccctgaacgggactgctgggcccgccccgccccgcctgcaggtgaagcggccgcagccgccgagtaggtgcgtggggatgatctcactcgcgcgctccgcgccaggaggaggaggagcgggagcggatccaacttccgggtagtggagccgcaagccaccggcatcttgctttttcttccccctcctcctgtgtgccccgcgccgctccctctttcccttttattcccggccccacccgccaaaatgaacagctcggacgaagagaagcagctgcagctcattaccagtctgaaggagcaagcaataggcgaatatgaagaccttagagcagagaaccagaaaacaaaggagaagtgtgacaaaattaggcaagaacgagatgaagccgttaaaaaactggaagaatttcagaaaatttctcacatggtcatagaggaagttaatttcatgcagaaccatcttgaaatagagaagacttgtcgagaaagtgctgaagctttggcaacaaagctaaataaagaaaataaaacgttgaaaagaatcagcatgttgtacatggccaagctgggaccagatgtaataactgaagagataaacattgatgatgaagattcgactacagacacagacggtgccgccgagacttgtgtctcagtacagtgtcagaagcaaattaaagaacttcgagatcaaattgtatctgttcaggaggaaaagaagattttagccattgagctggaaaatctcaagagcaaactcgtagaagtaattgaagaagtaaataaagttaaacaagaaaagactgttttaaattcagaagttcttgaacagagaaaagtcttagaaaaatgcaatagagtgtccatgttagctgtagaagagtatgaggagatgcaagtaaacctggagctggagaaggaccttcgaaagaaagcagagtcatttgcacaagagatgttcattgagcaaaacaagctaaagagacaaagccaccttctgctgcagagctccatccctgatcagcagcttttgaaagctttagacgaaaatgcaaaactcacccagcaacttgaagaagagagaattcagcatcaacaaaaggtcaaagaattagaagagcaactagaaaatgaaacactccacaaagaaatacacaacctcaaacagcaactggagcttctagaggaagataaaaaggaattggaattgaaatatcagaattctgaagagaaagccagaaatttaaagcactctgttgatgaactccagaaacgagtgaaccagtctgagaattcagtacctccaccacctcctcctccaccaccacttccccctccacctcccaatcctatccgatccctcatgtccatgatccggaaacgatcccaccccagtggcagtggtgctaagaaagaaaaggcaactcaaccagaaacaactgaagaagtcacagatctaaagaggcaagcagttgaagagatgatggatagaattaaaaagggagttcatcttagacccgttaatcagacagccagaccgaagacaaagccagaatcttcgaaaggctgcgaaagtgcagtggatgaactaaaaggaatactggcctcccagtagcattggatgcaggaaaaaatacattgacggtgaaaaacaagccgaaccagttgtagttttagatcctgtttctacacatgaaccccaaaccaaagaccaggttgctgaaaaagatccaactcaacacaaggaggatgaaggcgaaattcaaccagaaaacaaagaagacagcattgaaaacgtgagagagacagacagctccaactgctgatccataaaccagaagcctgacatgtttggaagtccttttcaataagcacatgattagtgttgttatattggcaagggctgtagacattctgctctggtcactgtattcagaatacaggttcttttctggtgtcacttttgtaagtagcaactataaacataagtaagctgtttagcaaaacacacattcctagtaggttttggttttttgatctttataaagatgaggtttttttcctagttactgtattaagtatgacttcttttagaaggttacaaaaaaattcagatgttgatacctttttaggaaatgtgcataccactcatcaaatggaatgctgaaagtttgaggtgcttgtatataatcggataaacaaaactgatcaacccaatgtgattttaaaagcccccaaagaagcttctgttttgggtctgatcctcttgatggagaaactgcagcagcatggaaattgttgggtactgtggcatacaagttattttctacagtagactgagataaactgaaaactcaggagctggcatcaaactcgtagtcccatagtcagtgttaattacacacattgttaactattggatgaaaaatacatgctattgattgtgtccaaagcctcccgaggacctccgtggggatgctctggtagcctgaatacagaactgaggtgaaagtccaaaccttgaattttacagtagtaagttggtaaaccatgtgctctgtgctatgagttaattatgttttcccaaatactaatgtggcacaagtaccatattttatcagagttcttatgtacagtatggtgaagataagtgacaagcacacatttttcttgcttcactgctgttctatattacacaggtttgttgttgttttttttaaaaaagaaattaagcagtagttagtctctaaaaatacaatgtttcaggctaccacagtgaataaatagaaatgtaatcagggattaaaaaaaaaacttatgcagcttttcaaagttgattgtttcaaaattggtgtttatttaaaataagtggtaatgtacttgaatgcactttttatgacaatgattcagtaatggtaattttactattaaagaaagtgaaaggtttagttttgttagcatggctcagcatgtagctgtcaggtgtttttcacctaagggcaaaagaaaatgatagtaataattgcagtagttgtattgtattgtatttttgcacgtgtggtaagcataggcttgaagaggtgggtaggcaggtacatgtacttcctaaatttggagataattatctttctgtaagttcgttatgcttgactgtttccatgttctcccaataatgattttatagttacttatcactttactcatggagaattaaaacgtaatgtttttcaactgtatctttctttaactggataatactgctatatgatatgcttactacagactgcattaattcacgaaacgaattctgttatgctgtaatttgaactctcctcaccacaacttattaaaaaggcaccaatagtttcccattaaaaaaaaa

SEQ ID NO: 1501 - DNA, 816 bp, Homo sapiens
cttcccgtcacggcgttgccccagcaaccggactattgggacgctgcggcctggccttcaggccactggctaccgaaccccggggctcttcaccagtccagctcgtttccagcaccatgtcggtgcggacgctaccgctgctcttcttgaacttgggcggggagatgctttacatcctcgaccaacggctgcgggcccagaacatcccgggagacaaggcccgcaaagttctgaatgacatcatctccaccatgttcaatagaaagtttatggaggaattattcaagcctcaagagctctactccaagaaggccctgaggactgtctatgagcgcctggctcatgcctccattatgaaactgaaccaggccagcatggataagctctatgacctgatgaccatggctttcaaatatcaagtattgctgtgtccccgacccaaggatgtgctgctggtcactttcaatcacttggataccatcaagggattcatccgagactccccaaccatcctgcagcaagtggacgagactttgcggcagctgacagaaatatatggtggtctctctgcaggggagttccagctgatccggcagacactcctcatcttcttccaagacctgcacatccgaagagagtgcttctggaagcatatgcaagaaactgttcacagtgcacagtgttgccttccaggagtggggaactatatggaggacaggagaaggagactgactttccattatgtatacccttttgagaactttgagttttgtacctgggcaaaataaaattttaaaaaggggaagaaaaaaaaaa

SEQ ID NO: 1502 - DNA, 360 bp, Homo sapiens
atggaacagccggtgttttcagctggtgcagacccagctggtatgctcccgggccaggagcagctgtactgggacacgctgaagcagctgtccaagcacatcaagcccctgcaccgcgtggtcaacaagatcgacaagagtgaagacagaaaaaaggacctgagcaagatgaagagccttctggacattgtgacagacctctccaagcagtcccctgaagaccttgccaaagtcccgctgcccctggtgccgctgaccaaacagcagtacctatgccagcagctcctggatgctgtcctggccaatatccgctcaccctcttcagccattccctgtaccgcacattcgctccagccatga

SEQ ID NO: 1503 - DNA, 1435 bp, Homo sapiens
ctgaacttccccgttcctcttctcggctgcctccttttccgttgtcccttcgcgccccaaaccacatcctggagcgcactctccagcgtggctggcagcggggacggtgcgccggggcgcaggcccaagagtcgcgtgcgcggccccttgcaccatccccccgggcccacccccgggccgcgctgattgggcaggtagggactctgcccagcggaaagttttgggtgccgggaggaagtctaacctttgggagactccaagacagcagctccgaggtcggcgggggtctgggtggccatggaggagccccctgtgcgagaagaggaagaggaggagggagaggaggacgaggagagggacgaggttgggcccgagggggcgctgggcaagagccccttccagctgaccgccgaggacgtgtatgacatctcctacctgttgggccgcgagcttatggccctgggcagcgacccccgggtgacgcagctgcagttcaaagtcgtccgcgtcctggagatgctggaggcgctggtgaatgagggcagcctggcgctggaggagctgaagatggagagggaccacctcaggaaggaggtggaggggctgcggagacagagccctccggccagcggggaggtgaacctgggcccaaacaaaatggtggttgacctgacagatcccaaccgaccccgcttcactctgcaggagctaagggatgtgctgcaggaacgcaacaaactcaagtcgcagctcctggtggtgcaggaagagctgcagtgctacaagagtggcctgattccaccaagagaaggcccaggaggaagaagagaaaaagatgctgtggttactagtgccaaaaatgctggcaggaacaaggaggagaagacaatcataaaaaagctgttcttttttcgatcggggaaacagacctagatccaaggccacaagtaaggctatggctctgattctagaagacaaccttccaagatgcctggcaaaaccacctccctgtgccacacagacacactaggcctgtgtatttatttccccttcaaagcagactgaggagggaggagacgaggttctcttggcatcactttctccctggctgcagaactagacacccttgaagatttggcctgggccagtgagactgaaatcaagaaaaacagaagggatgtgcagggtgggggggtccacttcctgctcccatgtcaacccccagggcctccagtgtgcagacgcgtgtcctactcatctgctcccacggatgaccctggtcttcaatggttagcagaagggagaaaagaaagcaggaaaatgtgctattgagattccagtggtgacttcactgatatttagtgaatatttgatttagccaacatgcctttctttatgtgattttgtattaaagtaaaatgatttttatactttc

SEQ ID NO: 1504 - DNA, 1118 bp, Homo sapiens
aacggcaagggcggcagccagcaccgggcggagagggctaccatggggaaaatcgcgctgcaactcaaagccacgctggagaacatcaccaacctccggcccgtgggcgaggacttccggtggtacctgaagatgaaatgtggcaactgtggtgagatttcggacaagtggcagtacatccggctgatggacagtgtggcactgaaggggggccgtggcagtgcttccatggtccagaagtgcaagctgtgtgcaagagaaaattccatcgagattttaagcagcaccatcaagccttacaatgctgaagacaatgagaacttcaagacaatagtggagtttgagtgccggggccttgaaccagttgatttccagccgcaggctgggtttgctgctgaaggtgtggagtcagggacagccttcagtgacattaatctgcaggagaaggactggactgactatgatgaaaaggcccaggagtctgtgggaatctatgaggtcacccaccagtttgtgaagtgctgatccctcttccttcccagttgcccttaagaactgagaaaggacaaagtactctaagcagcagagcccacagaggctcgttcctttgacccttgtctcctggtggctatacgaaaccttcacaatttgcatgctggactttattacagcttcccaagccccatcaataaagcccctgttcacgctgcactggtgcatgaaggtgaagtaaggaggcagctactccctccacaaataagaattcgtgcagcagcagttcactccttaggaaaatgaagagtatttttaaggagatggtatctccccagtcaagggcaagtttacagagatgaaaccgcgatccccccatcactcaatgagccagaagccaatggtgacgtactgttacctgaacttactgaacttgctgttggaaagatctttgtgaggattaggaattaggttaaaagaaattaagaaccatcttcaagcaaaaattaaactttatttctgcttaaacaataaatacacctgagttagttttccaaacctttcctcctgattaaatgcccttaaaacttaaaaaaaaaaaaaaaaaaaaaaaaaaaaaaaaaaaa

SEQ ID NO: 1505 - DNA, 2702 bp, Homo sapiens
ggaaggaatagattactatgcatttttgagaggatgaagaaggcttcttggagaaggtttctgaaaagagatacggaattaagagaaatagaaaagagcactgacgaagcactcaggatggctattcaaggaattggggatccacagcagctgtgcacaaccatccctaatgccagaaaaatggggtaagggtgaagggaactgggtctagagctttgcatgtttttttctggttaacccttagagtcaccctgaaggtgtggatcccatcttataataaggtgaggacactgagtcaggaaactaacttgctaaaatcaagtcctcccagtcctcccatcaggtccttccagatctggaggagccaggatttgaactcacatttgtctgacttcaaaatccatgctttttcttgtgttccaaattgcacaatggagtcactgccagttcaagctcctatgaaaagggatggatgtgaaaagtcatttgttgattccacagatttttagtaggtaccatgtctcctgcctttatcactatcctactcctctgctacaacttctctgctacaggcacccactgcagttacttgatatgagttaaatgaatccatccatccaaacttccattcattgaataaatacttagcaatggcttcctttgtatcaggcactattctaggagctggggctacagtgcagatggaaaccagcaaagctcactgccctcatggagcttatatgtgagtgaataaatctcagggtggttctcctgtcataggtcctggctcctctgccagctcttccaaatgggttcagagaggttttctccttgtcctgttgtgtaactgataatcccatggtggacctcactttgctattcatatgcactaagtagtttatggtgtgctttgtggctggcaattgtgacagattctattcttctattggtatgtggtttctttggggcatttgtttggatactgatggcatcttccgggggtctgaggcacctacacaaacctcaggtcactatcacgtgatactggagttgcctgttaaattatatttcttcttccacaaaactgcaggttccctgagggaaaggtctatgtcctgctcatttttggatccctaatggctggcacagtacctggtgcataatatggttcaacaaatatttgtaaaatgaatgaatcaaatagtccttcaaagcatcttcagaatcaagattgtcatctagattgcacccgaagtttatctttctagtattcagaatataatcaatcattgcttaaattattccatttcatcattcttgaataaaagctactaattttaaatactaatatctgagatatcttcgaaaagaagattagtcgttgtatgtgttgcttataaattttctctatggtggaaaatattcccaaaccatgtctaagcaatgaaaaaccagtgttctggcaggaaataaactgatgtttgttgtgttttgtatctgtcttcccgttccaaatcatttatatatacttgatggtctgtgggcttgacttgcaagtattttcctgggagacatttttattcaaaagacctgtattgcctgccaaaccttcatttaagagactcattatggatgtcatctgcatcattgcaaacttttctggtcgtctctataaatagcaagataatatttacagagttttacattggctcttgaattttaaaatattcttatagacaaacattaattggaatggggggtaaggaggtaggaatggcttacttgcggaaatgcaggctcattgttgtgtctagtaggtgctaggtgcattcacacatctcttaagctttaaacaacctattgagccggtttccatttccttgatctattagatttaaaaaaatgaagcataaaggagttggctcttgccctaagtcatactactgatggaatgagaatacaaaccaaaaacactttattcaagtccaggaaatatctgccttgaaaaagaataacttaaaaattaaaagtgtcctctatttgaacatgaaaacagctaataaagatgtgttattttattttattattattaattttgtcctcccatattggcaaagataaagcaattgacaaaaatggaattcttgttcaatactggcaggagtgaaaattggtagaacctttctagaaggcaatttggcaacatgtatgaaaacctaaatgttgatacacctttacccagcagtttgtttaggaatttatcctaatgaataaaagttgtccaagtcttcaaacatgagcccaaaggtatatttcatgatgtttatgatattaaaacattggaaacaactgaaacatccttcagtaaaagatggattaaataaattccatgcagttgtcatttaaaaatatttagatatatgtttattgctatggatatatgttcccaaaatattattgaatcaaaaagtagactacaggatatatgttgaatatgagctcatttataacattgaatattttaagataatgtatgtttcatagagagatcttcaccaaatgttaaggatttttttttctgggctgtggtatttgggtgatctttacattcttcagactcatgtgtgtttgaaactttttataatgaacatatatcatttttattagaaaagaataaagtttttgaaaaaaaaaaaaaaaaa

SEQ ID NO: 1506 - DNA, 4371 bp, Homo sapiens
cgcgacttcgccccgcccggcgcgggcccaggaccctgatgtcgcttttgaacagcccctgcacctggcagccagcgagctactgtagtaggcattgccgactgtttgcataccggatgggagtgacagtgtaatagaaaaacaagcaagaaaccttttaggtaggactcctaaggctcagaggaagttacctccagccgctgccatgcccaactcagtgctgtgggcggtggacctcttcgggagagtgtacacgctgtccacagcaggccagtactgggaaatgtgcaaggactcccagctggagttcaagcgcgtcagcgccaccacgcagtgctgctggggcattgcctgtgacaaccaggtctacgtgtatgtgtgtgccagcgatgtccccatccgccgccgagaggaggcctatgagaatcagcgctggaatcccatgggcggcttctgtgagaagctcctgctgagtgaccgctgggggtggagtgacgtgagtgggctccagcaccggccgctggacagggtggcactgccctcgccgcactgggagtgggagtctgactggtacgtggatgagaattttggaggtgaacccactgagaaaggggggtggacgtacgccatcgactttcccgccacctacacgaaagacaagaagtggaattcttgtgtgcggcgccggaagtggatccggtacaggagatacaagtcccgggacatctgggccaagatcccctcgaaggatgaccccaaggagctgcccgaccccttcaacgacctctctgtagggggctgggagatcacggaggagcctgtgggccgcctgtcagtgtgggctgtgtctctgcagggcaaggtgtggtacagagaggacgtcagccactccaaccccgaagggtcctcctggtccctgctggacacccccggggaggtggttcagatcagctgtgggccccacgacctcctgtgggccacactctgggagggacaggccctggtccgggaaggaatcaacaggagcaatcccaaaggaagttcctggtccatcgtggagcctcctggatctgaaaacggggtcatgcacatctcggtgggagtcagcgtggtctgggctgtcaccaaggactggaaggtgtggttccgaagaggcgtcaactctcacaatccctgcggcaccagttggattgagatggttggtgagatgacgatggtgaacgtgggaatgaacgaccaggtgtggggcattggctgtgaggaccgagccgtgtacttccggcagggtgtcacccccagcgagctcagtgggaagacctggaaagccatcatcgcggcccgagagtgtgaccggtcacactctggcagctcgtctagtctcctcagtgccggctgcttcttcggtgatgaggtgaggggtagtggcgagtctgcccccagcgacaccgatgcctcctcggaagtcgagagaccagggcctggccagattctccctgcagaacctctagacgattccaagaatgccacagggaactcagcctcaggcctgggggctggcaggaccgcagaagataccgtggaagatgcctgcccagccgagggcagcagggaggccagacccaacacgcaccccggcccggcccccaccccggccgagctgccctggaccaatattgacctcaaggaggccaagaaagtgcccagccactcggccgctggcttccccgagaccaccagcctctcctctctggggctcctcccactgggcttggaggagccgtatggggtggatgaccacccgctgtgggcctgggtgtcgggaggcggctgcgtggtggaggcatgtgccatgcccagatggttcactgtccaggcgggcctgtcctcctcggtacacatgctgtccctgtccatcacgccggcccagaccgctgcctggaggaagcagatcttccagcagctcacggaaaggaccaagcgggagctggagaacttcagacactacgagcaggccgtggagcagtcggtgtgggtgaagaccggggcgctgcagtggtggtgcgactggaagccccacaagtgggtggacgtgcgcttggccctggagcagttcacggggcacgacggcgtccgggacagcatcctcttcatctactatgtggtccacgaggagaagaagtacatccacatattcctgaatgaggtggtggcgctggtcccagtgctgaacgagaccaagcactcctttgccctgtacacccctgagcggacacggcagaggtggccggtgcgtctggctgctgccaccgagcaggacatgaatgactggctcgccctgctcagcctgtcttgctgcgagagccggaaggtgcagggccgcccgtccccgcaggccatctggtccatcacctgcaagggggacatcttcgtgagcgagcccagcccagacctggaggcccacgagcaccccctgccctgcgaccagatgttttggcggcagatgggaggccacctgcggatggtggaggccaacagccggggcgtggtgtggggcatcggctatgaccacacggcctgggtatacacaggcggctatggaggcggctgcttccaaggcctggccagcagcaccagtaacatctacacgcagtcagacgtgaagtgtgttcacatctatgagaaccagcgctggaaccccgtcacaggctacaccagcaggggtctgcccacggaccggtacatgtggagcgatgcctcggggctgcaggagtgcacgaaggctggcacgaagcccccgtccctgcagtgggcctgggtttccgactggttcgtggatttcagcgttccggggggcacggaccaggaggggtggcagtatgccagcgacttccctgcctcataccatgggtccaaaacgatgaaggattttgtgaggaggaggtgctgggccagaaaatgcaagctggtgaccagtgggccctggctggaggtgccccccatcgccctcagggacgtgtccatcatcccggagagcccgggtgccgaggggagtgggcacagcatcgccctctgggccgtcagcgacaagggggatgtgctgtgccgcctgggcgtgtcggagctcaaccctgcgggctcctcctggctgcacgttggcaccgaccagcccttcgcctccatctccatcggggcctgctaccaggtgtgggccgtggcaagggacggctccgccttctaccggggatccgtgtacccctcgcagccagccggtgactgctggtaccacatcccgtccccaccgagacagaggctgaagcaggtgtccgcggggcagacgtcggtgtatgccctggatgagaatggaaacctgtggtatcgccaagggatcacgcccagctacccgcagggctccagctgggagcacgtgtccaacaacgtgtgccgagtgtccgtggggcccctggaccaggtctgggtgatcgccaacaaagtgcagggcagccacagcctgagccgggggacagtgtgtcatcgcaccggcgtgcagcctcacgagcccaagggccacggctgggactacggcatcgggggaggctgggaccatatctctgtccgggccaatgccaccagggccccccggagctcgtcccaggagcaggagccgagtgccccaccagaggcccatggccccgtctgctgctgaggcccccccacacacctacatgcagggacggtgcccagtttgggggatcaaggctgagccattcttgtgctggagtgtgcaccgtgggagcaatgtggcccaggtggactcaggagggaacctggccccaaggctgcggccacttcagaggcactggctgagacggccctgaaatgtgaagctccgcggacactcccacacgtgtccccgtctgcgaggagtcccggggtgtggggcatggggtggggctgcacctcccagaggcccctcccacccttcccttcccctctcccttctgcctttccaggactagaaccgggaacctggagccctccgggaacgccggccctggggcagcagagccaggatggagccctcctgagctggcatctcagacagcacccgggcccgccacccctcaccaagagagatggccatggggctcagggcctctttaccatgtgcagtgaccatttctcagagcaggacttgcaaagaggctttaatttcaaaagtgaaggaaggaggccaggcgccgtggctcacgcctgtaatcccagcactttgggaggctgaggtgggcagatcacctaggtcaagagtttcaaaccagacgggccaacatggtgaaaccccatctctactaaaaatacaaaaaaaaaaaaaaa

SEQ ID NO: 1507 - DNA, 2081 bp, Homo sapiens
gttgctcatctgctgcggcgctggtcgcgcctgcgctttggttcttggaaggcggtgctctgagaagccggactacgcggcagcggctcttcaaagcggagccgggagtttttgctacagttttcgccaccatgagtcgcagctataatgatgagctgcagttcttggagaagatcaataaaaactgctggaggatcaagaagggcttcgtgcccaacatgcaggttgaaggtgttttctatgtgaatgatgctctggagaaattgatgtttgaggaattaaggaatgcctgtcgaggtggtggtgttggtggcttcctgccagccatgaaacagattggcaatgtggcagccctgcctggaattgttcatcgatctattgggcttcctgatgtccattcaggatatgggtttgctattgggaacatggcagcctttgatatgaatgaccctgaagcagtagtatccccaggtggtgtcgggtttgacatcaactgtggtgtccgcttgctaagaaccaatttagatgaaagtgatgtccagcctgtgaaggagcaacttgcccaagctatgtttgaccacattcctgttggggtggggtcaaaaggtgtcatcccaatgaatgccaaagacttggaggaggccttggagatgggggtggactggtccttaagagaagggtatgcctgggctgaagacaaggagcactgcgaggagtacggaaggatgctgcaggctgaccccaataaagtttctgcaagggcgaagaaaagaggccttcctcagttggggaccctgggagcaggcaaccattatgcagaaatccaggttgtggatgagattttcaatgagtatgctgctaaaaaaatgggcatcgaccataagggacaggtgtgtgtgatgatccacagtggaagcagaggcttgggccaccaagtagccacagatgcgctggtagctatggagaaggccatgaagagagacaagattatagtcaatgatcggcagttggcttgtgctcgaatcgcttccccagagggtcaagactatctgaagggaatggcagctgctgggaactatgcctgggtcaaccgctcttccatgaccttcttaacccgtcaggctttcgccaaggtcttcaacacaacccctgatgacttggacctacatgtgatctatgatgtttctcacaacattgccaaagtggagcagcatgtggtggacggaaaggaacggacactgttagtacacaggaagggatccacccgcgctttccctcctcaccatcccctcattgctgttgattaccaactcactggacagccagtgctcattggtggcaccatgggaacctgtagttatgttcttactggcactgaacagggcatgactgagacctttggaacaacctgtcatggagcgggccgtgcattgtcccgagcaaaatctcgacgtaatttagatttccaggatgtcttagacaaattggcagatatgggaattgcgatccgtgttgcctcacccaaactggttatggaagaggctcctgagtcctataagaatgtgacagatgtggtaaatacctgccatgatgctggaatcagcaagaaagccattaaactgagaccaattgctgtgatcaaaggatagaaccttggacagcagggctgcctgacaccaccaaccctctctgaagtggaagtggactgacatgctcttctgacatcagactcaaggcgggacaagttgcaaagtgtgcagctgtaactgctcacgccaaaatggctgatggggaggctgctgctttcaggggcccgtgcttgtaaaataaccttccaggaagaggcacattgcccacctttggaaagggaggaatatgccttctccttggttgttccacagagttttaggaaaatctgttagggatgggtagatgtcaaactgccttacgcagtcatactgatctttagccatcagattgatcttcttcacaccaagctctgtttacattccgagaggtgtcatgaagaaagttctgttcaataaggttttggaatgtttcctttcaaaaaaaaaaaaaaa

SEQ ID NO: 1508 - DNA, 1311 bp, Homo sapiens
gccggaaggcggcgtccgcgacgcagctgttcacgcttaggtgggcgacgtgggcgcaggtgggcgcaggatggcaaaacagaagagaaaagttcctgaagtgacagagaaaaagaacaaaaagctgaagaaggcgtcagcagaggggccactgctgggccctgaggctgcaccaagtggcgaaggagccggctccaagggcgaagctgtgctcaggcccgggctggacgcagagccagagctgtccccagaggagcagagggtcctggaaaggaagctgaaaaaggaacggaagaaagaggagaggcagcgtctgcgggaggcaggccttgtggcccagcacccgcctgccaggcgctcgggggccgaactggccctggactacctctgcagatgggcccaaaagcacaagaactggaggtttcagaagacgaggcagacgtggctcctgctgcacatgtatgacagtgacaaggttcccgatgagcacttctccaccctgctggcctacctggaggggctgcagggccgggcccgagagctgacggtgcagaaggcggaagccctgatgcgggagctggatgaggagggctctgatccccccctgccggggagggcccagcgcatccgacaggtgctgcagctgctctcctagtgggttcagcgcggggcggggccgctgcccagtgcagggctgcctcagaccacacagggtgcagctcctccggcggtgggggccgggttcaccagcagggcagcggctgagcaagggctttcagctcctccggtggtgggggccgggatcaccagcaccagagcctcgcaagggccccttccctcctccagaccctccttggccggtgacggctgtgacagtgatggcaggttcagtgccttcagcgcagagcgtggatgctctggaatcacccggacccctggccttggagggaccctccagccccaggaatctgctttggagggaaatgtctatttttctaccgggaatattttagagattggggcatgctggctcctcccgccagctgcaaacctgcaccttccgcctgattcccgatccccctgcgtgggccgcattcctggtcccctgcctgcgtccatcgaggggcctggctgtggcctgttttcctttgaccccacacagcgtcattgcgggtcatggggagcccctggtgggagcttgtggagtcggatcacgtacctgtgcagaaaccgcctctgtggctgcatttgaaataaaacccgacccagcagcagccgtgggtcctgctctgtaaaaaaaaaaaaaaaaaa

SEQ ID NO: 1509 - DNA, 482 bp, Homo sapiens
atagagcgatgtgtatttatttgtataacacaaacacctacatctatcatacagaagtctatttccatacaaccgatacgtatttaccatacgcaagagtattcaatgcagagatacacgttgtcgttgtttgcatataagcgtacagaaacgtttacattaatacatataagtaaacgcgtggaaacgaaagaaataaaaaagcgaaatgagtcaacaggccgggcacggtggctcagttatttcatcctcagctgggcttctttggagtctgctccacatatgcataattcagcagtctgccaaggtttgggcagagtttattcacagagtctgatgcttctcctctctctctgctttccaggattctcctctcacttcccaacagctgtagttgcttgagctttatcttctggttcttcaggccacaaagactaaagtttactattggaattttaagcaccctacatgacatagatcag

SEQ ID NO: 1510 - DNA, 2214 bp, Homo sapiens
ccgtctgcccgcctgccgacggacgctgcgaggggcctgcggcgccccgctggtccgaagacgcccgaacccgcggctggcgaggacgcgggcgggggctggggcgggggcgggcccgctgcgggcgcctgcgcctccatcttgccgtacggcgcggacgccgcgggccggcccacgtcccgagccgtgtcgccgccgcgctccctccctcggggcggtccgcgggcgggcgggcggctagggccggggcctggctgcgcggctgggccaaggcccgcgatggtgatctgctgtgcggccgtgaactgctccaaccggcagggaaagggcgagaagcgcgccgtctccttccacaggttccccctaaaggactcaaaacgtctaatccaatggttaaaagctgttcagagggataactggactcccactaagtattcatttctctgtagtgagcatttcaccaaagacagcttctccaagaggctggaggaccagcatcgcctgctgaagcccacggccgtgccatccatcttccacctgaccgagaagaagaggggggctggaggccatggccgcacccggagaaaagatgccagcaaggccacagggggtgtgaggggacactcgagtgccgccaccagcagaggagctgcaggttggtcaccgtcctcgagtggaaacccgatggccaagccagagtcccgcaggttgaagcaagctgctctgcaaggtgaagccacacccagggcggcccaggaggccgccagccaggagcaggcccagcaagctctggaacggactccaggagatggactggccaccatggtggcaggcagtcagggaaaagcagaagcgtctgccacagatgctggcgatgagagcgccacttcctccatcgaagggggcgtgacagataagagtggcatttctatggatgactttacgcccccaggatctggggcgtgcaaatttatcggctcacttcattcgtacagtttctcctctaagcacacccgagaaaggccatctgtcccccgagagcccattgaccgcaagaggctgaagaaagatgtggaaccaagctgcagtgggagcagcctgggacccgacaagggcctggcccagagccctcccagctcatcacttaccgcgacaccgcagaagccttcccagagcccctctgcccctcctgccgacgtcaccccaaagccagccacggaagccgtgcagagcgagcacagcgacgccagccccatgtccatcaacgaggtcatcctgtcggcgtcaggggcctgcaagctcatcgactcactgcactcctactgcttctcctcccggcagaacaagagccaggtgtgctgcctgcgggagcaggtggagaagaagaacggcgagctgaagagcctgcggcagagggtcagccgctccgacagccaggtgcggaagctacaggagaagctggatgagctgaggagagtgagcgtcccctatccaagtagcctgctgtcgcccagccgcgagccccccaagatgaacccagtggtggagccactgtcctggatgctgggcacctggctgtcggacccacctggagccgggacctaccccacactgcagcccttccagtacctggaggaggttcacatctcccacgtgggccagcccatgctgaacttctcgttcaactccttccacccggacacgcgcaagccgatgcacagagagtgtggcttcattcgcctcaagcccgacaccaacaaggtggcctttgtcagcgcccagaacacaggcgtggtggaagtggaggagggcgaggtgaacgggcaggagctgtgcatcgcatcccactccatcgccaggatctccttcgccaaggagccccacgtagagcagatcacccggaagttcaggctgaattctgaaggcaaacttgagcagacggtctccatggcaaccacgacacagccaatgactcagcatcttcacgtcacctacaagaaggtgaccccgtaaacctagagcttctggagccctcgggagggcctggctactgtgcctcaacggttcggctcctcaacagacagtccctgcggcagaagtgggtgtggccgtgagcctctgcaggctcaagagtgttgtccagatgtttctgtactggcatagaaaaaccaaataaaaggcctttatttttatggctgaggattttgaatatta

SEQ ID NO: 1511 - DNA, 1737 bp, Homo sapiens
gttgaaagatgtgagacagtattcagaataatgaagataataataatgattattataataatgatgatgattccaaggaaaaaacctacagcgaatgttccatttctaccccgcacgcagacactctccctaacactgataacctgagcccccagcactggacggaagaatgctggcgtctccgtgtgtactggttcagggttctggccccagccttgtcaggaccccctggtgtccagagcccccacccctcccgcaacaagcagctgatgccccagtgattctctatacatttttcacctcggccaatatgtccaggaaaactgcttacttctcttttcttgcctggagcttcattgttcacccttacgttgcaatataggaattaatgctacaaaataaaagtaaagcttacctgaaaagtgcatagtttggggcaatggtatctacatctcccactgtgggaaaaccagcaaagcatcaaaactctcaattctcctgttaccgaatgcagatctgaattataagatgtttatgtttgaccattgtttcaacaatgggattttgttacgaattatccctttaactgaaaccctcagttttactgtttacattattaggaaaacagggatatcttttgaatctaaaaatttgatgtacagcatgtgatttttgaagtttacatgtaaagtcacagtataggtgaaataacgtttgtcatattttgagacgtatcctgcagccatgtttttacgtgagtgttttagtcaaagtacatggtagacagtctttcacaataaaaggaaaaggattttttttcctccaaatgtacatttatcaacctaatgattgatttttttaaaaagagatttcgccccagtctggtttatgaaagttcattgccctaaactgtgctgattgtttttaatcaagttataaatttccaacctagatcatgtatctaccaactctcctgcattttccaaaaggcattgagcttaaatattagtcttgcttagagtaggttatccacttacatgctgcgctaaagccatgcctttgaaactccttgtttaaaacatgatatgatttttgtgggcagtttcagaaaagaaaacaaacaaacaaaaatcgaccctttaattattacttgcaactcaacagatctccctgccgtactgccttttccaggaactttacttcagggctgtccagattgcagttgtgccccgtgtatgtggatctagttcacagagtctttggaagccagcagtcgtgccctccgtatactgtccactcattttatgtagatttggtatcctcagcagccagtgttaacaccactgtcacgtagtgtacagattcatcttttatgtatttaaagtaatccatactatgatttggtttttccctgcaccattaattctggcatcagatcagtttttgtgttgtgaagttctactgtggtttgacccaagaccacaaccatgagaccctgaagtaaagataaggtacacatacattatttgagtaactgtttccttgggggccaatctgtgtatgcttttagaagtttacagaatgcttttatttttgtctataacaaacagtctgtcatttatttctgttgataaaccatttggacagagtgaggacgtttgccctgttatctcctagtgctaacaatacactccagtcatgagccgggctttacaaataaagcacttttgatgactc

SEQ ID NO: 1512 - DNA, 2949 bp, Homo sapiens
atgatccggcggatcctctcctggggagaccaggccggggagagggcgcgggcgcccagtggcgggggcagcgggcaggcgcagcgaccggggccggggcggggatcctggcggcgaccgccgcggcggcagcgccccgggcccgccgccccctcccctccggcgaggggagccgctggatggggccggtcggggggcggcctgcggcgcagagcggcggcgacggcggcggactccccaggcgggctggggctgagcccggggaccggggcgggggctccggggggaccatgcccggaggccggcgggcagcagcgtggctcacgggcctggcgcgctgatgctcaagtgcgtggtggtcggcgacggggcggtgggcaagacgtgcccactcatgagctatgccaacgaagccttcccggaggagtacgtgcccaccgtcttcgaccactaagcagtcagcgtcactgtggggggcaagtagtacctcctaggactctatgacacggccggacaggaagactatgactgtctgaggcctttatcttacccagtgaccgacgtcttccttatatgcttctcggtggtaaatccagcctcatttcaaaatgtgaaagaggagtgggtaccggaacttaaggaatacgcaccaaatgtaccctttttattaataagaactcagattgatctccgagatgaccccaaaactttagcaagactgaatgatatgaaagaaaaacctatatgtgtggaacaaggacagaaactagcaaaagagataggagcatgctgctatgtggaatgttcagctttaacccagaagggattgaagactgtttttgatgaggctatcatagccattttaactccaaagaaacacactgtaaaaaaaaaaagaataggatcaagatgtataaactgttgtttaattacgtgagaaacatcttcagtggccaaggaaactggccatttctctgagaaagcaaatgaaatgctacagctatacccagaccttttataggtaatgaagcagttcaaaacttgaaagaaaacaaaacctgtccccagaattccataaagtttattaagaatgttccttaaaggtttaagaagcagtaagcagtatctgaagccacaatctactataaatactttatttcaactagaaggtacaatctctcaggggtttcatagtttaaaaagctacaatcacatcatgtaactacgtaaaaaacagagctgtaaatggaactgcttggctttgaccatacacatttctgcacagcccttacagaatctgcacaaagaaatatctccctttgttccagttaattgttcttgtatgtaagttgctttctattccagtatatccagagtggtgaaataacaaggccagccacatagccaaaggtcgctccaagcgtacaggagatgggccatacctgaggagagaatgtatgagatcaaaaaagaacaaatgttttattattacttgagcacaagtgtaacctaaatatttctatattaaagcttaatgtgctttcttaaagaatgcctaaagtgtaataaggtcataactgcatttatcatgaacactaaaaatgtacacattttagttaatgtgcattaaactgtaacaaggcttcgggcaattgtagatttagtttgacgctccccaaagtgcatgagacacatgctaaaattacaaattaaaattttgggtcagactttgccataatgctggactcaatttagctctctgaactagatggtaatttttttttaattcccactttggctgtgtacatcaaatgaaatgagaagtgtgtatgctgaccaaaccacaagaaactttaagttgtgttaaagaggaaagacctagaatccaagcatgttacatgaaaattgtaacagagcagctgcttccacctttcagatatagatgttgggaccacagcagaagttatagagcgagaacttatatacacacctagaatgtaagttaaacaaaataccggcttccggagacccattttctccagccatattacattaggctagaagtaattaatgttgatttatttcatctacaagcagttggtccctaagtgacaggctctgcttcaaaaaaaaaagttggagaaaaattttcatgttcttctgtgaagcttatttggtacactggagccttttctaatctttctctcgggggaacaggctgcagaactgtgttagaggtgaaccatcttaattactagttctattacctaattcagcttccttgtttggtctgctgtggatctgccttattgcatatgccatgcatcagataatggtgttagacaaagcttcattgtgaacaacctaatgcattttagagaaacaatctcatctacacatttttttctagcctttcctacatttaaacttgctgttgcctaaattataattttttaaatgtctttggtgggcttctgttaattcatgtgacttgagcttatagctatgtctactgcacagattgggtaatggaacactaaacttttatacttgaaaatgacagccttaaatgctcatatcagtcacaaatctaggatgtactgtcttgttgtatgtgagctttgtagagatttgtaaaaatataagcatcaccttcgcactgaagagtggagagagtctactggatgactggccaggaactttctctctgaattggacatttggatgtcttctttcttccaagaaatggtggttcacattaaagtatcatggccttatgtatgctcaaatggaatcttatgtaagtttcttaatttaattttggtctgctatttttagataaaattgaaaggaattgtataaatcaattaacatattagctaagttgtccaacacatgttataaatgaattacaacagtaaactattatacatttccaaaaaaaagata

SEQ ID NO: 1513 - DNA, 1709 bp, Homo sapiens
ggatgcagcctgggaaggaacatgaggatcctctgagagaccagggacagagggagacccaaagatctggtctgtagctaagtgaattttctaaaactcattgattcacacgccatcccttgaggtggctggtgtcccgcgatggccacaggcgccctcctgccgtgctcgcgcccgtgcccgatgtcccggctggacttcctcaaggcctcgcacttctcgctggggcctgacctgcggctgcacgagggcaccatgcgcaccacgtcgcaccgggactttgcctacccggctgccacccgggagccgccgagcctgcagccgccgcccgcgctgcttttcccaatggacccgcgctgggaccgggaagagcgcgtgtcggaggcgcaccgcgcgttcccgccgccatccacgccgccgtgggagctgctgcaagcgcaggcgcgggaacgcacgctcgccatgcaggccggcaacctgcacctgcacgaggacgcgcacgccgggatcggcctctccaacgcgcacgccgcctacggctggcccgagctgccggcgcgcacccgagagcggatccgcggcgcgcgcctcatcttcgaccgcgactccctgcctcctggcgaccgcgacaagttgcgcatcccgcccaccacgcaccaggcgctctttccaccccacgacgcgcgcccgcagcctcgcgcgcccagttgccacctcgggggccccaacaccctcaagtgggactacacgagacaagatgggacttcctaccaaagacagttccaggccctgccaggcccacctgccttgaggtgtaagagggcctcctccggagtggagctgggagactgcaagatcagctatggatcaacgtgttcggagcagaaacaggcctacaggccccaggatctgcctgaagataggtatgacaaggcccaggccacagcccacatccactgtgtaaatatccgtcctggtgacggcctcttccgcgacaggaccaccaaggccgagcacttctatgccagggagccagagccttttgttcttcaccacgatcagactccggagtcgcacatcctgaaaggaaattggtgccccggccccggcagtctggacaccttcatgcagtacttctacggccagccgccacccccgacccagccacccagccgccacgtgcctcatgagaaattgcagagtcatgtgaccctaggggagccaaagctactcaaacgcttcttcaagaccaccatgggctcggactactgcccttcagagtggagacaggtgcagaaagcgcccaacctccacttgcagcaaagctacctgccgcggggcacgggcgaattcgattttttaaccatgaaccagaagatgctgaagccacacagaacacctccggccccggtgactgaagagatgctacagcggtgcaagtacagccacatggagccccctctgggtggactgcgcttcttctcaacacaatacaaggacgagtttcctttcaagtaccagggcccagcagccctgagactgaaaaatcctcaggagggcttcgtgcccctgggcacgcctcaccagcgcggctgcagggagaagatagaccctctggtcccccagccccctatgtacctgtgccccagccagcaataaatgccatcttggcaacattcaaaaaaaaaaaaaaaaaaaaaaaaaaaaaa

SEQ ID NO: 1514 - DNA, 1722 bp, Homo sapiens
agacagccgtgacagagaaactaggcggtccgctcctgggacgcggtctcgggggcgggttcgcccctgaggcccggtgacccttcgcccgcaaccagggctagcgcttgtgtgcgcccacggaagcacccgagcgaccggagaaagaaaaagtggtcaaggggacctccttccagctctacgcgcctctcattcagagaggtgaggtcaggaaaggggaaggacgaagccccagagcaacagaagtcaggcggtgccaggaacactgagagcggagccaggggaaggcggccgagcgcggccccctctcctcccgggccggggcgggcccgaggcctcgatccgccttccccgcgccgtcctggtcacggccccgcggggcagccatgcctggccgtctgctgcggggcctgtggcagcgatggcgccgttacaagtaccgcttcgttccctggatcgcactgaacctaagccacaacccgaggaccctccgatatgttccagaggaatccaaagacaaagttatctcagatgaagatgtcctaggaacattactgaaagttttccaggctctattcttaaatgatttcaataaacaatcagaaatcttgtctatgcttccagaatctgttaaatcaaaatatcaagacctactggcagttgaacatcaaggggtgaaactgcttgaaaacagacatcaacagcaaagtacctttaaaccagaagaaattctttacaagactttgggtttcagtgttgcccaagcaactagctcattgatttctgctggaaaaggtgtcttcgttactaaaggattggtaccaaaaggcgcagtcgtatctatgtatcctggtacagtatatcagaagtatgagccgatctttttccagtccattggaaatccgtttatttttagatgcctggatggggtactcattgatgggaatgacaaagggatatcaaaagttgtgtacagatcttgcaatgggagggatcgactcggccctttaaaaatgagtgatagtacatggctaacgtcagaaattcataaccctctggctgtgggacagtatgtcaacaattgttccaatgacagagcagctaatgtctgttatcaggaatttgatgtgcctgcagttttccctatagaactgaagcagtatcttccaaacattgcctacagctatgacaaacaaagcccacttcgatgtgttgttcttgtcgcacttagggacatcaatcaaggagaagagcttttttcaaactactacacaattgtcagctaactctgtgaatcagaaattattaggttttctactcagctattaattctaagtgttttttgttaatcacttctctgagttctacctgtaaaacaaatattttgagacttaattggaataggaatttcttatgtttttgttgatattatatttatgttccaatttcatgataaaagctacttgcttcattacaatttcaaatttgtaatgcaattccaagtttaattggttttcacctaaatacacaatagcttattaaattaaaacctactctttgaacttataatttcaatttttcttttgtttattttgtaagctctgtggtggtttataaaattgtagccaggcatcagcagttcttgtagtactgctgatgtgtacaaacttctgtaaaaactttatttttacagaattgagtaaaaaatacctattgtgttgc

SEQ ID NO: 1515 - DNA, 6693 bp, Homo sapiens
gagcaggcgttcccgactccggcaagagggtcagtgtggaggcgggagcccgggcggccggcttgaactccgtgcacgcgggcctggagctgcgcccctgcgtcttttcccgacttctgatccgcagaggggcactcggagccccagcctgggtcgcagtgccttcggtctgcgggcctcagtttctcggtggcgcctggactctcgccctcagagggaggcccgtcccacggtctgtggctacggatcccaggaccctcttcgcgggcgattcgcgtagcctcagattgcctcggatgatggcctgcgactgacagtctctcagctcttctcagctctcctgaggctgcagctgtcagctccctgatcctcagcacttgcctggaccagtgcgggtctgccacgccctgttcagccatccctgtcctgttgtgtcgtgcaagccacatctgtccacacccccaccacccaccagtgctggctctcctctcttctcccctgtgctcccagcatgcctcgtggccggtgccgtcagcagggccctcgcattcccatctgggcagccgccaattatgccaacgcacatccatggcagcagatggacaaggcgtctcctggggtggcatacaccccccttgtggatccctggattgagcggccctgctgtggggacaccgtgtgtgtgcgaacgaccatggagcagaagagcacagctagtggcacttgtggcggtaaacctgcagaaaggggtcccctagctgggcacatgcccagctcccgaccccacagggtggacttctgctgggtaccaggctcagacccaggcacctttgatggctccccgtggctactggaccgcttcttggcccagctgggcgattacatgtccttccactttgagcactatcaggacaacatcagccgtgtctgcgagatcctcaggcgcctaacaggccgagcccaggcctgggcagccccctaccttgatggggacctgcccctgcctgacgattacgagctcttctgccaggatctcaaggaagttgttcaagacccgaacagttttgctgagtaccatgctgtggttacctgtcccctgcccctggcctccagccagctgccagtggcccctcagctgcctgtggtgaggcaatacttagctaggttcttagagggcctggcactcgacatgggtactgcccccaggtctttaccagccgccatggccacccctgctgtgtctgggtccaactctgtatctagaagtgctctgttcgagcagcagctgaccaaggagagcacccctgggcccaaggagcccccagtcctgcccagttctacatgtagctccaagcctggtcctgtggaaccagcctcttcccagccagaggaggcagcccccacacctgtccctagactgtcggagtcagctaatcctcctgcccagagaccagacccagctcatccaggaggtccaaaaccccagaaaacagaggaggaggttttggagacagagggagaccaggaggtgtccttaggtaccccacaggaggtggtggaggccccggagaccccaggagagccaccactttctcctgggttctgaacacagcccaggtgggaacaatgctgcccctcatgatgaagtggcctgtgtggcttgagcgccccatagtccccagtcagagcagagtggtgtccccagatgacttcagaccccatagctgggcaagatgcgcttgttttggactctgcgctgagcagaaccagctcccccaactccagcagagcttgacctccgccctgtgccctttccctgctgctggctctctgctgcatccctgcccgtcttctgggagtgccgtctcacccaggcctgctcccacgagggggtcgttttgtagatcaactctcagcagatagttgcatcatctttgtcacctccacccccataaaacaccccccttggtgtcttccacactggctgggactgaactgggtctgccacgtctgccctgttgggacctcgttcctgtatggggtttctgtgtctgtccccctagccccaccctctctgctccctgtgacttctgtcccagctggaatgtgaggaaggctgcctggaggaagtggccactttgattctgggggatgagtgggatagcatcttggcaaagaatgatgtttcctgtgggattaccagcagttctgggcagctggaaggtttggatgcaggaaggtgggatgcaagccccttgccaggctcagctgcaggcattcgccctttgtgtgttaacactgtagctctaatcgtgcctggtgttctgaagcaggctcctcttccctgctgctgtgctgccatcccctgctcactccgcactcgcatgcattgcggattcagcacttaagccctagtgtgtaaatgacttggatctccctcctggcagactgtgaccctcagcacaggggctctgtcttagtcagctctgtggcctggtacacaattggtgctcattaaacacgtgttggattactggctgaggtggtgcagtggctgcctaccagcaagtctttgtttcccattctgtcaggagcagaggcctggccatgagcattccaggtcagcattgcagctgtggtttctggcaggggctttgagggtccaagggtctgatcaaagaagctgggtggggctgagtagggggtgggtggctctgcaggtagagaactgacttccgagagctgtaggtgaagtgaggaccaggcagcagtccagagctgtgaggccccaggcccagaggaatggaatgaagaaagacctgttccacacaaggaggggttttctagtggaagctgagcttggaagctcctggagccaagtttaccacaggataggcaggtacagccgcccagtgtgtgcagtgtgtgcccactctggtgcttggacaagaagttcaagtccctttcaggtttacaattgtgaaaacaacaaaacaacaccttcctggaaagtaggaagaaaaagcagaaatgtgaattggaaatacagccaactattttaggaaaaactaattagcaagcatctgattaaacttattcagaaactggccgggagcagtgtctcacacctgtaatcccagcactctgggaggccaaggtgggtggatcacctgaggtcaggagttcaagaccagcctgaccagcatggagaaatccatctctcctaaaaatacaaaattagccaagtgtggtggtgcatgcctgtaatctcagctacttgggaggctgaggcagaagaattgcttgaacccaggaggcagagggtgtggtgagccgagatcacgccattgcactccagcctggacaacaagagtgaaactccatcccaaaaaaaaaaaaacaacaaaaaacaaaaaccttatttagaaaaatataaattgttgggattattttatggtaactatcactagaaaaggctctgggttcagatggttttatgtgtgagttatttcagggcacagataccttgtaggtaaaacaactggaaaccttggaaataggtgggaagctatttttagaaagcaggtatagccctggtagcaaagcaagtgagctggcagaagaaacccattttcagtcttgattctggtcagatgtgagaagtccctggatgtcctggcccagccccatgcttctgtgccaggtcacagctgccctccgtccgatgactcaggccccatccccccttttgtgggttgggtcagactgctccctgatgcctacctccagtgcactgtggcctggctcacctgtgggtctggcagtagaacccagagttgctctctaggatggacagcctagtcacccagctgacctttaccctgtcccacaggcttctggacaggccaccttccccatctccctttagtggacctgaagtggatactccagcctgggattgctgccttctcttttgaaccctgtcctattggggctttggggcttttgtgcccttgggacccaggcagctcctgggggtgtgtgagttatggtctgccgtgtgtctgagggccagtcatgcagcatccacctaggcaggcttgagagtccttgggagagtccaggtgacctggtttttaattaaaacgcgtcctgtttattgtggttgggctctgcccagaaaggaaggtagggccttgaagtggtgatgtccaggtttcctgcacaggtagggtggaggcaacgatggactctggcatggccttccagacaggcagtgcacacagctcctttcagagtggctttgttgccagctgctgcagcacctgctttcagacagatgatgaccaagctgctttcctgctgggggaaggaggcattccccctgggttgtttttctcttctggcccccacacactggcagacccgaaggcagggtgctcaggagctgcagagcctggcagggtttgctggacatgctcagggacgggccatggtgctggctctgctttctaatcatggtgtcagtccttcacttcccttggaaatacccagagattttatttcctgaagataggacatgatgggtgctgtgagatggtatttaaagtacctgtctgcaaggaaaactttaaaataggaagtactaaggataaggtcctatgggatattggaatattttataaagccacaatagttaaagcacttagatgtggacagatgagcagagaatagaggactttgaaacgggccaaataaatatggaaatttagtacaggctagaggtgtttccaattaacgagtaaaatggattattcagtaaaagcagttggccctctggaaaatagtaaagccatgtatgtgcctcactctttatgccagtacatattccagattaaagatttcaatgttacaattatgaaagtactagaggaaaatatgggtgaatttttttttttttttttttttgcctatgattccaggattttaaaagttttagatgcccagagttgtggaggtatggagaagtggaccttctcatactgttggtgggaatacacaataatataatttgaccacgtaacaattctaggcacatgcatgctgtgactacttgctaggtgcatgaaggctcttgccaggggtggtcatggttcggtaccactacatgggggtttagagcagggactggaggttggccttgcctcctcccctccccgcatgagctgagggtccttacctgacctttttgagctgtgaccagagtttttcctcatggggtggttagaagggttgaatgagaatgatgcccatgcagtgccttggctggggtctgggccctctaacacccacctcatgggtgtcactgttttttgaacagcagaactggaaaagcccaaagatccagcaataaaggagcaaggcaaataaagctgttaccctgcaggatcagtcagcatgagccagattgtgctgcagtaacaaagatctccaacagcgcagcggctacagttggcactgcttatttcttgcttgcacctgtgggccaccgtggctggggcctgtcagacctgtgctgacgacagcctacctggacatatttctccatgctcactgaggcaggggaaaggccacagcaggccacaagtaatgtgtgtcaccccacttccatttctgtggccaaaggaagccacagagccacacctgagttccataggacggcagcagctgatcatcctatgggctggggtgctcagtatggagaagtacaagcagccacccagcgtggggctggttggtgctgctgaggatgggaggatgggaggggcctgcatccatcccagggcaacatacctgtttgtctgctggggctgcctgacaaaggaccgcaggctaggggacttaaacaacagacatttcctcatgattctggagctagaagcctgagatcaaggtgtgggcagggttggtttctcctgaggcctcgctccttggcctgcagatagccatcttcttgccgtgtccctgtctgtgtctgtgtcctaatctctcataagctcactagtctattggatcagggcccaccctcatgacctcatttaaccctgaattacctctttaaagaccctgtcttcaaatgtaagtactaggggttaggacttgaacataaaaatattgaagggacatagttctgcccacagcggtgcccgcgataggcttctctggttttgtctttgctgttcctggcagcgctatattgggcaggcttctgtggtctccacatgcctgtgtgcagagtcccccaggccctgggttctggggcccatactgaggagtggggatggccaagccttggctgttgagtaggcagtgcccagttgtgctgtatgggatgctgtttctcacttaagaaatctttccctacctggggggtacaaaggcattatcctgtattcccaggttgtaactttctgcctttgacattcaaccttgagtccacctgtaagtgtaactgcggcagaagggaggggtctgctgtcatccttgatagcctgtgatgagcagagcccctctgccgaccgcgatgcacatgtaatatgagcaagaaataaatttttgatgtgcgaagccactgaaaaaaaaaaaaaaaaaaaaaaaaaaaaaaaaaaaaaaaaaaaaaaaaaaaaaaaaaaa

SEQ ID NO: 1516 - DNA, 3153 bp, Homo sapiens
agtaggctggagccggggtcagctttggcaccttcctccagtcagtggccaactcctggctcagtggggattgtgctcgtcccctccgttcccctccagtcttcctcccgctaccggaacgagcctcgcgcttggcaggctgaggaggagcaaagaaagcaggattaaagagaaggaagacctggctaggtctgggtggcgtctgcagtgccagaaagggaggcggtggcggcggcggctgcgaccacggccgcgcgggacgtgaggcccgagagcaaccgacgggcagcggcggccgctccagcgccccgcaccggggccgttagtcagcagaacgcgagctcttgtggaggagcagggccggcgcgaggcgagactcgggagcgtgagcggggcccctggggcgccgccgtccttcttcgccccggcgccgggggctgtagccctggtccccgctcctctgtcgggccagtctgcaggcggagagagtcggacggcgcccggagcgcggatctcgccttgtggaggacagcgcgtcggctgcggttctctctcgaccccttctgcccggcgcttcggcccgggccgctcaggtgcagagcatgaataatctttcatttagtgagctatgttgcctcttctgctgtccaccttgtccagggaagattgcttcaaaattagcgtttttgccacctgatccaacttacacactgatgtgtgatgaaagcggaagccgttggactttacatctgtctgaacgagcagactggcagtattcttctagagaaaaagatgctattgagtgtttcatgactagaaccagtaaaggcaacagaattgcttgtatgtttgtacgttgttcacccaatgcgaaatacactttactcttctcacatggaaatgctgttgatcttggtcaaatgagcagcttttacataggactaggatcacggattaattgtaatatattctcatatgattattctggatatggtgccagttccgggaaacccacagagaagaacctctatgcagacattgaagctgcttggcttgctcttaggacaagatatggcattcgccctgaaaatgtgattatatatggccaaagtatagggacagtaccgtctgtggatcttgctgctcgatatgagagtgctgctgttattcttcattctcctctgacttcgggaatgcgagttgcctttcctgataccaagaagacctactgttttgatgcattcccaaacattgacaaaatctctaagataacctctccagtattaataattcatgggactgaagatgaagtcattgacttttcacatggcctcgcattgtttgaacgttgccaaagacctgtggagcctctctgggttgaaggagcaggtcacaatgatgtggaactttatggacagtatcttgaaaggttgaaacagtttgtgtcacaggaactggtaaatttgtaaaatattctgtaaatttgctactgggttttcctttcttgctgaactgcactctttggtaaataacataaaacctgaaggttttgtttgcaaatcatgtcagttgccttcataaatgtacaggtaatgatttgttaacagacttaatgaaggttttaattaccagaactaaaaactggaaataacagtaccgtgcagtcaggctgtgtaatttatattttttctgtgaatttttttttaacatcaagatgagtactgtatgagattttaattctataaaatcaaatgctgtaaaagtattgccaaatgcttttgcatactagaaacaaatttataaatatttttaaaacatctcaatatattaaatcttatcctggaatacaactgtaatattttgaaaaaagctatgtatctaaagcaatttaagtactcataatggaatgaactgtaaaagagatttaaaaccatgcaagttcactagaattaacctaaaccctgttgtacagggatagaggtttaaagttattttattgtaaaatacattgaattttctgtatactctgattacatacatttatcctttaaaaaagatgtaaatcttaatttttatgccatctattaatttaccaatgagttaccttgtaaatgagaagtcatgatagcactgaattttaactagttttgacttctaagtttggtactgtgaggcaagtacttaaaattttcatgctggttacttaaaaggcatttagagatttcaagaatgattttgtatacgatgttttaaattttgactgatctcatagtcttcatagaattgcagtagtcttcattgtatgaaatcccgaaagtccatgagttgatcttaaagaccactaacagactggctatcagatcccttttcactttggctatttttttcattttttgagatggagtcttgctgtgtcactgaggctggagtgcagtggcgcgatcttgactcactgcaacctctgcctcccaggatcaagtgattctcctgcctcagcctcctgagtagctggtattacagatgcttgccaccacgcctggctaatttttgtatttttagtagagacagggttttgccatgttgatcaggctggtcttgaactcctgacctcatgatctgcccttggcctcccaaagtgtcggaattacaggcatgagccactgcgcctggcccactttagctatttttaaaaataggacctattgttttggattactatctgagaatttcatggattcactcctgggtataggagataagaatacgtttaattcataacttttatattaaccaatatagtaaaaaaataaagctcacacatacaaaaactaagttgcctttccttgaatgaaccctgtctgaataaaacaatgaaaaataaaaataaaattaatggtatgtagtctaatttgtaaatgaatgaatatggaaataatacacactgtggatatattttaaggccttatgtagttttaattgttctgctcgttccgtggttatgtttaagactatagtatatgactctcttcaaagtatatcaagtattgtgaatgctttggttcagatgtgtcaaattaacagtaaaacaacaaatataccactgaaaaaaaaaaaaaaaaaaaaaaaaaaaaaaaaaaaaaaaaaaaaaaaaaa

SEQ ID NO: 1517 - DNA, 2672 bp, Homo sapiens
tgtccagccaatgtaatcagttaatacatatctaaggaaatttaattttggtcatactaatgttacatcagccctcaaaagaaaatgctggtagagatgactattaagaagaaattagatctttccaatgaatggtgtttcacagtaatagttgaagtctcagacaattcaagatcagccctgaaaatgggtacatccagattgacaattagaatcaaagtggaacagcagaagaacatgaacattgcagtcattctttcaactaatattaattccacacctaatatatgacagccactgtgttaggtcctcagagaatttataatctagtggaaagacaagacagataacagataatgagaatacaatattatgatgtcagcagaccccaggcataaaataagatgacttatagggttcgtttgacaatttgaggtaacataccatattttatcaattttaagaccatgagttgtaacaaacaccattatttttggaccatggagggggccggagggaaatgctgctacttaaactatgacacatagaatttttccacattgtattgaattctgctaagagcattagtgatgcaacattttttaaaataatattccactattatctttgggttttttttgcaagctgttggggtccattctatgagtttcaatgctggtgctttcttattgcaactcagaggtatcaatgaagggttttcagatcacaaccaggatttaaatcctttctttaaatgattagttgactgaaatgtcaagggtttgcagttgtctaatcatgccaccaggaataaccaggaagtttgcacatgttcaggctaagacaactacatcacaactaccttctggtgacagcattgtaagacaccatgattgtaagatgccattccagttttagaaatattggaaagatgtacatcttagatttggcaaaatatcatttattgctggcagctattaaaatatgtgttattaggagaatgtacaaagagcactgtgagcactgaggatagagcacctaactctcacaaaggaagtgatatttgggcagacagaagtcatgaggatgcatgaatgggtaagaaagggcagtttcgagctgcaactacatgtgtgggagagtggtaggaccggatgctgggccatgtcaagaagagtttcatgtgctcaactaaaaaatttttgaatcttattatttgggtgatagacaaagttttggggtcagggagtgaccctgatgatataatttggctatatcaaatctcatgttgaaatctgatccccaatattgatggtggggtctggtgggaggtgattggattacggggacaagtccctcatgaatggcttggtgccattgtctgaggattgagtgaattctcactctttgtttctgcaaggtctggttgttaaaaagagcctgggacctttctcccgtttccctcttgcttcctctctcgtcatctgacataccactctctttccccttccaccatcattggaagcttccaaaagcagaggctcgctctttccttgcctaacgcagccatggcttgtggtcccaagaagcatctgaagtgagtagcagctccaaagcactggatgctggataaattgaccagtatgtttgctccttgtccatccaccagtccccacaagttgagagtgtcttcccctcatcattttcctaaggaacagacttaagtatgccctggaaggagatgaagtaaagaagatttgcatgcagcggtttattaaaattgatggcaaggtctaaactgatataacctaccctgctggattcatggaggccatcagcattgacaagacagaagagaatttctctctgatctatgacaccaagagtctctttgctgtacatcatattacacctgaggaggccaagtacaagttgtgcaaagtgagaaaaatctttctgggaacaaaaggaatccctcatctggtgactcatgatggtcgcaccatccgctacactgatccccttatcaaggtgaatgataccattcagattgatttggagactggcaagattactgatttcatcaaattcgacactggtcacctgtgtatggtgactggaggtgctaacctgggaagaattggtgtgatcaccaacagagagaggcaccctggatcttttgacattgttcacatggaagatgccaatggcaacagctttgccactcaactttccaacatttttgttattggcaagggcaacaaactatggatttctcttccctgaggaaagggtatccgcctcaccattgctgaagagagagacaaaagactgccaaacagagcagtgggtgaaatggtcccagggtgacatgttagatctttgtacgtaattgaaaataatgtggcaagattaatagcaaaaaaagaaaaaaaaatcagagtcttatgccaggcatgcatcttgtacagcctgcagaaccatgcgccaagtaaacctctttttctttttttttcttttttttttttttttttgagacagagtctctccctgttgcccaggctgaagtacaatggcgctatcttggctcactgcaacctccacctcccaggttcaagtgattctcctgcctcagcctcccaagtagctgggattacaggcacccgccacca

SEQ ID NO: 1518 - DNA, 6499 bp, Homo sapiens
atgaagaaaatggagtttaatttttttaatacaaaaaaactcaatgaagttatacttacgttaaattggtggttattttaggtcagtggttttaaaactcaacaatgaaactgttttcaaaaagagttgttatacagaacagaaaaaagcagccacaattttaaaaaagatatgaagacccagattctcactaactcattcagctcccttcatactccctccccacagccaccccagctcctgaggcaggttcccagggctccaaggaacatacttttaaaaaatcagtattttgaatacataataagtgatgtaacttaaaagtatggtgagaaagtcccattgccaagagaaacatgttaattttttatttaaaaaatcatcactcttttcattgtgacatcttgaagaacgctgaatggcttcaaaataactgcatatgccaagatttctggagtgggcacgtttgatcttctttcataatgaaaactgacaaacatttttaagggcatagtattgtttcttcactctcccccctcctcacccctgcacacacatacatttctccttcctggggaactccaaagaaaacaaaggccctttagcaatcaagtagattgtctctcttgatggcatcccatgagttatggaattacatactgcaggcccaggtggattagggcccctagaaagtttgcttgatcaacagagtgctgttgattttttcaactgaattaattactcttggagtccaaactctccagtgtgccacagtcctcatcacttcctgtatcttaaatattgcattatctgtcccctaaaagtatttgaacatgtgacccagagaagaggacttacaacttgactaggcaacttctgtcacactggattcatatgaaattccactgcaagtgacatcaccagattggggaccctgaagtgtttgagtatcttctccacatctggtcatttaggctaagaaattccttcttgtctaccaggtcttttagcattcattttgtaagtcattcaacacctacttactgagaaggaatactgggctagacagtgtgctaggggctggggaaaccgcaatgcataggagagaattcccatctccaagaggctcacagtcaaacagacataaataggtgattacaatatacactaacaacatagttttagaaacaactagcagaattatatagacgaagatgccaggaaaggcttctcagagaatctggcttggcaaatatctcaacaaagagggctgagcagggatgagccgaaggagaggatggaaagtaggttgtgggtgagttttccaggcagcatgtgcaaaggtccaggagaaagaggaaggagcctgtacttggaggaatattcgattactattatcagtgtcacacttgctattcatctagacagaagctcctgaaacaaaaaggatacacttcaaaagatgccaatatatccatgaccacacaaaagagtgtctagtcatataataaagggtgtacatatgcaggcaactcacatcctgccaaatattaaatttctaattttattataatttctaataaaacattagatttattattatacagagtcatactccttgattgggaaactctcaactcaataaacattctttagtctcatgtcttttctaaaggaaagaaattaatgttatattcttgggtgaaaaaaatgtgaggtctcaaaagagtataatacaatttggggatgcatatatattttacatgtatatagacacataaaaatctaaaagcataaattttaatatgttaacagaagacagaagtcatgtattttttactttcttctttttggcatatctctttttctaacttttttttttctttttacaaaaaacaattgttatttgtgtacttttaaaacctcacagtaatattttcacactaccttcttggctgaaagttcacactcggaattccagagcagtccatggccaggcccactgggctccccttgctctctccttggctttggtaaccactggccccagggactcagcctgctttcctatccatcccctcagtagctgtcaccatgcaggttaccccttctgtttcttctaccactaactccatgtctgactgcaagtgaaaggaacagaagcccaaacctttgggttttaaggagtttattgctaatctgtaaaacagaaagagacaggagataagcatgacaaaatatagggaagaaatgacttttgcctaaacttcccaattgtgtacaattgaagcctctgctttatagctcttagcacacctctcaaataagaaggcagtactgggaaggctctgaacctgtggcagaaccactgatagctgtggagctattccaaggagtctgggaatcagggggattatcaagatcattgttagaataaattaatcttactgtatatatagcagaagttttcaagcatatgtaaatgctactaataaccaaataattacaccttgtttttctttaaactgtaactctcaagtatgtctctacataattttttgattggtagtgtctgcatgctcaaaaagcttgaaaacactactggagaagaaggtctcgggagtgtgatgaaatacgtttacatggcagcttcatcatttaattggtgaaagtgactatgtgtcttaaactctctgagcctcagtttgcacatccaaaagcaaggatataattccatgaacctttccacctcaagtccacaaggcagaatagcaagatgttaactgccactctgaggaccaccaaataaaaggacaatttattaggccacttgccagcatggacacaatcgactcttggcatttcttattatccacagaaaaattaaaagtataaatatagaacaaaattatcgtgttttttttaatagtaacatgtaagatcaatctttgtctttaaaataccgtgtatctcattctcggaaagcgtcaaaatgaaaatggtatagtaagttttatctacaacttgaattaaaattattcttgaaatatgttctgaatggttagatgaaatggtaattaaatacaaatagagataatcatatactctctctccataaggctcccacctccttcaatgaagtctagttcacctaaaatgacactattaacattaattcaatattataagttgataagcacattaaatcaaaacacagcaagattattttaagagtctgactgaaatgtcaggatgagaaatagattaataaatattggcttctaatgtcggtaatgaaaacaaacacgttattttcagaaaataaaaggtcttcgtcattaggtacaaatcataaagggattatctacggttactacactgtaacaactttttacatattgtattatagaacaagcttttgagaagacaaagcaacacatcagcagtttaaccaattgtctttctcttttaacaggctggtctacattagattagatataaaaggcccaggtattacttgtgttcgatcttagccacatggctgagaaacatccaggtacatttaaatcagtgacaaaagaaaacattatcccttagtaaaattacataaaataggaaacatctcttactttaagagcaacgatggtacttgttcctatggtgaaaactgatgttatctcgattagttaattattcatcccaacacctggtcttgcttccttttccacctctagctatgttaacactagagttcagtaatttgttgataaagaatcttaactgcagtatctaacagatcttagtgattaagcatatgacttaccctttgtacagataagtaaactgaggccaaaagaactgaggtatcttattaaaaatcagagagctagttagttgaaaagtccacctgtccttcctttccacatgtctcaccagaaaaacagcaatggtgaaaagtcaactctgtttttaatgggccactttgtatattttaactgttaaaataatccaagaagatagtagtcatatacgaagatcctttagatataatgtgtaggaccagcattaatttaatcaaccaagtctcctctcattgaattgttaattcataattacaaagatgacattacagtaaattaagaaatactgtaatttcattctctccaaaaagtatacattgaagtttggtgaatactgttatattttcaactagtaaatcagtgtgccaattctgggtcttaggcatattgtatatactggaatgatattcactttaattaaatttgttttgagatgtagaatgtaatacagatcctacgtgtttttaaaagttcacatcaatttcaagcttttaaaaatgtatgtacacaagaaagcttcttttgcaatttatatgtttacaaatgttgccattagctaagctatattttggaatgtgatcaaacaatattgaatgtcaagtcttaacagcagggctggtctaaggaattccctctaagctaaatctgatcctttcatatgtggctactgctcttttaaactactgtatccctaaagggctaaaaggaagaaaatcctaacttaataagtgaaggcagcaaggcatagtatttgaatggctacctttcattttaactctacttcttaaattcacaattggatttgggtttgtttcaagttgttcacaatttactaacgaaatgtgcatctctcattcttcccccaaaagaaagaagtcatccactccagctacatataagtctccaatttctgtcttacaactaaacgtgaaaaccgaaataccactcattgaaaaaaaaaatatacagagaattggcaggctgcatgtttatgtgaaccttcagaaaacatggaaacacgcagccccaactcaccaggaaaatcaacacttgtgatcaaactattttgtgacattttatgtcttttatacatttcacttcatatccagtattccagttttgcaccggcttgcctgtatcaaccccaaatcgcctgagagcaatctagtactgtagcagaaccgtttcaacatgaagagttctgctcatcgcctgtggcgtggtcttcgaaacacctgaatcaaacattgattcccctccccctgctatttaaaaccgagggacgtcaggcttgggttgtaggtaaagaaaagccacagtaatcaaacaagcaaccaaaatacccgaacacggaacacgctaagaacaaaggaaacacaagagtgtgaacaggaaatgaagcaactctacacccataaataccttctggggccgccaacataggtaaaagtaaaggtggagtctgagtatctgaaatctgaaacagaaagtcctgtcaaaagctacccctggagtggatttgttttaaccccgatcaggacttgggcgctccatttggtggagtcaggggaggcctggccgggcgggtggcgagggctagagggcggcgaggtctctccgcgcagcgtcccaggggatgcggcgcgcccccgactgggtgcagcggcaggccgcccccggcagcaagtgccgggtgccatggcaacggcgggaatttcccagtcggggcggccggaagcagccccagccgggctcgcggcagcgaaagcaaaatccgatctctctcccgggggagcaaaatggacgaaaggcgaccccccaggcaggggcgctgggtgccttgggaatccgaggaatcccttctctttgccagtcggaggggactagatggagccgaaggggccggagatgggccgagcgctgccccccgggggtcctcggcgccggacgcagcttacgagcgcaacgcagcaggctccattcccggccgccgccgctcagcccattacgcaaacctggcgggtccaaccaaccccgctctgccgccgctgctggaacccatgaggcgtgcttgcaggcttcgggcactacgcggggctggaaataccacgcactgccccttcgcctagacccccgctcgggccacgcgggttctgccctcaaagctggtagctgccccagacttgggggtggggggaggggaaggggcgaggctggcgccccctcccgcttttggctcccgcgttcgttgcagcagctgttgccaaatgaaccccggaatgcggacgtgcaaaccctccaccccacccccagccacacacgtcgcggtcagagaactgggaagggggcgcggggtccgaggttctggaaaagcaagaactcacctgcaaacaggcagtcctcagctctggacttctggatcacgacgtcgatatccttctgaattcggtcttgccttgaacacatccccattaaataaatccttggaaaagaagcagccgctatttccaccccacccccctcgcacgctttcagctttcgtaaatattcagttaaaaatgaaacctctggccgaggcaggggctgaaggccaagtggtttcggaagtgatcctgggtgagaggaggaggaggaggagg

SEQ ID NO: 1519 - DNA, 1427 bp, Homo sapiens
agatgaaaatggaaggggcgggcgcgctaggcctagtcctggctgggctcccgctggagtgtgcgttgggggcggaccaggagcggtggtctccagggaggtcgaggctggggctcccacccggatttggagcagggtcgccgcggcccagctgacccgccggcgtttgtacgttgtgtgcccactcagggagccatggacaactgtttggcggccgcagcgctgaatggggtggaccgacgttccctgcagcgttcagcaaggctggctctagaagtgctggagagggccaagaggagggcggtggactggcatgccctggagcgtcccaaaggctgcatgggggtccttgcccgggaggcgccccacctagagaaacagccggcagccggcccgcagcgcgttctcccgggagagagagaagagagacccccaacccttagtgcttccttcagaacaatggctgaattcatggactatacttcaagtcagtgtgggaaatattattcatctgtgccagaggaaggaggggcaacccatgtctatcgttatcacagaggcgagtcgaagctgcacatgtgcttggacatagggaatggtcagagaaaagacagaaaaaagacatcccttggtcctggaggcagctatcaaatatcagagcatgctccagaggcatcccagcctgctgagaacatctctaaggacctctacatagaagtatatccagggacctattctgtcactgtgggctcaaatgacttaaccaagaagactcatgtggtagcagttgattctggacaaagcgtggacctggtcttccctgtgtgatgttgaccatcactgccatcacatcacctttttttaagtagtaagaataaagccactgtatgattctcttaatagctatacattaatcctgtttttagtgctgactgggtcagccttccgggaactggagtctgtctctttcagtgcttttttgtttgtttggttggtttttttttgagacagtctcactctgttgcccaggctggagtgcagtggcgtgatctcggctcactgcaagttccgcctcccgggttcacaccattctcctgcctcagcctcccgagtagctggcactacaggcacccgccaccatgcccggctattttttttgtatttttagtagagacggggtttcaccatgttggccaggatggtctcgatctcttgacctcgtgatccacccaccttggcctcccaaagtgttgggattacaggcgtgagccaccgcgcccggcctcagtgccttttttaacttgagggtgtagaggtcctccacgcttgtttgcctgaaagtaatataatgatgctgtctgaacaggttttactgcttgctttccaagtaaaggttaattatgataataaagagatttggaaatgaa

SEQ ID NO: 1520 - DNA, 2948 bp, Homo sapiens
acaaaaaagacatccagctctaaggagctcaaaacatcctgaggacagtgcctggaggtgagaaggaagcccccggcctggtccataccccaccaccaacttgcataatggggggtgatgtcacccaccctccactcccctcaaaggagcagctgctctggtggtctctcccaggctctgggggcggacccatgggaggggctgtttttgtacaaagctgtaacattgtggggacaggggactgctggggccaacgtcctgactttcggggccggcagcaggctgaccgtgctgggtgagttttcgcgggaccacccgggcggcgggattcaggtggaaggcggcggctgcttcgcggcacccggtccggccctgtgctgggagacctgggctgggtccccagggtgggcaggagctcggggagccttagaggtttgcatgcgggattgcacctccgtgctcctacgagcagtacttcgggccgggcaccaggctcacggtcacaggtgagattcgggcgtctccccaccttccagcccctcggtccccggagtcggagggtggaccggagctggaggagctgggtgtccggggtcagctctgcaaggtcacctccccgctcctgggaaaagactggggaagagggagggggtggggaggtgctcagagtccggaaagctgagcagagggcgaggccacttttaatcttttttctggggtgtttagagagaaggtgaacgatggaggagaggatttgttaggactctgggagaggcgagactggagaggacgaagggaaatcctggtttggggaatgggtaggagtgggggtaactgctattcgtaggcaaaaagagctgagcaggctgggaacagcgcgggtgggcaagggtcagcactgcgggcaggcgggtgggtgttagggggcagaaatcctgcagccgagggtgcagtagaacacagaagaaaaagcctgccaaacaaaagtggaacagagaagccaaaaagggagatgaacatgagtcagtgaagaaaagaatgaaagtttactgtttagcagtgtggatctctaatccgacttaaaactccttgttcccgattcctattcctcctaagccagagatccctgggtccagggtgagggcacggcattcatgcttacccacgggctggtcaacaaagaggtgctgacctgagagtagggcacataacctcagccactggggtacacttaccacccccgcccccgtgtagctccctcccctatcctgaaatctcccttagcacactaagtattctaggttaaacagcccagatgttcagggagttcattcgccacaaacacacattaaaatgcagacaatttgcctgtgagatgaggaaaattctctggaagatttaggccctgagagctgaaaagggaccctaaacattacctggtgacaactgccctgaggccagagaagagaactcacaatattggcatattaaccggtaccatttgtagttaggctgtcattaatctgggtgtaatggggctcagctacagtgaagcgtatccagaggaaatgtggggttcctgcagtcagctggggcaccgaaaagacccagaatttagaaccagataaaggctgagttcgaacctctggttcttttgtgatgtggtgaccttgggcaaattaatgtgtgaacctcagtttcctcaactataaaatgtaatgaacaatacctaccacttactattgctgtgaggaagaaaagagagtcaacatgtaccgtgtacagattattgatgtaattcaatggttcttttccccatcctcctaggaggtcactggggagacagggggcagggtcagcccagtgccaaaggatgggcaggatctgaagtgtggaaatggagtaaggctgtgtctgtgtcagaggtgggttgggaagatgtgagacaaacatcacaattttgcctaaggtgaatccaacccacaagtagagcacaggccaacagcagctcactagtacacatacttacaccagcagctcactagtacacacacttacaccagacgctcactggtacacactcacaccagaagctcattagaacacacacaccgtcagcttgctagtacacacacttacaccagaagctcactagtatacacttacaccagaagctcactagtacacacacttactccagaagctcactagtacacacacttacacccacagagacaagccccacaccacacggactcacaaatgcagaagaagagttgaccctgccctcatgtacagatagtatgctggtgtgtagtgagaggcggctagtgttcgccacgcctgttgcatcaataactattccacagaacagcatacatggtcaaggaatatttttaatttttacaatgaggactgagtgtttgctaaatgaagaaatcaaaggagtacattctggagggctggtagactcccagagccagggtttttgagatgagagtgaaaataagcaggctgagagcagaaagaaagaaagttctgcagatagaagttaggatattaccacttcggccccagcccagccagtaaatgtttagaagcatagtagtaattagcaggtaggagttgtggggaggaaaggaaactgacatgatgggaagcaggaccagctacaaaatcttcaggaccagctcagaatgaaaatgccggggctcgtgttaaatcttaggatttcaacatggtgacagcagagcactaaaccaagcagggggcccttctagcaggaggccccatggggacctaggaaggaggtcacatccatacaaatgtaaagaaatgtcagagtaaatttcctccattgtccaggagattcggaataggttctcctaagactgatatttcttcattttaatagagttgctcagaaatgaaaaacaatcaatgggaag

SEQ ID NO: 1521 - DNA, 730 bp, Homo sapiens
  misc_feature (728)..(728): n is a, c, g, or t
attttaacagcaatgagatgacatgagaatatcttcaattcatcaaggatctgtaaagaaggagaggtacaagatatatgaaacccaaatctcaaaacaatgatttagtgaatttcccatgaactttaaacagtgattgcttcaaaatttccaagagccatactctccctccagctgctgtgtgtgtgtgtgtgtataaatgcacactattttaacctaaaatggtgccctgtggctgccattctctaactcttgcatacttaaacatttattcttggtcaaattaaaacctcatgcatttccaaagatataaatgccttgcctggagaagttagatcttgcaagtctcaggagggccgagatggtttgtcttatgcctatagctgtttatgtcccaccagtgggtgtttgtttcattaggtgccgtttccagccaaatgttctcattcttcacatcttcaatgttgagtagcaaacagaagaacatccttcttagcataatattgcttcactggactgattgtgaactcaaaatacctcttgtttcttgtgaagggtttgccttttgtaaacaatataagatcacttttggtcaaccaccctgtctgaatttatctgggctgctataataaagtatcataaactgggaggcttgtaaataaatttatttcttacagttttggaaagctgggaaccccaaaatcaaggccaatttggtgtctggtgangg

SEQ ID NO: 1522 - DNA, 2029 bp, Homo sapiens
gactgttctgaggagcggcccggacgcgcgccgcccccgcccgcgtttccccggcaacccgcggccgccgccatggacgcgctgttgggcacagggcctcgccgggctcgcggctgcctgggcgcggctggacccacgtcttcaggtcgcgcggcgcggaccccggcggcgccctgggcgcgcttctccgcctggctggagtgtgtgtgcgtggtcaccttcgacctggagctgggccaggcgctggagctggtgtatccgaacgacttccggctcacagacaaggagaaaagcagcatctgctacctgtcttttcccgactcgcactcaggctgccttggagacactcagttcagcttccgcatgcgccagtgtggagggcagaggagcccctggcatgccgacgacaggcactacaacagcagggcccctgtggcactgcagagggagccggcacactacttcggctacgtgtacttcaggcaggtgaaggacagctctgtgaagaggggctacttccagaagtctttggtgctggtgtcccgcttgccctttgtccggctgttccaagcgctgctaagcctcatcgcccccgagtactttgacaagctggcgccctgcctggaagcagtgtgcagtgagatcgaccagtggccggcgcctgcacctgggcagaccctgaacctacctgtcatgggcgttgttgtccaggtgcgcatcccatccagggtggacaagtccgagtccagtcctccgaagcagtttgaccaagagaacctgctgccagccccagtggttcttgctagcgtccacgagctggacctgttcaggtgcttccggcctgtgctgactcatatgcagacactgtgggagctcatgctcctcggggagcccctgctagtcctggcaccctcgcccgacgtgtcctcggagatggtgctggccttgaccagctgcctgcagcccctcaggttctgctgcgacttccgtccctacttcaccatccatgacagcgagttcaaggagttcaccacacgcacgcaggccccaccaaacgtggtcctgggagtcacaaaccctttctttatcaaaacactccagcactggccccacatcctccgagtcggggagcccaagatgtcaggagacctgcctaagcaagtcaagctgaaaaagccttcaaggttgaagaccctggacaccaagccaggcctctacaccgcttacacggcccacctccaccgcgacaaggcgctgctcaaacggctgctcaagggcgtgcagaagaagcggccgtcagatgtgcagagcgccctgctgcggcggcacctcctggagctcacccagagcttcatcatccccctggagcactacatggccagcctcatgcccctgcagaagagcatcacgccctggaagactcccccccagatccagcccttcagccaggatgacttcctgcgtagcctggagcatgctgggccccagctcacctgcatcctcaagggcgactggctgggtctctacaggcggtttttcaagtccccccattttgatggctggtaccggcagcggcacaaggagatggccctgaagctggaggccctgcacctggaggctatctgtgaggcgaacatcgagacctggatgaaagacaagtccgaggtggaggtcgtggacctggtcctgaaacttcgtgagaagctggtgcgggctcagggccaccagctccctgtgaaggaggctacgctgcagcgggcacagctgtacatcgagacggtcatcggctccctgcccaaagacctgcaggctgtcttgtgccctccctagaacaaagccaagggccacggtcccagggccctaggtctgcctgagcctcccactccccagtggtggcggcactgggccaagcacacgctccccttccttggccccccgcccagactgcaggctccccttcctgcaccaccattgtctcagcagtaaaggcgacatttggaaccacaaaaaaaaaaaaaaaaaaaaaaaa

SEQ ID NO: 1523 - DNA, 926 bp, Homo sapiens
gcagcgggcgaaaggagccggggcctggaggtttgcgtaccggtcgcctggtcccggcaccagcgccgcccagtgtggtttcccataaggaagctcttcttcctgcttggcttccacctttaacccttccacctgggagcgtcctctaacacattcagactacaagtccagacccaggagagcaaggcccagaaagaggtcaaaatggggtttatattttcaaaatctatgaatgaaagcatgaaaaatcaaaaggagttcatgcttatgaatgctcgacttcagctggaaaggcagctcatcatgcagagtgaaatgagggaaagacaaatggccatgcggattgcgtggtctcgggaattcctcaaatattttggaactttttttggccttgcagccatctctttaacagctggagcgattaaaaaaaagaagccagccttcctggtcccgattgttccattaagctttatcctcacctaccagtatgacttgggctatggaacccttttagaaagaatgaaaggtgaagctgaggacatactggaaacagaaaagagtaaattgcagctgccaagaggaatgatcacttttgaaagcattgaaaaagccagaaaggaacagagtagattcttcatagacaaatgaaatcatgcttaccaatcaaatctcaaagcacagaattattgacttgaatcatggtttttacagttttttaaatgctcaagattttgatattatagattttattttaaaatattaaaatgcaagatagttttgagctattttaaaataaaatttataacattcaacacaaaatcatggaggtgctctaaataacttttagatttcctctctctgtgtgcattaccaatatctaagtgtaaaattaataaattgttttgaattcctggaaaaaaaaaaaa

SEQ ID NO: 1524 - DNA, 893 bp, Homo sapiens
aaaaaaactctctcctcccgcagcccaagatgctgaaaggaaagaaggccaagggaaagaaggtggctccggcccctgctgtcgtgaagaagcaggaggctaagaaagtggtgaatcccctgtttgaggaaaggcctaagaattttggcattggacaggacatccagcccaaaagagacctcacccgctttgtgaaatggccccgctatatcaggttgcagcagcagagagccatcctctataagcggctgaaagtgcctcctgcgattaaccagttcacccaggccctggaccgccaaacagctactcagctgcttaagctggcccacaagtacagaccagagacaaagcaagagaagaaggctgttggcccaggccgagaagaaagctgctggcaaaggggacgtccccaccaagagaccacctgtcctttgagcaggagttaacaccgtcaccaccttggtggagaacaagaaagctcagctggtggtgattgcacccgacgtggatcccatcgagctggctgtcttcttgcctgccctatgtcgtaaaatggtggtcccttagtgcattatcaagaggaaggcaagactgggacgtctcgtccacaggaagacctgcaccactgtcgccttcacacaggtgaactcggaagacaaaggcgctttggctaagctggtggaagctatcaggaccaattacaatgacagatacgatgagatctgccgtcactggggtggcaacatcctgggtcctaagtctgtggctcgcattgccaagctcgaaaaggcaaaggctaaagaacttgccactaaactgggttaaatgtgcactgttgagttttctgtacataaaaataattaaaataatacaaattttccttcaaagaaata

SEQ ID NO: 1525 - DNA, 582 bp, Homo sapiens
tcggttttattagattacagagaatactttctctatccaaaatctgtgattttaatctagaacactgaatgtaggtcagtatccaccccattttcagaaatctgggaagatctttttttgtttttcagcttctcagaataaatactttctaggatgttacaaacatggatgaagttcaccagaacagatccagggttaaccttttaaagtcattagatatggctccagtaaaaggcatgagaaggcacccgtgagaccctgcagaggaagcctcactcctgggcagccttacggctgacgagctaccttactgagcatattcctgcctctacaccagagactcactctgtggtccggtgtcacctcgattctaaattccctgcttcctggggaatgatgctatcacacttcagaaacctggccaataaatgctttgaaatttaaggatcgctatcctgaaaaaatttaatataacctaaattgatagtctaatgacatcagtattcagaagaagcattctatttcagcaagtggttttcagaaaataagttgtaaaaatctcaagggggggcctggtaccca

SEQ ID NO: 1526 - DNA, 458 bp, Homo sapiens
tttttttttttttttttttatccaaaatgtgtgtgtgtgtgtgcgtgcacacgtgtacatatgtgcttgcgtataggattggaatctggttgaaaagtatatgcattttcaactttggagaataatttgacattatttaataaaatataccaatttaaacattactgtcagagtgtgagagttttacattcctcaaacatttctagtgtttcatttcttagcattatctaaaatgggattcataaggttctagatggttagcagctgttagggtcagcaatttctccggccaactgtaggaggacttggtatgtgtagaaaacatttattctagcaaatgaacaggcttctgatactgtgtggctcaggatctatgactaacttattctggtataaagccacccagaattcatttgaccagtttacttaaaaactagcaaatttttaggccaggtgcg

SEQ ID NO: 1527 - DNA, 1518 bp, Homo sapiens
ggtggcgctgttacatagcccgtagtcagaggcctttcagcccaggggccggcgcacgaaacctgtttggaggttatggatgataaacccaatcctgaagccctaagtgacagttcagagcgtcttttctcctttggcgtcatcgcagatgttcaatttgcagacttagaagatggctttaatttccaaggaaccaggcggcgatactacagacatagtcttcttcacttacagggtgccattgaagactggaataatgaaagcagcatgccctgttgtgtccttcagcttggagatatcatcgatggatataatgcacagtataatgcatccaaaaagtccctagaacttgttatggacatgttcaagaggcttaaagttccagttcatcatacatggggaaaccatgaattctataacttcagtagagagtatttaacacactctaaacttaacactaagtttctagaagatcagattgtacatcatcctgagaccatgccttcagaagattattatgcttatcattttgtaccattccctaaattccggttcattttacttgatgcatatgacttgagtgtcttgggcgtggatcagtcttctccaaaatacgagcagtgtatgaagatattgagggagcacaatccaaatacggaactgaatagtcctcaaggactttctgagccccagtttgtccagtttaatggaggattcagccaagaacagctaaactggttgaatgaagtgctaacattctctgacacaaaccaagaaaaggtggtgattgtgagccatcttcccatttacccggacgcctctgacaatgtgtgcctggcctggaactacagagatgccctggcagtcatttggtctcatgagtgtgtggtgtgtttctttgctggtcacacccatgatggtggctactctgaggatccttttggtgtataccacgtcaacctagaaggagttattgaaacagctccagacagccaagcctttggcacagttcatgtctatcctgacaaaatgatgttgaaagggagaggcagagttccagatagaattatgaattacaagaaagaaagagccttccattgttagtctaatttattttaacttgatagaaaatgagctttgtgtttgtccctcctaaacaaaaaaataaaaatcctctgtctcattgtttagtattcagcttgcataacaaaatgtatttatagtttcagtgtgtgatggttgataaaatactcagaaatgttattttggatcatgtatccattgtaagttagaaacaaaccagggaggaaactgaggcaggggtgtatagtcctcataaggggcatatagtcctcatgagggatcttatttggccctacctgattttttttaactttttacaaggagattgtattcacatgtgttaactatgtaacttcaagttcagcatataagctcaggtaagctttttctattcaccctgctgtgtaaatgagctttggacaatttctgctcaga

SEQ ID NO: 1528 - DNA, 4774 bp, Homo sapiens
gggggcgggtgcctggagcacggcgctggggccgcccgcagcgctcactcgctcgcactcagtcgcgggaggcttccccgcgccggccgcgtcccgcccgctccccggcaccagaagttcctctgcgcgtccgacggcgacatgggcgtccccacggccctggaggccggcagctggcgctggggatccctgctcttcgctctcttcctggctgcgtccctaggtccggtggcagccttcaaggtcgccacgccgtattccctgtatgtctgtcccgaggggcagaacgtcaccctcacctgcaggctcttgggccctgtggacaaagggcacgatgtgaccttctacaagacgtggtaccgcagctcgaggggcgaggtgcagacctgctcagagcgccggcccatccgcaacctcacgttccaggaccttcacctgcaccatggaggccaccaggctgccaacaccagccacgacctggctcagcgccacgggctggagtcggcctccgaccaccatggcaacttctccatcaccatgcgcaacctgaccctgctggatagcggcctctactgctgcctggtggtggagatcaggcaccaccactcggagcacagggtccatggtgccatggagctgcaggtgcagacaggcaaagatgcaccatccaactgtgtggtgtacccatcctcctcccaggatagtgaaaacatcacggctgcagccctggctacgggtgcctgcatcgtaggaatcctctgcctccccctcatcctgctcctggtctacaagcaaaggcaggcagcctccaaccgccgtgcccaggagctggtgcggatggacagcaacattcaagggattgaaaaccccggctttgaagcctcaccacctgcccaggggatacccgaggccaaagtcaggcaccccctgtcctatgtggcccagcggcagccttctgagtctgggcggcatctgctttcggagcccagcacccccctgtctcctccaggccccggagacgtcttcttcccatccctggaccctgtccctgactctccaaactttgaggtcatctagcccagctgggggacagtgggctgttgtggctgggtctggggcaggtgcatttgagccagggctggctctgtgagtggcctccttggcctcggccctggttccctccctcctgctctgggctcagatactgtgacatcccagaagcccagcccctcaacccctctggatgctacatggggatgctggacggctcagcccctgttccaaggattttggggtgctgagattctcccctagagacctgaaattcaccagctacagatgccaaatgacttacatcttaagaagtctcagaacgtccagcccttcagcagctctcgttctgagacatgagccttgggatgtggcagcatcagtgggacaagatggacactgggccaccctcccaggcaccagacacagggcacggtggagagacttctcccccgtggccgccttggctcccccgttttgcccgaggctgctcttctgtcagacttcctctttgtaccacagtggctctggggccaggcctgcctgcccactggccatcgccaccttccccagctgcctcctaccagcagtttctctgaagatctgtcaacaggttaagtcaatctggggcttccactgcctgcattccagtccccagagcttggtggtcccgaaacgggaagtacatattggggcatggtggcctccgtgagcaaatggtgtcttgggcaatctgaggccaggacagatgttgccccacccactggagatggtgctgagggaggtgggtggggccttctgggaaggtgagtggagaggggcacctgccccccgccctccccatcccctactcccactgctcagcgcgggccattgcaagggtgccacacaatgtcttgtccaccctgggacacttctgagtatgaagcgggatgctattaaaaactacatggggaaacaggtgcaaaccctggagatggattgtaagagccagtttaaatctgcactctgctgctcctcccccacccccaccttccactccatacaatctgggcctggtggagtcttcgcttcagagccattcggccaggtgcgggtgatgttcccatctcctgcttgtgggcatgccctggctttgtttttatacacataggcaaggtgagtcctctgtggaattgtgattgaaggattttaaagcaggggaggagagtagggggcatctctgtacactctgggggtaaaacagggaaggcagtgcctgagcatggggacaggtgaggtggggctgggcagaccccctgtagcgtttagcaggatgggggccccaggtactgtggagagcatagtccagcctgggcatttgtctcctagcagcctacactggctctgctgagctgggcctgggtgctgaaagccaggatttggggctaggcgggaagatgttcgcccaattgcttggggggttggggggatggaaaaggggagcacctctaggctgcctggcagcagtgagccctgggcctgtggctacagccagggaaccccacctggacacatggccctgcttctaagccccccagttaggcccaaaggaatggtccactgagggcctcctgctctgcctgggctgggccaggggctttgaggagagggtaaacataggcccggagatggggctgacacctcgagtggccagaatatgcccaaaccccggcttctcccttgtccctaggcagaggggggtcccttcttttgttccctctggtcaccacaatgcttgatgccagctgccataggaagagggtgctggctggccatggtggcacacacctgtcctcccagcactttgcagggctgaggtggaaggaccgcttaagcccaggtgttcaaggctgctgtgagctgtgttcgagccactacactccagcctggggacggagcaaaactttgcctcaaaacaaattttaaaaagaaagaaagaaggaaagagggtatgtttttcacaattcatgggggcctgcatggcaggagtggggacaggacacctgctgttcctggagtcgaaggacaagcccacagcccagattccggttctcccaactcaggaagagcatgccctgccctctggggaggctggcctggccccagccctcagctgctgaccttgaggcagagacaacttctaagaatttggctgccagaccccaggcctggctgctgctgtgtggagagggaggcggcccgcagcagaacagccaccgcacttcctcctcagcttcctctggtgcggccctgccctctcttctctggacccttttacaactgaacgcatctgggcttcgtggtttcctgttttcagcgaaatttactctgagctcccagttccatcttcatccatggccacaggccctgcctacaacgcactagggacgtccctccctgctgctgctggggaggggcaggctgctggagccgccctctgagttgcccgggatggtagtgcctctgatgccagccctggtggctgtgggctggggtgcatgggagagctgggtgcgagaacatggcgcctccagggggcgggaggagcactaggggctggggcaggaggctcctggagcgctggattcgtggcacagtctgaggccctgagagggaaatccatgcttttaagaactaattcattgttaggagatcaatcaggaattaggggccatcttacctatctcctgacattcacagtttaatagagacttcctgcctttattccctcccagggagaggctgaaggaatggaattgaaagcaccatttggagggttttgctgacacagcggggactgctcagcactccctaaaaacacaccatggaggccactggtgactgctggtgggcaggctggccctgcctgggggagtccgtggcgatgggcgctggggtggaggtgcaggagccccaggacctgcttttcaaaagacttctgcctgaccagagctcccactacatgcagtggcccagggcagaggggctgatacatggcctttttcagggggtgctcctcgcggggtggacttgggagtgtgcagtgggacagggggctgcaggggtcctgccaccaccgagcaccaacttggcccctggggtcctgcctcatgaatgaggccttccccagggctggcctgactgtgctgggggctgggttaacgttttctcagggaaccacaatgcacgaaagaggaactggggttgctaaccaggatgctgggaacaaaggcctcttgaagcccagccacagcccagctgagcatgaggcccagcccatagacggcacaggccacctggcccattccctgggcattccctgctttgcattgctgcttctcttcaccccatggaggctatgtcaccctaactatcctggaatgtgttgagagggattctgaatgatcaatatagcttggtgagacagtgccgagatagatagccatgtctgccttgggcacgggagagggaagtggcagcatgcatgctgtttcttggccttttctgttagaatacttggtgctttccaacacactttcacatgtgttgtaacttgtttgatccacccccttccctgaaaatcctgggaggttttattgctgccatttaacacagagggcaatagaggttctgaaaggtctgtgtcttgtcaaaacaagtaaacggtggaactacgactaaa

SEQ ID NO: 1529 - DNA, 1071 bp, Homo sapiens
cgggtggcgcggagcacgagaaacaacgagtttctgtctagatcgtgggggacccaagcccggggttgcgtccaaggtcggggatggagaggacgcgagccccgcggcagtcgagatggcctttttaaaattctatatttgagaaggagtctcgcgctgtcgcccaggctggagcgcaatggcgcgaaatcggctcattgcagcctcgacgtccaggactcgagcgatcctcccgcctcagcctctcgagaagcagcacaaaacagagtaagacagtgacaaagatactcacctgtacaaaggaggaagcttcaaaagaagccattcatgtatggggtgggactgcagaaggaccacagtagagaatccctcaccaataaggaactgtgttaatcaggagtggccagaaggctcctctccaggcctcacagagggaaacactggtctagtgagagacctgcgtcctgcccatcaggaccgaagcggcacgcgtgaggatcctgcaggccaagagacaacagcgattacaaaccccagtcccagccttgcagctgaccttgcaggtgacgccctgcctgggtgtctcggtgcagctgcacatcaggggcctctgctggacagaagctctgagtccacacttggcccccaggcgctggagctggagcactgccacgagaggggatgctgccgtggctgcgccagcttcagccctttccctgcaccgagatgtcccagtgagcggctgggtgctcacagttcccgttgggccatcagaggaagatcaaagatcaaccctcccccatgggctcctgcctgcctgccaggtgggtttcctgcctgtctcccagcccccaagagctccacggactctgccagtagctgctttaaaggagggagggagttttctgatcctctggacatccctggggctggagctatgggctgagccataggagagccagcccagctccctgggggttgggggctgtgtctctccatcccttagtaaaaatacagcaactcccaactcaaaaaaaaaaaaaaaaaaaaaaaaaaaaaaaaaaaaaaaaa

SEQ ID NO: 1530 - DNA, 5228 bp, Homo sapiens
acaccaggaccccacctctggctttcaggaaagaggggcccaagctggcggcgcagtgttgagtttacttgggcgcgactggctttattgtaggtccccatgagctggtgggggctgtaggggtaaccaggcagggcgtctggcgctgttggggctgcgtttttccggagtccccctatgcgaggccgtgcccctcttcgcccggctcctggtgctccccagccgccggcccgctcccggaagctgcagcagctggtaacaaagagcctgccgggccgcctgctgccggggccgaggtatccaggagtcgggcggagcggctggggatgagcgcgagccggaccatgcgtccgggttcgcggcggtgagggtcgcggccggcggccgaggcgcaggtgcgggtcgagagaccggcgcctccctccccgccgcccgtggactctgagcgcaggtgtttctactctgccggccgctccacctgggaaagcgccttcaagagctacctctggcggcacctggccctcagctgcagggaaaccgcactcaaacctgccgccgagcccgggtttttctgcaaaactcagaggacctggctcttgcccgaggtgccctgaaccattgtgtgaataagctggggaagcctgactggagtgttttttctttttaataaaaagagtttttctgaatctcaatttttagaaattttttttgcgaagtttgcaatactctctacctcttcgcatcctctcttgctcgtggagtctttttcctcctcagctataaatattttttactatcggcggagcagaccagggatgaacgtcttttaattgcaagtataactgttaaaaccacgtcgggatagtagtcaagatggataaaaagtcctttgaaatggtgctggatgaaattagaaaggctgttttgacagaatacaaattaaaagcaattgaatatgtgcatggatacttttctagtgaacaggtggttgatttgctgagatatttttcctgggccgagccccagttgaaggcaatgaaagcattacagcataaaatggtggctgtccagccaacagaagtggtcaatatactcaactgtttcactttcagtaaagacaaactagttgctcttgaactgttagcctcgaacattattgatgcacagaattctcgtcctattgaagatttattcagggtaaatatgtctgagaagaaacggtgcaagagaatacttgaacaggctttcaaggggggctgcaaagctcctcatgctatgatatcttcttgtggaacaatcccaggaaatccatatcccaaaggaagacctagccgcataaatggaattttcccaggaactcctttgaaaaaagatggtgaagaatgtactaacgaaggcaaaggaatagctgcacgaattcttgggccatccaaaccacctccttcaacatataatccacataaacctgttccttatccgatacctccatgccgaccacatgcaactattgcaccaagtgcttataacaatgcaggtctggtaccattagcgaatgtcatagctccacctccacctccatatactcctaatcctgtaggaacagagaatgaagacctttcgaatccgtcaaaacctatacagaatcaaacattttccaccccagcaagtcaactcttttctcctcatggttctaatccttcaacacctgctgcaactcctgttcctactgcatccccagtcaaggcaattaatcatccatcagcatcagcagctgccaccgtttctggaatgaacctgctgaatactgtccttcctgtgttcccagggcaggtctcctcagccgttcacacacctcagccatcaataccaaacccaacagttatcagaaccccttcattgcccactgcacctgttacatccatccacagtacaaccaccactcctgttccttccattttttctggcctagtgtcactgccaggtccttctgccactcctaccgcagccactcctaccccaggacctacaccacggtccactcttggttccagtgaagcatttgcttctacttctgcacctttcactagcctccccttttccaccagctcttctgctgcttctaccagcaacccaaattctgcttcattgtcatcagtttttgcagggctccctttgcccttaccaccaacatcccaaggcctatccaacccgactcctgtaattgctggtggctctactcccagcgttgccggtccacttggtgtgaacagtcctcttttgtctgcgttaaaaggttttctgacatccaatgacaccaatttaatcaactcctctgctttatcctctgctgtcacaagtgggctggcttcactatcttctcttactcttcagaactctgactcttctgcttcagcccctaacaagtgctatgccccatcagccatccctaccccacagaggacttccactccagggttggccctgttcccaggcctgccgtctcccgtggctaactcaacttccactcccctgacattgcctgtacagtctcctttagccactgctgcatcagcttccacgtcagtgccagttagctgtggctcctcagcctcccttttgcgtggcccccacccaggtacctcagatctgcatatttcatctacccctgctgcaacaactcttcctgttatgatcaaaactgagcccacaagtcctactccctcggccttcaaaggtccatctcattctgggaatccctctcatggcactttaggtttgtcagggacattgggccgtgcatatacttcaacatccgtgcccatcagtttatctgcttgccttaatcctgcattgtcaggtctctccagcttgagtactcctttaaatggttcaaatcctctttcctctatttcccttccaccacatggttcctccactcccattgcaccagtattcactgctcttccttcttttacttctttgaccaacaattttcctttaactggcaacccatctcttaatccgtcagtatctctcccagggtcattaatagccacctcatctaccgctgccacctccacatctctccctcatcctagctcaacggcagctgttctctcagggctttctgcttcagcaccagtctcagcagcacctttccccctcaacctgtccactgctgttccctcacttttctctgttactcaaggacctctgtcatcttcaaatccctcctatccaggcttttctgtctctaataccccaagcgttacccctgctcttccctcattcccggggctgcaggcgccctctacagtcgcagctgtcacaccactacctgtggctgccacagccccatccccagctccagtcctcccaggattcgcctcagcattcagttccaatttcaactccgctcttgttgcacaagccggtttatcatctggacttcaagctgcaggcagttctgtttttccaggccttttgtccctcccgggtatccctgggtttcctcagaatccttcacaatcatccttgcaagaattacagcataatgcggctgcgcagtcagcattgttacagcaggtccattcagcttcggctctggaaagctatccagctcagcctgatgggtttcctagttatccttcagcgccaggaacaccattttctttgcaaccaagcctgtcccagagtgggtggcagtgaatacttttaacttttattctccttcagagcaacatcagaattgcctgagaactgcaatgaacaatctgacaaatgtgaagctggccaaaagtcggaaaatgagaatgagggtaatcctggagaaattgtgacaacaatttgaaaattgtggttgcattttaaagtgtgaacactcccctatgtaaatatgctgacaataaattgtatggagaatggtatttaaaaagtgtttggagacttttcacctgtcctataaaattttgaattgtgtatgtgatctacatagaaagaatattaaagagtaggttgaactctttatagccgaatacagccttaaatatgcttgtatagcatccactggcagaagtaatagttgtgcctcagacttgggggttgcatgtggccctgggggagttactacccttggtatgcatgagcggttcctattagcatcagtgggaactcagtactctgtatgtatccacaaaagggaacttgagacccacagttattcttaatttctgatattaacaaccgtacatactgctgaatttaactcaaaatatttcaggtaagtgaaagtggtgcttaatgtagactatagaatgactttcaggtgttttcaactgaaagtatatatccagaactgcatccttatagaaatacaagtaagacttaggataatttgccttcaaaacagttttcctaatctcagcagtatccagtgagtgaagaacacttgactgactcttgggccacctctgttacttactgtactatggaagctcctggtgaatgtttacaattatgggatgtagtatttctatttgtactttaagtcaaatgcttatatgaaatatgtgacaacaaatagagaagactggctctgttagtaattatgcagtatgtactctatttaaggatctgtggtagtataacatgagtgaatgtcattaattttgaagtaataactgccacatgtgggaagtaggggagtaaggagaatgaattccaatctgtgattaaaagtgtaaactatagactctactgtagtacatttcaggatctagaagttttacttttataaagatggtgtccggaagatgttgctaatgtattttacttcaacatagggaacaaactttttaagtatattaataaacctgtatggttagtttttaacagttttttaaaataaactatggatatgacaaatattctgtgttttactaagtgcttggataggctttctaattttgtatacgtgctagagttaattattgaacatttttatccaaatttagttgtaactctgtttatactactgattgctcattcgtttaaatgatattttaatgtaaaagtcataaccaacatatgaacagacagatttatgtctttaaacacagaatgtaagctatagtttaatctgataccagttgctggaagttgccatttgtttttcttaaatctatacccataaaacttcttttaagattaaaaaaaaaaaaaaaaaaaaa

SEQ ID NO: 1531 - DNA, 634 bp, Homo sapiens
gggctggagggaggcagggcacccagccggaatggcatgatcctgaagcccaacttccacaaggactggcagtggtgtggccatgtggctcagccagcccatggggcagacctgcagaagcaaggtggccagcaaaagcaggctgcatggcccactgatatgggcccatccacccatagtaaggtgccccatgctgaggcatcactacaaagcacaagctggcaggggcctcagcttggaggagttaagggtggctggcatttacaagaaggtggcccagaccattggcatctctgaggatgcaaggaggaggaaccagtccacccaggccctgcaggccaaggtgcagaggctgaaggaggaccgctcctcactcatcctcttccccaggaagcccttggcccccaagaagggagacagttctgctgaagaactcgaactggatactcagctgacaggaccagaaatgcccatcggcaatgtctacaaggagaaagccagagtcatcgctgactaggaggaaaacttccaggccttgttagtctctgtatggcccatgcaaatgcccagctcttcggcatataggcacaaagagccaaggaagctgtagaagaggacgcttaaaaaaaaaaaa

SEQ ID NO: 1532 - DNA, 1009 bp, Homo sapiens
agacggcaccgaaagcgaaggaagctcctgctcctcctaaagccgaagccaaagcgaaggccttaaaggccaagaaggcagtgttgaaaggtgtccgcagccacacgcaaaaaagaagatccgcatgtcactcaccttcaggcggcccaagacactgcgactccggaggcagcccagatatcctcggaagagcacccccaggagaaacaagcttggccactatgctatcatcaagtttccgctgaccactgagtcggccgtgaagaagatagaagaaaacaacacgcttgtgttcactgtggatgttaaagccaacaagcaccagatcagacaggctgtgaagaagctctatgacagtgatgtggccaaggtcaccaccctgatttgtcctgataaagagaaggcatatgttcgacttgctcctgattatgatgctttcgatgttgtaacaaaattgggatcacctaaactgagtccagctggctaactctaaatatatgtgtatcttttcagcataaaaaaaataatgtttttcataagaatgacaacttaattagaatcaaatctataagctttaagattttacgtttctagtaagtataatattagcttatttgactagaactcaagcagaataggaatttatgcttgttttatattcaataatgataattttgaagatatagttgttttattacaccaaaaatactatattaatcttatttaactaagttttatccaaatcatgttaacttaagaaacatttgatcagttcctatatttctaggagtttggtgaatatttatttataaatgcttatttttttccaagccaagttagaatagagcacttttagaggttttcataaatgaattttgcaatgctctctggagttaagaaaatatcacatatacataacatacattaatagatacacaaacacaaatagagatttcatagctttcatcctgaaatttcagccatgaatcaggcataaatattctgatgg

SEQ ID NO: 1533 - DNA, 588 bp, Homo sapiens
atggctgctggtgggtgcctccttcttcttgccttctttccattgtctagagggagccatttccacttgcagaagcgagcccttgcagaggcatcttttgaagcaactctgtgtgagttgtttgtcatagaaactgctagcaagggaactctgctaataataactattaggcacctagtaacctatattgtagtaatatttaagtgccatatgcttaaaaatgaaatgaattcaagtataaaacctcatttccagtgatacatattttttatccagaagaattgaacttgataaacttgtctaaagtggaaggacaatctaactggacattgtctttaaggtcatagtctttaaggtcaaattaagtatgagactcaagttcagtgatttcttccttcctcactgcttccttctccctttcccatcttgacttctggaatagcccttgccaaataccagggatcatactgcataaactagattttcagtgtctgcatgttttccagataacatctcctttaaagcattggcttttctttaaggagatctgctgagattctgctccctcaagctagcacgctaactggt

SEQ ID NO: 1534 - DNA, 788 bp, Homo sapiens
ggagcatgcgcactggcaggccctcgctcagcctttggagaccatgcgcaggcgcggtgcactgtgcgcgggcaccacggcggtttttcgacgctggcggtggacgcaggcagcatggaccacggttgctgggcggatggggagcgtctatggtcagttgccttagaagtggtgagatgggaagctgcagttggaagaccctggaggatgcctgacaaggggatgtctgacacatgattggagctctttttgaaatgtttcttgcccttcctggagcagaggagccattatttatgcaggtacatcgaagtcttttgacctccatacagtgattatgcctgtcatcgctggtggtatcctggcggccttgctcctgctgatagttgtcgtgctctgtctttacttcaaaatacacaacgcgctaaaagctgcaaaggaacctgaagctgtggctgtaaaaaatcacaacccagacaaggtgtggtgggccaagaacagccaggccaaaaccattgccacggagtcttgtcctgccctgcagtgctgtgaaggatatagaatgtgtgccagttttgattccctgccaccttgctgttgcgacataaatgagggcctctgagttaggaaaggtgggcacaaaaatcttcatgagcaatacttcttagtagattgttttgttattcaaatcaagttctagtgtttttatgtgagattatataatttacagtgttgttttatatacttttgaataaatgtacactattaaaaataaaaaaaaaaaaaaaaaa

SEQ ID NO: 1535 - DNA, 1030 bp, Homo sapiens
tccattggtcttcaccagtagttctgcagtggggatctgcacttctgggcttcagcacacatcagtgtggttcacgtgtttcctgctgttatgaaagagattggagaggactaagcttggaattgcctgtcccacagcaagaggctatggagctgggccacggagcagggcccatctgaatgacaaggagggccaacaggacttggacccctggaaagcggcctacagttccttggacacctccaagttcaagaaccagggtctgtcatccccacagcccctgcccctgggagccagcgctcaaggcagctccctagggcagtgccacttgaaggagattccccctccacccccgactgctgccagcagggattctctgggcatggacccacagtccaggtccctgaagaatgcgggctctcgatcctcctcgagagagaacagggccacctcgggagagggggctcagccatgccaggggacggatgacggtcccagcttgggggctcaggaccagaggagcacgcccacgaaccagaagggcagcatcattcctaacaacattcgccacaagtttgggagcaatgtggtggaccagctggtctccgaggagcaggctcaaaaggctattgatgaagtcttcgagggccagaaaagggcaagctcatggcccagcaggacccagaatcctgtggaaatctcctccgtcttctcagactactatgacctcggctacaacatgcggtcaaacttgtttcgaggggctgctgaggagacaaagagcctcatgaaggcttcttacacaccagaggtcattgagaaatcagtgagggacttagaacactggcatggcaggaagacggatgatctggggcggtggcaccagaaaaatgctatgaacctgaacttgcagaaagcactggaagagaaatatggagaaaacagcaaatccaagagctccaagtactagttttgacacagtagaggtgtcttctactcaaataaagtgctaacaataaggaaaggctca

SEQ ID NO: 1536 - DNA, 396 bp, Homo sapiens
tggctgcaggctccaaacaggcatgcgaggtgcctttggaaagccccagggcactgtgaccagggttcacattggccaagttatcatgtccatccacaccaagctgcagaacaaggagcatgtaattgaggccctgcgcagggccaagttcaagtttcctggccaccagaagatccgcatctcaaagaagtggggcttcaccaagttcaatgttgatgaatttgaagacatggtggctgagaagcagctcatccctgatggctgtggggtcaagtacatccccagtcgtggccctctggacaagtggcgggccctgcactcatgagggcttccactgtgctgccccctcttaatactcaccaataaattctacttcctgtccaaaaaaaaaaaaaa

SEQ ID NO: 1537 - DNA, 558 bp, Homo sapiens
gttactgttactagtttaaccactcttcagttattaatttagcaagaatttattgagcacctattggtgaaaggtaccaccttggctctggagacaccacagtgtggaaaaacacactctgtgggcagagagtctgccgtctgctaaatgaggaccagtatcttttccttgggccatgagggtccctctccccggatcgtggttccaatcacagcctgagggccaggaggctgggacctggtttgggccagaacttcttcataaggattaagccctctctcccctttacctccagaggttggaaacatcttcccctgtagcaaggcagtcaccttaaagctgcctctacttcccgttactcctgctacttctccgacccttctcactaccctctagttgttttaactcagtcatggggatccttgacacatccagacagagagagagagaaggcctaaatttccacaagcagtagcgacttcccaggtacataaagtcccatccttcaaggaagaggatgtgtggttccaacctgaatacaggttcctaacttggtaa

SEQ ID NO: 1538 - DNA, 1259 bp, Homo sapiens
ggattgggatattccgactccttaagggcctggcgcacataaggtgtgaccttttcattcccgttgttatggaggtaggctctctaggaatctgggagtagtagctggggggcaagagcaaataaagagctcgagcttctgtggtctctggggagatgttcccgggaagcctgtctagagggcggagggcagctgttgagatggcgtggctccccggctcctgcgcccgcgtggctttcgcggcgggcgctgcggcccggtattggacagcctggcagggcagcgcggggccgaatccggctgccgtggctgaggctcatggatcactcttttgtggtagggccacatctgccagagcctggagtctgcgaaggccgggacccggttccccggcccacagtgggggtgtgcaaacccgagagaactggattgcgtacccactgcagagtgctgaagacggggtagccacgaggttgcaaattcgtgaagaatcagcatcatgtttggcagctgagtattggagccaggagcctgccatgaggttttgagaacagagtgctgttttagagctggcagcagcatctcagcccaagagaaggttatattcccagaggatgtcagtcccaaggaccagtagctgccatcagtttggattctgaaaactaactggcatcaacactgggtgtagaaacatgcttgccttatgtatcagaggacatgctcagcagatccaagagatatatttggcaactttttctagaaaaggcacattgggtatcattcattacattcttgagtttttttgggtttttttttttttttttgagacagtcttgctgtattgcccaggctggagtgtggtggcacaatcacagctcattgcatcctcaatcacccaggcctaagcaatcctcccaccttgtagctgggactacagctcacagcacacctggctaaaattttttttttgttgagacggattctctatgttgcccaggctggtctcaggctcctgggctcagatggtcctcctgcctcagcttccaaaggcacaggccaagttgtagctttgtcccttgccatcatgcccaacaagaggttctataccttttaatgaattgactttcataaattggttatgttggtgggcaaagttctttaagctggaaattgtaaattcctcctgaaatgttttttcatgcagttaccatgaactaatactacaataaaggatggtcttgggtgtcaattcttgaaaa

SEQ ID NO: 1539 - DNA, 842 bp, Homo sapiens
ctttttgcgaagtgggctcgtgggttggcagtatgagagttgtaatggcccgactgttgagtgagggggagcaggggatcccaacggcttgcgctgcctttgcgcagcagccggcgggcggccacgtcgcggcctggctggggtaggagagggcggtccccagtgcagttgggtgaactaccgttgcacactggagtttctggtgtctttgcttggaactgacctagctcgtggcagggggaactcggctagcggccccacagcccctgctgactcaaaacaactgagttgtaagacgttcatcgccgtgttatccttgagtaaagaagcgggcttttgccatgttgtccaggctggtctctactcctgggctcaagcagtcctcctgcctcagtctcccaaagtgctggaattacagggaatgaactctggaagcccagccagggacaatgcaccttcacagagattctgcactaatctgagtgaaggtctaaggtttggaatctccccctcatggagagaagctttgtatggctgtcatgcttagacagtgattcctgcaacttgaccttcaggctgggagaggtggagagccatgcctgttctccttccttgctatggaatttgctgacacaatatcttccgcctggtgctgggcatatcctaagaacttacaactttcctgtattatcctgtgtgagcagctgtcaccttattgggggaaaaatgcctgaaaattagggggcacttcaagtagatagcttctatttcctatatttgtcttatatacaagtatttgcttttatcaaaataattccaataaagcattttaaagtaaagaa

SEQ ID NO: 1540 - DNA, 422 bp, Homo sapiens
aattcgcggccgcgtcgacctcttgccagtgttacagacagtttaaaatctcttagggcatcatgaactacacaaaaagtgcctgaggagtggccaaaagtgagaagatagctaccaattggtggggcaccatcaaggcaaggagaagagtgactagtggcactgagaaacctcgctgagaaagctgatcagagagaaggtcccaagaggctggaagatcctctcatctcaggctgacattgggactccccttggattatctttgtatcaggagggcctcagaaggtttctctgaatgtagatgcctttctaccttgcaaggctggcaggtggttacaaagggcacaggctttccaagtgctcaaagagaggacaaaaacttctggaaaagcacttggtgcagccgtaaaaaaaaaaaaaaa

SEQ ID NO: 1541 - DNA, 3277 bp, Homo sapiens
cgaacacgccgcggtcctcgtcgtggtgagcgcagccactcaggctggtcctgggggtggggctgtaggggaaagtgctaaagccgctgagtgaagtaagaactctgctagagaggaaatggctgcttcatcatcatcctcctcagctggtggggtcagtggaagttctgtcactggatctggtttcagtgtctcagaccttgccccaccacggaaagcccttttcacctaccccaaaggagctggagagatgttagaagatggctctgagagattcctctgcgaatctgtttttagctatcaagtggcatccacgcttaaacaggtgaaacatgatcagcaagttgctcggatggaaaaactagctggtttggtagaagagctggaggctgacgagtggcggtttaagcccatcgagcagctgctgggattcaccccctcttcaggttgatactgcctggatggtcacctctggtgcgcagcaagtgcaaagccagtgggggactttctcacagcttacatagccatccagagatccacagctacgtcactgaattgttaatgcacatttgtacttggtttctctgtatctattcacaggcaacaaatacttatatgtgtgatctttcagggaatgttttgtttatttgtttttaaaagtattgggaatcagattaagacaatcagtttcagagaaccaggaggtttggggttaagagatactcaaaaattttcacaagccaagtagggcatatatcagatttggccaactgaatggcgtctgtcctgtcatccatatggtgcctggaaatatttaccagtcaaggtcaaggtcagcatctgtggttaaaaatatagcattctgacctaaaaaagttattttgcagatgaatgtgttttcaactcaggacctatccaaatgaggaatttttaaatattcttttttttttcctatttttagacatcaattctatagattctgactttttctaacctcttatagacatgccaaatgctggcaaaaagaagtgctttttggatatggcagcacttgtaaaaataaagcagtaagcaaaatccttttaaacacagaaatcctgagttcttctcattggtggactcaagcaattctgtagcaaataaatcctttgaaagagctccaaattggtggcattatcctttcaaaatctcagggatttgggatgaagtgaagaggtcaaattactttttagaagaagggaatctaaaaaccatctctcctaaacaaatggtagactggctttacttaagggatatttgtctttataggagtacataaatttatcttaatgatatttaagtagtttttttttttttttgggacgaagttttgctcttgttgcccaggctgtatcgcaatggcgcggtctctgctcactgcagcatccgcctcccgggttcgggcggttctcctgcctcagcctcccgagtagctgggattacaggcgcccgccaccacacccagctaattttttgtatatttggtagagacggggtttcaccgtgttgaccaggctggtctcgagcttctggcctcaggtgatccacctgcctcagcctcccaaattgctgggattgcaggcgtgagccaccttgcccagccaatttttttttaaagagacatggtcttgctatgttgcccaggttggtcttgaactcctggcctcaagagatccccccaaccttggcctccaaagtgctgggattacaggcatgagccaccgcgcctggcctcaagtaagtttttataccatgataggggaaaacctggaaggctaagagatgtgctgttttccttcatgggaccccactttccacagtaaacaactggtataatcatttattacgttgtatgcaaattttgccttagacaacatttgtctggttccttattaataacttgcatctgatctgcttagagttgcttaattataagtaaatataatcccagtagcatttagccttaatctcaagagttcaaaatgtttaacacattctacctgacgggaggtggtgacctcattcagtcggttaagagcctgagccctgtgaagttaaacacctgctcatggtcacatagcccaggcagaagaaaatctcggacttggaatagatcccagttgcctgataattcatctcattattgcctctaaagcaaattggagactgggcacagtggctcccacctttaatcccagcacctggggaggctgaggtgagtggatcactagaggtcaggagttcaagaccagtctggccgacatggtgaaactcagtctctattgaaaatacaaaaattagctcagtgtggtggcacacacttgtaatcccagctactcaggaggctgaggcatgagaatcgcttaaacccaggaggcggaggttgcagtgagctgagatcacaccattgcactctagtctgggtgacagagcgagactctgtctcaaaaaaaaaaaaataaagccgggcgtggtggctcacgcctgtaatcccggcactttgggaggctgaggcaggcggattgcctgagatcgggagttcgagaccagcctggccaacatggtgaaaccttgtctctactaaaactacaaaaaaaattggccaggcgtggtggcgggcgcctgtaatcccagctactcgggaggctgaggcagcagaatcgtttgaacccgggaggcggaggttgcagtgagtggagatcgtgcctgtgtgctccagcctgagcaacaagagcgaaactgtctcaaaaaaaagaagaaaataaataaataaaaatcagagcacaagaagtaccagtccaccaactcacattttctatattaataattcttaactaaaagaagttccatattcgacagcattttagttttttaatagtacttattagcatcaaccatcttgataatcaccaagggaaaaattaaaaatacctagactgcaataaacctttaaattggattttcagtgagaatttagaagcaatcactacctttctcgtttcatttgtgtaaccatgcagcataggcactgtgttacatcatctttacgctttggtatttgaacttattacagaattttttctctaaattggatgtttctttatatgaccttggaaactgaagtgatcttagcattaaacaaaaatgctttttgaaaaaaaaaaaaaaaaaaaaaaaaaaaaaaaaaaaaaaaaaaaaaaaaaaaaaaaaaaaaaaaaaaaaaaaaaaaaaaaaaaaa

SEQ ID NO: 1542 - DNA, 813 bp, Homo sapiens
gcgcgggcggctggggaatggctgctgccatggtgccggggcgcagcgagagctgggagcgcggggagcctggccgcccggccctgtacttctgcgggagcattcgcggcggacgcgaggacaggacgctgtacgagcggatcgtgtctcggctgcggcgattcgggacagtgctcaccgagcacgtggcggccgccgagctgggcgcgcgcggggaagaggctgctgggggtgacaggctcatccatgagcaggacctggagtggctgcagcaggcggacgtggtcgtggcagaagtgacacagccatccttgggtgtaggctatgagctgggccgggccgtggcctttaacaagcggatcctgtgcctgttccgcccgcagtctggccgcggtgagcaccccaagcctccctcctggctttctatggacccagccctcagctccttccctggtgggctctgagcaccgcgcctctcccaaggggtaagggagctgtgagggtgtggatgggaggcagcttcacctttccctgccctttccagtgctttcggccatgatccggggagcagcagatggctctcggttccaggtgtgggactatgaggagggagaggtggaggccctgctggatcgatacttcgaggctgatcctccagggcaggtggctgcctcccctgacccaaccacttgacttaatctcactttcttaaattcttctattctcagacactgctctagtaccattccttcctcttagccccaggagcaaattaaaaggtacagttaaaatcctaaaaaaaaaaaaaaaaaa

SEQ ID NO: 1543 - DNA, 1394 bp, Homo sapiens
ggaagttctgcccggcgctctccgccggtgcctccctggttatattgttgaacaggaaacccggcagcgcgggagccgcacagtcgaggagggagcgcgggacgccgagcccacgcgcgcctgccggggcaagtggaggcgaagccggcgagcggacgccccgagggtcggggaaggaaccgaggtccggtccccttcttatccagcccgagacatcgagctccggtgggcgtccctgcgctgggaatcccgctcggagtttttccaggcccggccgggctgctccgggaaaggccctgctcctgttccgcgcagcctctccggcctcgcccctggaaaccccgcccagggcgatggtaggggcctaacctgcagccaccgccggctccgcccacccagcccatgggctccctgaggcccgcccagccgacgaaaacgccgcggctgcgatggcggcggacgtggtgggggacgtgtacgtgctggtggagcaccccttcgagtacaccggcaaggacgggcgccgcgtggccatccggccgaatgagcgctaccggctgctgcggcgcagcaccgagcactggtggcacgtgcggcgtgagcccggcggccgccccttctacctgcctgcgcagtacgtgcgcgagctgcccgcgctgggcaaccctgccgccgccgcgccgccaggtccccacccgagccccgcggcccctgagccgctcgcctacgactaccggtttgtgagcgcggcggcgaccgcgggccccgacggcgcccccgaggagtccggaggccgagccagctccctgtgcggccctgcgcaacgcggcgccgcgacccagcgcagcagcctggcgcccggcctgccagcctgcctgtacctgcggcccgcggcgcccgtgcggcccgcgcagtccctgaacgacctggcctgcgccgccgtctcgcctcccgccggcctcctaggaagcagcggcagcttcaaggcctgcagcgtggcgggctcctgggtgtgcccgcggcctctggcgcgcagcgactcagagaacgtctacgaggtcatccaggacttgcacgtcccgccgccggaggagagcgcagagcaggtacctccccgggcgctggggcgcggaggcgggtggcgcgctagggaccgcgcccgcacggagccggggcgcaaggagacccgctccgctcagcgtcgggcacgacgcccacctctgtccgaagacttcggatgagctccctctccccaaccgcgaaacgtgaggggtgcacgcccgcagtccctcatcagcaattcccaagctccaaagctccctggaagcccagaggcttttcgtaatccaattggtggcaaaattgcgcttgaactgaaaaaaaaaaaaaaaaaa

SEQ ID NO: 1544 - DNA, 1280 bp, Homo sapiens
aatacctgcgttctgtagcgctagttctcttcaagatttgcttagtgtcatttcatttcggtttcttttctcgccatgtttttctgtcggaattacggttcgttttggttctatgtactctctaaaatgttatcgtttttcatttgtctactaattttcgtgcatttgttactactgagtttcttaatatctgactggcctccgcccacgggctctgcagagcataaatactcaggctgatggtagtgcagagactctccctccttgatcagcgcaaacgttggtctgaggcttgagggatggagcaacattttcttggctgtgtgaagcgggcttgggattccgcagaggtggcgccagagccccagcctccacctattgtgagttcagaagatcgtgggccgtggcctcttcctttgtatccagtactaggagagtactcactggacagctgtgatttgggactgctttccagcccttgctggcggctgcccggagtctactggcaaaacggactctctcctggagtccagagcaccttggaaccaagtacagcgaagcccactgagttcagttggccggggacacagaagcagcaagaggcacccgtagaagaggtggggcaggcagaggaacccgacagactcaggctccagcagcttccctggagcagtcctctccatccctgggacagacagcaggacaccgaggtctgtgacagcgggtgccttttggaacgccgccatcctcctgccctccagccgtggcgccacctcccgggtttctcagactgcctggagtggattcttcgcgttggttttgccgcgttctctgtactctgggcgtgctgttcacggatctgtggagctaagcagccttagatagcagcagaaggctttttggattctcctccttgaaaagattctcagttaccaaacgtctccacctagaaaataaaaatacattaagatgtgctttcattgctggttgtcagtttttaaattctctttttcccttatgtttctttcttgtttcgcgtcgcttattactttcagtttccttgtattttaaatatttgtatttatttcattaaatatttcattcgtatctgttttcactttgagaaatctattttacgattgtagaattcttagagtttttggcaaatttaaaatttgtttttttccattgtattttaaaatcttattcctactatttttctaattattgctttttaaatgtattgtttgtttacatttaattttaaaaaaaaaaaaaaa

SEQ ID NO: 1545 - DNA, 2073 bp, Homo sapiens
cagcaccacaccaggaccctccagaggctgtgagaaacatcctgcacccaggtcctctctatctgtttatcattgtctattttgtattctgcattcagaaccaagagcctgaagacgacccaggagctttagctatggctgtcttcattattttgtccctgtttagtgttctggtgacaggcatgggtgaaggtggggctgggagtgagaaaggaggtgagagggaatgtaagctgaaccagcttccccattgcccctccgtatctcccagtgcccagccttggacacaccctggccagagccagctgtttgcagacctgagccgagaggagctgacggctgtgatgcgctttctgacccagcagctggggccagggctggtggatgcagcccaggcccagccctcggacaactgtgtcttctcagtggagttgcagctgcctcccaaggctgcagccctggctcacttggacagggggagccccccacctgcccgggaggcactggccatcgtcttctttggcaggcaaccccagcccaacgtgagtgagctggtggtggggccactgcctcacccctcctacatgcgggacgtgactgtggagcgtcatggaggccccctgccctatcaccgacgccccatgttgttccaagagtacctggacatagaccagatgatcttcgacagagagctgccccaggcttctgggcttctccatcactgttgcttctacaagcgccggggacggaacctggtgacaatgaccacggctccccgtggtctgcaatcaggggaccgggccacctagtttggcctctactacaacatctcgggcgctgggttcttcctgcaccacgtgggcttggagctgctagtgaaccacaaggcccttgaccctgcccgctggactatccagaaggtgttctatcaaggccgctactatgacagcctggcccagctggaggcccagtttgaggccggcctggtgaatgtggtgctgatcccagacaatggcacaggtgggtcctggtccctgaagtcccctgtgcccccgggtccagctccccctctgcagttccatccccaaggcccccgcttcagtgtccagggaagtcgagtggcctcctcactgtggactttctcctttggcctcggagcattcagtggcccaaggatctttgacgttcccttccaaggggagagggtggcctatgaagtcagtgtccaggcggccttggccatctatggaggcaattctccttctgctctacgaagccggtacatagatagtggctttggcttgggccacttctccacgcccctgacccatggggtggactgcccctacctggccacctacgtggactggcacttcctttttgagtcccaggccgccaagacaatacgcgatgccttttgtatatttgaacagaaccagggcctccccctgcggcgacaccactcagatctctactcccactactttgggggccttgcggaaacggtgctggtcatcagatctgtgtctactatgctcaactatgactatgtgtgggatatggtcttccaccctaatggggccatagaaatcagactccacaccaccggctacatcagctcagcattcccctttggtgctgcccagaggtatggaaacaaagtttcagagcacaccctgggcacggtccacacccacagcgcccacttcaaggtggacctggatgtagcaggtaaggcatcctggcagaggcaaaagtgctggaggggtgagctgaagtctccatgcctagctttaaaagttttcgttgggctgggagcagtagcttatgcctgtaagcccaacactttgggagactgaggggggtggatcacttgaggtcaggagttcaaaaccagcctggccaacatggcgaaatcctgtctgtactaaaaatacaaaaattagctgggcatgggtatgctgtaatcctagctactcgggaggctgaggcaggagaatcacttgaatctgggagtcagaggttgcagtgagctgagattgagccactgcactccatcctgcgtgactgaac

SEQ ID NO: 1546 - DNA, 798 bp, Homo sapiens
  misc_feature (587)..(587): n is a, c, g, or t
cagaagtgggatacaaagctgactcacctcatggagaatcattggcctttggagttatggcatgaggtacccatgttggggccctttgaaccccctacacccccaccactttcacaggtaatcctttctccctccagtaagtatctcttggacagaactctcagatatggttcgagttctgttttatttgggatatgattagggagaggtctttccccctcttgtttggtagatctgttgggtagaattattttccccctgttgacctcagctgcgaggtttggaccttgaggcttggatgagggaatttttccctttctttggagaaggcttatcattcttactggtaagcatgtattttattttctgtcctgtcttgtatttatttggcctttgtgtattcagtgcttgcatttacttggcttttgcatagttgacattaaatcagagcacccacgaaatgagctctcaaagttcaaaggcatgccagaatattttctggaactccagctagtaacatattcaaacattacagggatcatttagtctgtttttcttaaaactgaactaaaagatggaggctatanaatcatacactccaaataagatatgcatatttcattgatatcttgagtctaaaaaaaataaaaacaaaaccaaacacattcaggatacaaatattgccttgttaaaaatactgtctcaaggtggctgaaactttctttctagacctttcccctcccttcttacatatcccctcttattcctctctaacagctattctacatactactaaat

SEQ ID NO: 1547 - DNA, 2530 bp, Homo sapiens
ctaaagtggagcccagcggcgggtgtgagagtccgtaaggagcagcttccaggatcctgagatccggagcagccggggtcggagcggctcctcaagagttactgatctatgaaatggcagagaatggaaaaaattgtgaccagagacgtgtagcaatgaacaaggaacatcataatggaaatttcacagacccctcttcagtgaatgaaaagaagaggagggagcgggaagaaaggcagaatattgtcctgtggagacagccgctcattaccttgcagtatttttctctggaaatccttgtaatcttgaaggaatggacctcaaaattatggcatcgtcaaagcattgtggtgtcttttttactgctgcttgctgtgcttatagctacgtattatgttgaaggagtgcatcaacagtatgtgcaacgtatagagaaacagtttcttttgtatgcctactggataggcttaggaattttgtcttctgttgggcttggaacagggctgcacacctttctgctttatctgggtccacatatagcctcagttacattagctgcttatgaatgcaattcagttaattttcccgaaccaccctatcctgatcagattatttgtccagatgaagagggcactgaaggaaccatttctttgtggagtatcatctcaaaagttaggattgaagcctgcatgtggggtatcggtacagcaatcggagagctgcctccatatttcatggccagagcagctcgcctctcaggtgctgaaccagatgatgaagagtatcaggaatttgaagagatgctggaacatgcagagtctgcacaagactttgcctcccgggccaaactggcagttcaaaaactagtacagaaagttggattttttggaattttggcctgtgcttcaattccaaatcctttatttgatctggctggaataacgtgtggacactttctggtacctttttggaccttctttggtgcaaccctaattggaaaagcaataataaaaatgcatatccagaaaatttttgttataataacattcagcaagcacatagtggagcaaatggtggctttcattggtgctgtccccggcataggtccatctctgcagaagccatttcaggagtacctggaggctcaacggcagaagcttcaccacaaaagcgaaatgggcacaccacagggagaaaactggttgtcctggatgtttgaaaagttggtcgttgtcatggtgtgttacttcatcctatctatcattaactccatggcacaaagttatgccaaacgaatccagcagcggttgaactcagaggagaaaactaaataagtagagaaagttttaaactgcagaaattggagtggatgggttctgccttaaattgggaggactccaagccgggaaggaaaattcccttttccaacctgtatcaatttttacaacttttttcctgaaagcagtttagtccatactttgcactgacatactttttccttctgtgctaaggtaaggtatccaccctcgatgcaatccaccttgtgttttcttagggtggaatgtgatgttcagcagcaaacttgcaacagactggccttctgtttgttactttcaaaaggcccacatgatacaattagagaattcccaccgcacaaaaaaagttcctaagtatgttaaatatgtcaagctttttaggcttgtcacaaatgattgctttgttttcctaagtcatcaaaatgtatataaattatctagattggataacagtcttgcatgtttatcatgttacaatttaatattccatcctgcccaacccttcctctcccatcctcaaaaaagggccattttatgatgcattgcacaccctctggggaaattgatctttaaattttgagacagtataaggaaaatctggttggtgtcttacaagtgagctgacaccattttttattctgtgtatttagaatgaagtcttgaaaaaaactttataaagacatctttaatcattccaaaattgtgtccgttttcttgagcgttttgattttttacttttagcttataccagctgaatggcagccttgcctaatccacctacaacaagaatttcttaagctttcttttatttgcatgagagagccactaccaaggcatgttttgttatgctgaaactgggctgctgcatactgctaaatggcacctctgggattggcctacctggggatttcttggtttgtgaaaacaggagaggagaaatatctcatacaagtgaaaggatactggagagagaaattacccatttctaaaaaaaaaccacactctgtcgtatctgtgttaatgttttctagcatgtactctggtttcaacagacacaaatttatatgttaacccagttttcttgccgttctgtaagtgttttattcttagtgtgatttttttccattgggatgtttttgattgaacttgttcattttgttttgcttgggaggaaaataaacaattttacttttttccttaaaaaaaaaaaaaaa

SEQ ID NO: 1548 - DNA, 2159 bp, Homo sapiens
tctttccgtcccgggcagccagcgccagtcggagccagcgcgagcgccgccgccatcactgccgctgccaagtcctccacccgctgcccccgccatgtctgctaccgctgccacggccccccctgctgccccggctggggagggtggtccccctgcaccccctccaaacctcaccagtaacaggagactgcagcagacccaggcccaggtggatgaggtggtggacatcatgagggtgaacgtggacaaggtcctggagcgagaccagaagctgtcggagctggacgaccgtgcagatgcactccaggcgggggcctcccagtttgaaacaagcgcagccaagctcaagcgcaaatactggtggaaaaacctcaagatgatgatcatcttgggagtgatttgcgccatcatcctcatcatcatcatagtttacttcagctcttaaatccccgaggagtctgccctgcctagagaagggcctctcccccaaccctcagccgttcctccacctctcagccatatctttcagccccccctcccctggatccgtgtgtgtgtgtgtccgtgtgtgtgtccccctgtaaatagccagctgttatttatacatatataatattatatatatttggtctgtttgtagttttattactagatgatttttccggttgtccttaacaccccttcctgaggttcccttcacccctctctcttgccttccttccctttccctttcttcctgactagccccaagtcccttcatttgcatctgctatgcaatagtccctctcctttccttcttcttccctcagatttagctgatccttcctcccaccctggccttcctttcctctttcctcctcactctccccgtcatgctccctctgccccgccctcaaaaaaaaaaaaaaaaaaaaaaaaaaaaaaaaccaccagcacctgtccaggcttccttaggtacatcttctttgtatccattgggaggctctgagactggccccacttggtcctaaaaatcccaaggtctttgggagcgtccagcatgttaattagcgtatcattacatactgctatccctttccatttctttttgttccatcactcttctctcaacctgtgtttctttttttactgaggagttagtccccattagttcttgtatcacattttcatttgcacgacattactcgcaggtggtggggagcctgggcttttggggaaccaggctgctctggtccccagcattgcctcctcctagcccctctagtccagtttgcctcccttaccctcattttccaaacctcttgtaccctcctctccctcccccagtggtatgtaagtgtcttgaagttcagtatgttatgatggaccaataattctgcccttcgggtttctccctacattcctgctccccagttttcatgtggggtactcaactgacattcccatggggtttccctcccatctgcctgatccacctcctcctcccaccacaagatcaattgttggccacaattgatctcttgtagaggggtggctaccagtgtgtgtgtgggggtcatcactgccttggggaggagtggggcagggcagagaatccccccaattcctgcctgaaatctctggcctcacccctgctgggggttggactgaaaaccctcctccccaatttggggggtgttgccccatcactgcccagctcctctgactgccccccctgaatttagggtgggggtactagtcactgccaatgtgtgtatgggacttgctggaaaacggggatgcttgcccctctccaggactattgagcccagagagagctgtcctctcattgggtgaactgattgaggaagggtctattgtctttttaaatggcacaattttaagggtttgagggtacagtcccttaacctgccacgggagggggcccccaaactttcttcccccccacacttctggttttctgtgtggagggggagcagggatatctaagctgtggtgtgaaagggtaggagagatgctggaggtgggggtgctgtgttctagaccccccatattatcccagtgtcccctgcccccctcttcccccaccccatgcccccaattctgtggcgcatccagattgtgaaaatgtacaataaatgtgtaatgagtaaccaggt

SEQ ID NO: 1549 - DNA, 2033 bp, Homo sapiens
gcacataacgggcagaacgcactgcgaagcggcttcttcagagcacgggctggaactggcaggcaccgcgagcccctagcacccgacaagctgagtgtgcaggacgagtccccaccacacccacaccacagccgctgaatgaggcttccaggcgtccgctcgcggcccgcagagccccgccgtgggtccgcccgctgaggcgcccccagccagtgcgctcacctgccagactgcgcgccatggggcaacccgggaacggcagcgccttcttgctggcacccaatagaagccatgcgccggaccacgacgtcacgcagcaaagggacgaggtgtgggtggtgggcatgggcatcgtcatgtctctcatcgtcctggccatcgtgtttggcaatgtgctggtcatcacagccattgccaagttcgagcgtctgcagacggtcaccaactacttcatcacttcactggcctgtgctgatctggtcatgggcctggcagtggtgccctttggggccgcccatattcttatgaaaatgtggacttttggcaacttctggtgcgagttttggacttccattgatgtgctgtgcgtcacggccagcattgagaccctgtgcgtgatcgcagtggatcgctactttgccattacttcacctttcaagtaccagagcctgctgaccaagaataaggcccgggtgatcattctgatggtgtggattgtgtcaggccttacctccttcttgcccattcagatgcactggtaccgggccacccaccaggaagccatcaactgctatgccaatgagacctgctgtgacttcttcacgaaccaagcctatgccattgcctcttccatcgtgtccttctacgttcccctggtgatcatggtcttcgtctactccagggtctttcaggaggccaaaaggcagctccagaagattgacaaatctgagggccgcttccatgtccagaaccttagccaggtggagcaggatgggcggacggggcatggactccgcagatcttccaagttctgcttgaaggagcacaaagccctcaagacgttaggcatcatcatgggcactttcaccctctgctggctgcccttcttcatcgttaacattgtgcatgtgatccaggataacctcatccgtaaggaagtttacatcctcctaaattggataggctatgtcaattctggtttcaatccccttatctactgccggagcccagatttcaggattgccttccaggagcttctgtgcctgcgcaggtcttctttgaaggcctatgggaatggctactccagcaacggcaacacaggggagcagagtggatatcacgtggaacaggagaaagaaaataaactgctgtgtgaagacctcccaggcacggaagactttgtgggccatcaaggtactgtgcctagcgataacattgattcacaagggaggaattgtagtacaaatgactcactgctgtaaagcagtttttctacttttaaagacccccccccccaacagaacactaaacagactatttaacttgagggtaataaacttagaataaaattgtaaaattgtatagagatatgcagaaggaagggcatccttctgccttttttatttttttaagctgtaaaaagagagaaaacttatttgagtgattatttgttatttgtacagttcagttcctctttgcatggaatttgtaagtttatgtctaaagagctttagtcctagaggacctgagtctgctatattttcatgacttttccatgtatctacctcactattcaagtattaggggtaatatattgctgctggtaatttgtatctgaaggagattttccttcctacacccttggacttgaggattttgagtatctcggacctttcagctgtgaacatggactcttcccccactcctcttatttgctcacacggggtattttaggcagggatttgaggagcagcttcagttgttttcccgagcaaagtctaaagtttacagtaaataaattgtttgaccatgcc

SEQ ID NO: 1550 - DNA, 2687 bp, Homo sapiens
gatctaaaacgagaagagatctcggggtctcatactgcgccattcggctgcggtacatctcggcactctagctgcagccgggagaggccttgccgccaccgctgtcgcccaagcctccactgccgctgccacctcagcgccggcctctgcatccccagctccagctccgctctgcgccgctgctgccatcgccgctgccacctccgcagcccgggcctccgccgccgccactcaagcatccgtgagtcattttctgcccatctctggtcgcgcggtctccctggtagagtttgtaggcttgcaagatggcagaagcagattttaaaatggtctcggaacctgtcgcccatggggttgccgaagaggagatggctagctcgactagtgattctggggaagaatctgacagcagtagctctagcagcagcactagtgacagcagcagcagcagcagcactagtggcagcagcagcggcagcggcagcagcagcagcagcagcggcagcactagcagccgcagccgcttgtatagaaagaagagggtacctgagccttccagaagggcgcggcgggccccgttgggaacaaatttcgtggataggctgcctcaggcagttagaaatcgtgtgcaagcgcttagaaacattcaagatgaatgtgacaaggtagataccctgttcttaaaagcaattcatgatcttgaaagaaaatatgctgaactcaacaagcctctgtatgataggcggtttcaaatcatcaatgcagaatacgagcctacagaagaagaatgtgaatggaattcagaggatgaggagttcagcagtgatgaggaggtgcaggataacacccctagtgaaatgcctcccttagagggtgaggaagaagaaaaccctaaagaaaacccagaggtgaaagctgaagagaaggaagttcctaaagaaattcctgaggtgaaggatgaagaaaaggaagttcctaaagaaattcctgaggtaaaggctgaagaaaaagcagattctaaagactgtatggaggcaacccctgaagtaaaagaagatcctaaagaagtcccccaggtaaaggcagatgataaagaacagcctaaagcaacagaggctaaggcaagggctgcagtaagagagactcataaaagagttcctgaggaaaggcttcaggacagtgtagatcttaaaagagctaggaagggaaagcctaaaagagaagaccctaaaggcattcctgactattggctgattgttttaaagaatgttgacaagctcgggcctatgattcagaagtatgatgagcccattctgaagttcttgtcggatgttagcctgaagttctcaaaacctggccagcctgtaagttacacctttgaatttcattttctacccaacccatacttcagaaatgaggtgctggtgaagacatatataataaaggcaaaaccagatcacaatgatcccttcttttcttggggatgggaaattgaagattgcaaaggctgcaagatagactggagaagaggaaaagatgttactgtgacaactacccagagtcgcacaactgctactggagaaattgaaatccagccaagagtggttcctaatgcatcattcttcaacttctttagtcctcctgagattcctatgattgggaagctggaaccacgagaagatgctatcctggatgaggactttgaaattgggcagattttacatgataatgtcatcctgaaatcaatctattactatactggagaagtcaatggtacctactatcaatttggcaaacattatggaaacaagaaatacagaaaataagtcaatctgaaagatttttcaagaatcttaaaatctcaagaagtgaagcagattcatacagccttgaaaaaagtaaaaccctgacctgtaacctgaacactattattccttatagtcaagtttttgtggtttcttggtagtctatattttaaaaatagtcctaaaaagtgtctaagtgccagtttattctatctaggctgttgtagtataatattcttcaaaatatgtaagctgttgtcaattatctaaagcatgttagtttggtgctacacagtgttgatttttgtgatgtcctttggtcatgtttctgttagactgtagctgtgaaactgtcagaattgttaactgaaacaaatatttgcttgaaaaaaaaagttcatgaagtaccaatgcaagtgttttatttttttcttttttccagcccataagactaagggtttaaatctgcttgcactagctgtgccttcattagtttgctatagaaatccagtacttatagtaaataaaacagtgtattttgaagtttgactgcttgaaaaagattagcatacatctaatgtgaaaagaccacatttgattcaactgagaccttgtgtatgtgacatatagtggcctataaatttaatcataatgatgttattgtttaccactgaggtgttaatataacatagtatttttgaaaaagtttcttcatcttatattgtgtaattgtaaactaaagataccgtgttttctttgtattgtgttctaccttccctttcactgaaaatgatcacttcatttgatactgtttttcatgttcttgtattgcaacctaaaataaataaatattaaagtgtgttatactataaaaaaaaaaaa

SEQ ID NO: 1551 - DNA, 6719 bp, Homo sapiens
cggatgtgtgcctggcgccggaagagaagacggcccccctctctcggcccggccatcttgtgggaagagctgaagcaggcgctcttggctcggcgcggcccgctgcaatccgtggaggaacgcgccgccgagccaccatcatgcctgggcacttacaggaaggcttcggctgcgtggtcaccaaccgattcgaccagttatttgacgacgaatcggaccccttcgaggtgctgaaggcagcagagaacaagaaaaaagaagccggcgggggcggcgttgggggccctggggccaagagcgcagctcaggccgcggcccagaccaactccaacgcggcaggcaaacagctgcgcaaggagtcccagaaagaccgcaagaacccgctgccccccagcgttggcgtggttgacaagaaagaggagacgcagccgcccgtggcgcttaagaaagaaggaataagacgagttggaagaagacctgatcaacaacttcagggtgaagggaaaataattgatagaagaccagaaaggcgaccacctcgtgaacgaagattcgaaaagccacttgaagaaaagggtgaaggaggcgaattttcagttgatagaccgattattgaccgacctattcgaggtcgtggtggtcttggaagaggtcgagggggccgtggacgtggaatgggccgaggagatggatttgattctcgtggcaaacgtgaatttgataggcatagtggaagtgatagatcttctttttcacattacagtggcctgaagcacgaggacaaacgtggaggtagcggatctcacaactggggaactgtcaaagacgaattaactgacttggatcaatcaaatgtgactgaggaaacacctgaaggtgaagaacatcatccagtggcagacactgaaaataaggagaatgaagttgaagaggtaaaagaggagggtccaaaagagatgactttggatgagtggaaggctattcaaaataaggaccgggcaaaagtagaatttaatatccgaaaaccaaatgaaggtgctgatgggcagtggaagaagggatttgttcttcataaatcaaagagtgaagaggctcatgctgaagattcggttatggaccatcatttccggaagccagcaaatgatataacgtctcagctggagatcaattttggagaccttggccgcccaggacgtggcggcaggggaggacgaggtggacgtgggcgtggtgggcgcccaaaccgtggcagcaggaccgacaagtcaagtgcttctgctcctgatgtggatgacccagaggcattcccagctctggcttaactggatgccataagacaaccctggttcctttgtgaacccttctgttcaaagcttttgcatgcttaaggattccaaacgactaagaaattaaaaaaaaaaagactgtcattcataccattcacacctaaagactgaattttatctgttttaaaaatgaacttctcccgctacacagaagtaacaaatatggtagtcagttttgtatttagaaatgtattggtagcagggatgttttcataattttcagagattatgcattcttcatgaatacttttgtattgctgcttgcaaatatgcatttccaaacttgaaatataggtgtgaacagtgtgtaccagtttaaagctttcacttcatttgtgttttttaattaaggatttagaagttcccccaattacaaactggttttaaatattggacatactggttttaatacctgctttgcatattcacacatggtcaactgggacatgttaaactttgatttgtcaaattttatgctgtgtggaatactaactatatgtattttaacttagttttaatattttcatttttggggaaaaatcttttttcacttctcatgatagctgttatatatatatgctaaatctttatatacagaaatatcagtacttgaacaaattcaaagcacatttggtttattaacccttgctccttgcatggctcattaggttcaaattataactgatttacattttcagctatatttactttttaaatgcttgagtttcccattttaaaatctaaactagacatcttaattggtgaaagttgtttaaactacttattgttggtaggcacatcgtgtcaagtgaagtagttttataggtatgggttttttctcccccttcaccagggtgggtggaataagttgatttggccaatgtgtaatatttaaactgttctgtaaaataagtgtctggccatttggtatgatttctgtgtgtgaaaggtcccaaaatcaaaatggtacatccataatcagccaccatttaacccttccttgttctaaaacaaaaaccaaagggcgctggttggtagggtgaggtgggggagtattttaatttttggaatttgggaagcagacagctttactttgtaaggttggaacagcagcactatacatgaaatataaaccaaaaacctttactgtttctaaatttcctagattgctattatttggttgtaagttgagtattccacagaaagtggtaattatctcttctctcttcctccattagaaaattaggtaaataatggattcctataatgggagcatcaccacttattaaaacacacatagaatgatgaattaaaaaagttttctaggattgtcttttattctgccacatttattgataaacagtgaaggaatttttaaaaaatttttaagaattgtttgtcacgtcatttttagaaatgttctacctgtatatggtaatgtccagttttaaaaatattggacatcttcaatcttaaacatttctatttagctgattggttctcacatatacttctaaaagaaacttttatgttataagagttactttttggataagatttattaatctcagttacctactattctgacattttaggaaggaggtaattgtttttaatgatggataaacttgtgctggtgttttggatcttatgatgctgagcatgttctgcactggtgctaatgtctaatataattttatatttacacacatacgtgctacccagagattaatttagtccatatgaactattgacccattgttcattgagacagcaacatacgcactcctaaatcagtgtgtttagacttttcaagtatctaactcatttccaaacatgtaccatgttttataaacctcttgatttccagcaacatactatagaaaacacctgctactcaaaacacaacttctcagtgtcatccattgctgtcgtgagagacaacatagcaatatctggtatgttgcaagctttcaagatagcctgaacttaaaaagttggtgcattagttgtatctgatggatataaatttgcctcctagttcactttgtgtcaagagctaaaactgtgaacctaactttctcttattggtgggtaataactgaaaataaagatttattttcatgctcacttcttaaaagtcataaaaacaatcaaataggatcatgtttattgtcatgtgtttcctggtttctgacctgtgtgcacacccctgtgtgtttataatttttaaattgaattttatatggggtttttatttgctaaaaaccaggctgttgaatcacatttgggaagggtacttatcttaatgactaatgacttaattgggaaagttgaattcttgtaaaatacaaaatccaaggacttcttggatttaatctgattgtcacttcttagcagatcacttttttgataatgaaagttaagcatactgaatgctacttttgattgacaaactggctataatagtctaggggaaaaatccctaaacagataaagattcctaaagtaatggtggcagctgatgtttcagtgaacttttatcttgatgcgtttaaatggaagtaatgccagacctgagatttttaaggcatttttacagcttgtattgaaatgattggagacatggtttctttattagctattttgagacctgtggagttaagcaagacttttaaaaattggcaccatatacatctagttagttcctttactcttatttttttaaataaaagtagtacacatcatttccagggttgtaaatatatttggggcttgtttttggtatggatttaaaaggaggatattaagtattcattctaattttgttatttttctagttgccagagatggttgcactgaaatagaacagggagttgcatacaaagcctaaatgtgtattggatttcgaaaatactaggttggtgcaattggttttgtaccaacctaacatgtctttaggaaagtaccatcatgtggaaggaaacaacaggtgttaaaaggttcaaaggaatgagaaataggaagttactagaacctaactgatgttgaccttagaggtaagattattcaggtatattagtggacctccagtccaatggtatagcaaattccagggatctcaggtgcatgcaattttactttctaaagtaaacacttagaaaatagattataacccagacgttttggattatactgagacaaatatgtaaataagttttagcaagtctgaacatgtaccagcgagatcttcaggttaactaagaaaagcccagaaacttcattatttactgtgctttgtatggcataactggtaacaaggcagtaaaatgatacatatttgaactggaccatagtaattaaatgatttatcaatatcatttgcaagataattgtcaggttgagttaatagtaagtggcagcttcccagaaatttgggttatttggcctaagctgtgccctgggattacctcttcatcttccttgacttttaagttcaaatttggaggttatgtgaagtgattgaaataaatctttcaggctgaggaagtcggtaatttcaagaatatagtgaaaacaaggttgtaatctaaacatgagaagcttaagtttaggaaatggttagaatataaattgctaaagccatcatgattttggccacagatgaaaatatgaacactggaaatgagcgccatttaaatgagatgctgtatgtaagccaggggtcagcaaagttcagcctgtgacctggtgtgtgtgggggtgtgtgtgtgtgtgtgtgtgtgtgtgtgtgtgtccgtgtccctgagttaagaatggtttttaggcttgtataggattaaaaaaaaaaaaaacccacagaaaaatgtaggcagcccagcataagataccgcctttcacagaaatgtttgctgaccccggaactgtcactctcgggttacaagagtttgtttctttgaaacagtctggctctgtcacccaggctggagtgcagtggcatgatctcaggtcactgcagcctccacctcccgggttcaagcaattctgcctcagcctcctgagtagctgggattacaggtgtgcaccaccacagacagctaattttacaggtgtacaccaccacacccaagaatcacttgaacccgggaggtgggggttgcagtgagccaagatcatagcactgtactccagtctgggtgacacactgtctgaaaaataaaagtttagttctaggtacaaattaagtggtctacccaacaggaagctgtgaaattagaagtaattttaaagcatactttacacctctatataatcaaagtaagggcaagataaaacttgttagtaaaacatgttttattattttttagataggtagcctgcaacataaaatatattttgaaagctgttaaggggtgtataatctgttaaaaaataccatgattagtatttcacatttagtgactcagatccctttgtgtaagtcctttgcgttgtgcaaagaggtttttctatgagatgagaattatgaacacttcatataggtaaattccataggttgagctggggcagaaattaatggctcctggagattgcatctttttttttttttttttgagcttagaattcccatttggacagaatttagcttttgtgctgttgattacttctgtactaaactggtagccaattgttcacttctaaatggaagggaaaaagttacccacacaagttagaaaatgatttaccgaattatttttttgagttagtatgtatatactgttttaaatcagtaatgtttgttccttttgctgcccatttgggagtatgtggcaattcctagtgctcttgtatgacattactcttcttgagacttgtatatgcaagaaagtatatataaaagatgcctggtggtaactttgtatctgagttctgattcattatggacttttagaaatctatttagataattggttcatactaggtgctcaattactctgaccttgtgtggcttaatccttaaatagttgctttaggtgttactgggtggaagcatggaaagtgaagggctaatattaaggatttttatgtattactgagtagggaaagtgggaagtagcttatctttggacagttgtattactttgcactaatcaccttgtttgcagttgtagctgattcagttctagattttaggaccaaaaagatctctaatttaaagaaacagtttttatatacctagaatgaagattctgtttaaagcggttttggttaacttggttcttgacatttgcctaaaattttgttggattgggactaaaatgttctattagccaatgaataacgtccaagtaaatttttgttttattttgggaa

SEQ ID NO: 1552 - DNA, 2648 bp, Homo sapiens
gcttggggacgcacggagaggtgcagctgggccgtccagcatcaaacactagcctccacacgtggaaaagaccctgactcccacagtagactagtcttatgggagtcctggctcttgggccaggctgcattaggaaaatggaaaccagactgtcttcaaattcttctgcctagccttagccattagagagaggtcctgctaaagatggactgcaaatgcgcttgatggaaggagatgtcaattccactgaagtcctcatttctgctgagctacctgtgcaccctgcctccggctctcctgagcagagagatcctgatggctgactcagaagcactcccctcccttgctggggacccagtggctgtggaagccttgctccgggccgtgtttggggttgttgtggatgaggccattcagaaaggaaccagtgtctcccagaaggtctgtgagtggaaggagcctgaggagctgaagcagctgctggatttggagctgcggagccagggcgagtcacagaagcagatcctggagcggtgtcgggctgtgattcgctacagtgtcaagactggtcaccctcggttcttcaaccagctcttctctgggttggatccccatgctctggccgggcgcattatcactgagagcctcaacaccagccagtacacatatgaaatcgcccccgtgtttgtgctcatggaagaggaggtgctgaggaaactgcgggccctggtgggctggagctctggggacggaatcttctgccctggtggctccatctccaacatgtatgctgtaaatctggcccgctatcagcgctacccggattgcaagcagaggggcctccgcacactgccgcccctggccctattcacatcgaaggagtgtcactactccatccagaagggagctgcgtttctgggacttggcaccgacagtgtccgagtggtcaaggctgatgagagagggaaaatggtccccgaggatctggagaggcagattggtatggccgaggctgagggtgctgtgccgttcctggtcagtgccacctctggcaccactgtgctaggggcctttgaccccctggaggcaattgctgatgtgtgccagcgtcatgggctatggctgcatgtggatgctgcctggggtgggagcgtcctgctgtcacagacacacaggcatctcctggatgggatccagagggctgactctgtggcctggaatccccacaagctcctcgcagcaggcctgcaatgctctgcacttcttctccaggatacctcgaacctgctcaagcgctgccatgggtcccaggccagctaccttttccagcaggacaagttctacgatgtggctctggacacgggagacaaggtggtgcagtgtggccgccgtgtggactgtctgaagctgtggctcatgtggaaggcacagggcgatcaagggctggagcggcgcatcgaccaggcctttgtccttgcccggtacctggtggaggaaatgaagaagcgggaagggtttgagctagtcatggagcctgagtttgtcaatgtgtgtttctggttcgtaccccccagcctgcgagggaagcaggagagtccagattaccacgaaaggctgtcaaaggtggcccccgtgctcaaggagcgcatggtgaaggagggctccatgatgattggctaccagccccacgggacccggggcaacttcttccgtgtggttgtggccaactctgcactgacctgtgctgatatggacttcctcctcaacgagctggagcggctaggccaggacctgtgagccttctctgtcttgctgccggccttgataccacccctcacccgcagagtcactgcattccctcccagcctttgaggccgggtgcagtggctcacgcctgtaatcccagcactttgggaggccgaggcgggtggatcacttgaggtcaggagttcgagaccagcctggccaataaggtgaaaccctgtctctactaaaaatacaaaaattagccgagcatggtggcctgtgcctgtaaacccagctactcaggaggttggggcagaattgcttgaacccagggggcagaggttgcagtgagccgagattgcacccctgcactccaggctgggcaacagtacgagactctgttccaaaaaaaataaaaaagaacagcctttttaggccacagtgacctgcgcaatgtttatatgctttgacctactaactttctcctaactaaatatttgattttaggagagtgtttaaataaattacagtatgtctatatgatgaaatgttattttgccattaaaattttgtttacaaagataatttttattgacataaaaataactttaatgtaatttatgttgaaaaagctgaatacaagtctttatatagagtaatatttgagctgtgttcaaaaatacataggaaaagactgataaaatgaaatatggcaaaatgttaatagttttccctggaataggataataggcaattttaaaacagactcctttaaaaaaacaaacaaacaaaaaaaacatagacttctttatatcttttgagctccctcccttttattatgtaatgaatatgtgttgcttttgtaataggaaaataataaagttaaaatttcaactgcaaaa

SEQ ID NO: 1553 - DNA, 2109 bp, Homo sapiens
acgacccggagcgaaggtctcgcgaggcctgggcgctgcggcggcaggaggaggacggggaaggacggagccgagccgcggctgcctccctcgctcactccctcgcgcactcgcccgccccctccctccctcccctcccttccccggccccggctctggccccggcccattcgctgttgggtcttctgctagggaggatgtcgggttcgtcgctgcccagcgccctggccctctcgctgttgctggtctctggctccctcctcccagggccaggcgccgctcagaacgagccaaggattgtcaccagtgaagaggtcattattcgagacagccctgttctccctgtcaccctgcagtgtaacctcacctccagctctcacacccttacatacagctactggacaaagaatggggtggaactgagtgccactcgtaagaatgccagcaacatggagtacaggatcaataagccgagagctgaggattcaggcgaataccactgcgtatatcactttgtcagcgctcctaaagcaaacgccaccattgaagtgaaagccgctcctgacatcactggccataaacggagtgagaacaagaatgaagggcaggatgccactatgtattgcaagtcagttggctacccccacccagactggatatggcgcaagaaggagaacgggatgcccatggacattgtcaatacctctggccgcttcttcatcatcaacaaggaaaattacactgagttgaacattgtgaacctgcagatcacggaagaccctggcgagtatgaatgtaatgccaccaacgccattggctccgcctctgttgtcactgtcctcagggtgcggagccacctggccccactctggcctttcttgggaattctggctgaaattatcatccttgtggtgatcattgttgtgtatgagaagaggaagaggccagatgaggttcctgacgatgatgaaccagctggaccaatgaaaaccaactctaccaacaatcacaaagataaaaacttgcgccagagaaacacaaattaagtactgcttacaatatctttaggttcctgaaactggtggcaacatgacctgctaaaattttctgcttggacctctttggttctctcccctttcaagtgagcaacaccacaatgactgtctaaagcatgccttatttagcctctcctgtaagggtgatctagccaggtacattttaaacaatgcttcagtgtagaaggtgtaaactattttgggcttgatgtgctgtgaatgttgcttttttttttcctttgttaaaatatttaaatagaagtgaaaaggtcctctgaggatcagatcatgcatgcgccattttttacttaatgcagctgttaaattggcaaagctctaaaatgcactgctgccatctagtgatacacttttgtaaagtacagcaaaacctacagatatatacagtatataaatatatatatatatatatttatatttttgggggtgggagaaatccaaaataaagtaaatgcttgtttcatttttaagctgctgatattcattccttattgtatgttgtcagatgaggaaattgtgcagttctggtacataaagatgagtaatataaactgaaatctataattttaagggcttaacctgtgactttaataagctggaacagtccactgaatgggtataatgaattgcagtatatacgtatgattgctttttaagtgattatcttttcttctgttaagtcatgtaaattcataaatccttttgcactgatgtgttgaaccttattcttgtacattcattcaatcaaggcaaacttttataatttttcttttgtttccaatgaccttgaaatgttatagcatggtaatattctatgcaactatagttatactttttggtttgacactgtattttttcacattgatttactggttgatgatagattttataacctaacggttctcatgcggtgcgtaattgtagatgcatgtacttgtgtgttttgtgtaattattgaagtgcaatgatgtataaaaaagtggattcacctgtttttaaaaataaaacattgataaaaggaaaaaaaaaaaaaaaa

SEQ ID NO: 1554 - DNA, 4125 bp, Homo sapiens; identical to SEQ ID NO: 1256

SEQ ID NO: 1555 - DNA, 1144 bp, Homo sapiens
tccactcacagcctgaagcatacccggcaggggctgtccccaggcccaacaagcaaagggcccagtagcgagggccactggagcccatctccggggggctgggcaggaagtagggtggggtttggggtagggatctggtaccctgggactgctgcaactcaaactaaccaacccactgggagaagatgcctgggggtccaggagtcctccaagctctgcctgccaccatcttcctcctcttcctgctgtctgctgtctacctgggccctgggtgccaggccctgtggatgcacaaggtcccagcatcattgatggtgagcctgggggaagacgcccacttccaatgcccgcacaatagcagcaacaacgccaacgtcacctggtggcgcgtcctccatggcaactacacgtggccccctgagttcttgggcccgggcgaggaccccaatgagccgccccccaggcccttcctggacatgggggagggcaccaagaaccgaatcatcacagccgaggggatcatcctcctgttctgcgcggtggtgcctgggacgctgctgctgttcaggaaacgatggcagaacgagaagctcgggttggatgccggggatgaatatgaagatgaaaacctttatgaaggcctgaacctggacgactgctccatgtatgaggacatctcccggggcctccagggcacctaccaggatgtgggcagcctcaacataggagatgtccagctggagaagccgtgacacccctactcctgccaggctgcccccgcctgctgtgcacccagctccagtgtctcagctcacttccctgggacattctcctttcagcccttctgggggcttccttagtcatattcccccagtggggggtgggagggtaacctcactcttctccaggccaggcctccttggactcccctgggggtgtcccactcttcttccctctaaactgccccacctcctaacctaatccccccgccccgctgcctttcccaggctcccctcaccccagcgggtaatgagcccttaatcgctgcctctaggggagctgattgtagcagcctcgttagtgtcaccccctcctccctgatctgtcagggccacttagtgataataaattcttcccaactgca

SEQ ID NO: 1556 - DNA, 7638 bp, Homo sapiens
gcgccccgcaggaagtgcttccctgggcggaagcttctgagcgtgatatagcggaagtgccttctcttccggtctttctggtctcggccgcagaagcgagatgacgaagggaacgtcatcgtttggaaagcgtcgcaataagacgcacacgttgtgccgccgctgtggctctaaggcctaccaccttcagaagtcgacctgtggcaaatgtggctaccctgccaagcgcaagagaaagtataactggagtgccaaggctaaaagacgaaataccaccggaactggtcgaatgaggcacctaaaaattgtataccgcagattcaggcatggattccgtgaaggaacaacacctaaacccaagagggcagctgttgcagcatccagttcatcttaagaatgtcaacgattagtcatgcaataaatgttctggttttaaaaaatacatatctggttttggtaaggtatttttaatcaattaggcttgtagtatcagtgaaatactgtaggtttagggactgggctagcttcatatcagatttacttgttaagtgactgttttggaatgtttacttttggactgggtttgtaacacggttaaaggcaatgagaaacaagcagaattccaggagtccttgaagcagagggcactggaagacaatatagcagattaaaatagcacagctcatgtggcataggtgggtattttagatgtttgagtaaatttgaaagagtatgatgtttaaattacctttagcaacatgttcatctgctatgctgtcatgactagggggatgattattagtcacatagagcttgggagtaccactggaaacgtatgggtaggagtttaggtggcttctgtttttcaaaagatgatcttatcctagtatctgtaatgctcacttggcacacctgacttgtgggctgtgtgtaaggtggctagctaagtgaaaaaagcctgctaggtgtgagtcaacttaagaatatgtaaataggtttgagaaaaagtagggcttgggtgcaagtaaagattgagcaggaaataaaggaaaatcaagtataatccctgagatttgtagactaaaggcaatgatgtgggactacttggtcgaatttttttagccctcaacttggtaattgggtgtttctgtgttaaagcactgaaacttgctgtcgtgccttcctagttttcgtggtttattgacagggttgggggttttttttgtttttttaaaatgaagggacaaagtcaactggactgctgagtgagagggcaggggcagttgaagggaacatgaattgctggaacagctacataaaatagtgatgtagccaagtcatgctatttaaattataattctccactgtgtttagaataacatctgaggttcttaacctggccttggaagggtatcacttttacttgtaacctggaatggctttataatgtgctagctaattgctactctcatcttgtattttaactcctaatttacccttcaggtctcagcttcagaacattcacttataaagaaaccctgctgattaaatctctcttgggcttcctcccgaaatgtgagactatactttaaagatgtatggttagagtccaattgccattgcctttcttgtttacagatagtgcaatggcgcaatcctggctcactgcagcctctaattcctgggctcaagtcaagtggttctcctgcctcagccttctgagtagctgggactacagatgcacaccaccacacctggctaatttttgtgttttttgtagagatggagattcactcgactaattctttttgtattcttagtagagactgggtttcaacatgttgaccaggctggtctcgaactcgacctcgtgatccgccgcctcggcctcccaaagtgctaggattacaggcgtgagccaccactcccggctgtcatcatcaaattttcaagtgaagatagtctgttgaagattgaacaatgaccttgaaagacagctgagttgctgtgggtataatgtaaagctggtgaagtttggccagtttgggcttcagaagtctaagtctagtgaaggtaccctgacccccatataaacaacccttgaggccggtgtggtggctcacggctgtaatcctggcactttgggaggccgaggtgggcggatcacaaggtcaagagatcgagatcaccctggcccacatggtgagaccccaactctactaaaaatacaaaaattagctgggtgtggtggcatgtgcctgtagtcttagctacttgagaggctgaggcaggagaatcgcttgaacctgggaggcagaggttgcagtgagctgagatcatgccactgtgctccagcctggtggcacagtgagactccacctcaaaaaaaaaaaaaaatccttgaactaatgactcaaattttcaaatgaaacaaaataagcagtggatcttgcattggagatggagttaaactatgttgcccaggctggtcttggactcctggtttcaagtgatcctctcatcttggcctcccaaagtgctgggattacagggacgagccaccacaccccacctattgtctatatttctatctttaacagcacttcagtcctgccttaagttatagttatgtatagatacccattatactttaaatttttcagcagaaattatgcttttatcttctctgcagtgttatatgttggtgtgcaaaaatgttaaatttatttttcctaagtaccccatctgcttttcaactctgtcctctgcctgaaaagcctccctccagcccctacttccctcccatcttagttcacaaagtcaggttgatttgcccccagctgtcaaagcagactacctgtttccacatgtaactggttatgttctgtaaagttacaaaaatagaaaggttgaatctgtggcggccgggtacggtagctcacgtcctatagtcgcagcactttgggaggccaaggtgggcagttcacgtgaggtggggagttcgagaccagcctgaccaacatggagaaaccccgtctctactaaaaatacaaaaatattagccgggcgtggtggtgcatgcctgtaatcccagctactagggaggctgaggcaggagaattgcttgaacctgggagacggaggttgcggtgagctgcagaggcctcacctctaattgagacacaattatatattgttgatatatatatatatatatatacacacacacacacacactatgatggataaatgcatgagtttctgtgagagcattggaaaggagtttgtcactcaataggtgaagccaggctaagatttaagctgagccagggaggacttgaaggaatcatgatgagagagaaggtaagtggctttgccagcaatgaaacagctgacataatggtaaccagtcagaggagggcataactatgaaactggacaccttggttgtcaggttagaaggatggggtgtagggttggtaagaaaagaattcagggaagagcagcgatcagattatgaagaatttgtcttgagaaattacagaggatttaaaccagaatgttaggaatagttattctagcaagatgaatgtggaaagtgttagtgtgcatgtgatgagtcttgaagctggaaactaggtaacaggttcttaaatagttcatgtgaaaatcatgacagactaaggcagtggctgtggggctgtccgggagttctctacagaaaacatctaaaacttgaatgtgcaagtgagtagctaacttccaagcttcccatttctgtataatttaagcatgaaaatgagaacactgagatttgataggcatgtagaagtcagagtaagcaagagggcttgagttcatcgatgaacttcagtaactatccttgacttagtattggtggaaaccatttgtgaatttacagactccaaaaacaaaaagataatttagagtctcaaagtaagatttggggagatgtccattggagacagaagtggagagagggagaagttcatttgttgacatatttatgtatggtgcacctactgtgtgccaagccatgttagagatacagtgggagcaaaaccagatgtgttttctgccctctgactccagtggttgcagaattagcccaggaactagaattggatggagtcacacaaaccaaggaaggggattgtttgaggggggcactcagtcacatgtggctgaggccaaagagaatgaagatatattttaaaattctggatttggcaaaatttaggctagtctttacttttcataaacctctctcatgttagagcagcaaagaaaaaccagtttgccaagaggtcacgagattgggcagtgaggaatggggagtttagtttaaaagacaacactagatacttttggaagtttacctattctgtggttcccttttattgactaaatggtgcccttcattcatgaagcaagtatctatttagtgactactatgtgtcaaaagctatctaggcccagaaacttttaagtggaaaacaaaacaaagaccctgccctgacagatttcaatcatgtatatactgtatgtatgtttgtggaaggtgacataatagacaattgcagatagtgataagtgtgtaagacaaggataccacgagcgtaatagacagtggggatggaggaacctttagaaggttggttaagttgaatgataaggagccattcttttgtctttacctgaatgacttatcattcagccctttttgagttttgggttgcttgcagagtttaaccttgcctgtaattgaaacttaattttgtaatagcataacttcatgtaagaaaagcaaagcaatacattacagaattattttactgaagaacttgtttcagagaaagaggctgtttcacatttattagcacatttggattatatttaggtgttttatttttttttaaacaaaggagtttggatcataatacaagagaagcacagggcaaagacactgcataacctcaagaactaagaatggaaggactggccaggcctggtggtgcacacctgtaatcccagctactcaggaggctgaggcgagagaatcgcttgagcctggggggcagaggttgcagtgagctgagagaacggcgggcggcagagcgagactccatctcaaaaaaaaaaaaggataaaggaaggacttaagcaaaatcttccttgtaagtagaaggatgttttgacaagaaaagttgcaatggaaaaatggttctcatgtacacgagtatgtagaataagcatcgtgtgtggattggattcagatcaaaacattgcttttatgtttgtgtctttatacggtgggagtataccctggtgccccaggatgaagacttgacctgacccatgtatttttagattactcacagataacaaaaagtattttcatcatgattagttgcgaaaacagttttatttcaataggtaaaacgtgcagtcctatgtaatcgtcagaaggtaatcttaattatagcttgggtgtgctttaaactgcaagctggcagtggagggcacgattcctctgatttcagctttctccttatacttttctggagctgtgagctgcaagttaactcagtgggattaaagtgtagactggaggtacaaaaggtgaggagtgaggagatagggtagttcttccttggctggctggcttcataatccctgggccccgcagataattaaatcgactttttctgtctcaggcatttgtatgacctctttggaggttccctgctgggtagttatccttgtatctgatggacccatctcaatttaaaatactctgccaggttcggaggttcatgcttgtcatcccagcactttgggaggctcagaggtgccattggcttgagcccaagagtttgagaccagcctgggcaacctggtgaaacctcttctccattaaaaatacaaaaaattagccaggcatggtggtatgtgcctgtagtcccagctactcagggagctgaggtggaaggattgcttgagcctgggaggtcaaggctgcagtgaaccttgattgtgccactgcactccagcctggatgacaaagaccctgtctcaagaaaagtctgtaattctttcctaacccttagtatccagcctcagtcctgaggttttctttacctctgggggctattttatgccggctctctcctgagtgtcacacatctggtcctcaggaaacattctcacatccctggcctgaaaaaaacaatttcagggagatcgcatggcagcagccctctctgggctccccagctaaatggttgtacgaaacacatttcaaagctctctgaagggcttccttgaagttcctttcactgggtttcaaagtagaaggtagtaactcctttgtccaagaaggctgaattgagcacttaacaattctccaaagaaatttcttcattggtctctatcctagaccccttctgtatccttgatatggctgaggattctaaaaaatgaccagtcttacatgggagggctgggatataaaaaataaaataataaataatgataaaaactgaaaactgaccacgttcttggatatgttttctttgggttgtgtgtgtgtgtgagacttttgatagttacccaaagtaggaaaaatcccattctaataaggttatatttatgtagctctgcaaataaacatctagcaaatgtaaaaagtattttctttgccttaaaaatgattaaaattatttgaactcctgaggagtgttatatgaataaaattagtaagttatttggaggaaagttattttttaaaaagacaactggtaaaacagtacaggagaaaggccagcttcctcaagtgaggacagttgtttagaattgactgaggagcggccgggtgcggaggctcacatctgtaatcccacacgccttgggaggctctgaggcgggtagatcacctgaggtcaggagtttgagaccagcctggccaacatggcgaaaccccgtctccactaaaaatacaaaaattagccaggtgcagtggcacacacctgtaatcccagctactccgaaggctgaggcaggaggatcacctgagcccaggaagttgagactgcagtgagctgagattgcaccactgcactccagcctcagtgacagcgagactgtctcaaaaaaagaaaaaagtgactgaggaggaagaggccaggtggcaaatggaacagaatcaccaaagggtgaacaggactaaggcaatgtagtgtatggctcagctacgtcagagtggaaaaggtgttattagagcagaaactatggtccctgcgtcacagggaagcaacctacagagaagcagcagctccccaagagaggagagataagaagccagaagcctcagagtgaacaattgtcctattagggattgctctagagagagaaacctctgggaacgtacccctgtgaggcagcacagcacaatgcttttagaattgtatgagagttgatatatctccatttgttttgcaaaggcaaaaactaagatacagagattatctgttaaagttatgtatttctttggtaataaagatgctgacagtgttgctggaatgcatttctttaataaagatattgtacaatgaaata

SEQ ID NO: 1557 - DNA, 2731 bp, Homo sapiens; identical to SEQ ID NO: 1309

SEQ ID NO: 1558 - DNA, 2083 bp, Homo sapiens
actttagccagcgcagggcgcaccccgctccctcccactctccctgcccctcggaccccatactctacctcatccttctggccaggcgaagcccacgacgttgacatgccggagatccgcctccgccatgtcgtgtcctgcagcagccaggactcgactcactgtgcagaaaatcttctcaaggcagacacttaccgaaaatggcgggcagccaaggcaggcgagaagaccatctctgtggtcctacagttggagaaggaggagcagatacacagtgtggacattgggaatgatggctcagctttcgtggaggtgctggtgggcagttcagctggaggcgctggggagcaagactatgaggtccttctggtcacctcatctttcatgtccccttccgagagccgcagtggctcaaaccccaaccgcgttcgcatgtttgggcctgacaagctggtccgggcagccgccgagaagcgctgggaccgggtcaaaattgtttgcagccagccctacagcaaggactccccctttggcttgagttttgtacggtttcatagccccccagacaaagatgaggcagaggccccgtcccagaaggtgacagtgaccaagcttggccagttccgtgtgaaggaggaggatgagagcgccaactctctgaggccgggggctctcttcttcagccggatcaacaagacatccccagtcacagccagcgacccggcaggacctagctatgcagctgctaccctccaggcttctagtgctgcctcctcagcctctccagtctccagggccataggcagcacctccaagccccaggagtctcccaaagggaagaggaagttggatttgaaccaagaagaaaagaagacccccagcaaaccaccagcccagctgtcgccatctgttcccaagagacctaaattgccagctccaactcgtaccccagccacagccccagtccctgcccgagcacagggggcagtgacaggcaaaccccgaggagaaggcaccgagcccagacgaccccgagctggcccagaggagctggggaagatccttcagggtgtggtagtggtgctgagtggcttccagaaccccttccgctccgagctgcgagataaggccctagagcttggggccaagtatcggccagactggacccgggacagcacgcacctcatctgtgcctttgccaacacccccaagtacagccaggtcctaggcctgggaggccgcatcgtgcgtaaggagtgggtgctggactgtcaccgcatgcgtcggcggctgccctcccggaggtacctcatggcagggccaggttccagcagtgaggaggatgaggcctctcacagcggtggcagcggagatgaagcccccaagcttcctcagaagcaaccccagaccaaaaccaagcccactcaggcagctggacccagctcaccccagaagcccccaacccctgaagagaccaaagcagcctcaccagtgctccaggaagatatagacattgagggggtacagtcagaaggacaggacaatggggcggaagattctggggacacagaggatgagctgaggagggtggcagagcagaaggaacacagactgccccctggccaggaggagaatggggaagacccgtatgcaggctccacggatgagaacacggacagtgaggaacaccaggagcctcctgatctgccagtccctgagctcccagatttcttccagggcaagcacttctttctttacggggagttccctggggacgagcggcggaaactcatccgatacgtcacagccttcaatggggagctcgaggactatatgagtgaccgggttcagtttgtgatcacagcacaggaatgggatcccagctttgaggaggccctgatggacaacccctccctggcattcgttcgtccccgatggatctacagttgcaatgagaagcagaagttacttcctcaccagctctatggggtggtgccgcaagcctgaagtatgtgctatacacacacacacacacacacacacacacacacacgatgcatttaataaagatgagttggttctc

SEQ ID NO: 1559 - DNA, 3942 bp, Homo sapiens
accatttcctggagcaatgtcacagggtggctccattttccatttgagctcaaatattttgctgcttcctctgtagctgccagacctgctcttgctgctgctcaggtagaacatctgggaggtcccttgctgaccactggaagaagatgagctcgagctattggagtgagacgagcagcagcagctgtggaacccagcagctcccagaggtgctgcagtgccagccccagcattaccactgctaccatcagtcaagccaagcccagcagcctccagaaaaaaatgtagtgtatgagcgagtgaggacctacagtgggcccatgaacaaggtggtgcaggccttggaccccttcaactcacgggaagtgctctcccctctcaaaaccacctcctcctaccaaaatttggtttggagcgaccattctcaggaactccattctccaactttaaaaatatctacatgtgccccaagtactctacatataacccaaaatactgaacaggaacttcattctccaacagtgaaacttactacatatccacagaccactattaggaaatatgtagtacaaaatcctgaacaggaaccactgtctcaattcctaagaggaagccatttcttcccaggaaacaatgttatttatgaaaaaacaataagaaaagtggagaagctaaatactgatgaggggtgccatcctcaggctcaatgccatcatcacattatccaacagccccaggtcatccactctgcacactggcaacaacctgattctagccagcaaatccaagccatcacaggaaataatccaatttctacacatattggaaatgaactgtgccatagtggatcaagccagatttgtgagcaggtgataattcaggatgatggccctgaaaaattggaccccagatattttggagagttgcttgctgatctgagccgtaagaatacggatctatatcactgcttattagaacatttgcagagaattggaggaagcaaacaggactttgagtctacagatgagtcggaagacattgaatcattgattcctaaaggattatcagagtttacaaaacagcaaatacgctacattctgcagatgaggggtatgtctgataagtcactccgactagtgctgtccacatttagcaacatacgggaggagcttggacatcttcaaaatgatatgacatcactggaaaatgacaagatgagacttgagaaagatttatcattcaaagacactcaattaaaagagtacgaagaactcttggcatcagtgagagcaaataatcaccagcagcagcaaggacttcaagactcaagttcaaaatgccaggcattggaagaaaacaatctctctcttcgacatacactatcagacatggaatacagactaaaagaactggaatattgtaaacgtaatttagagcaagagaatcaaaaccttagaatgcaggtttctgagacttgcacaggcccaatgttgcaggctaaaatggatgagattggcaaccactacacggagatggtaaaaaacttgagaatggagaaagatagagagatctgcagactgaggtcccaattaaaccagtaccataaagatgtttcaaagagagaaggaagttgtagtgacttccaatttaagcttcatgaactgacaagcttgctggaagagaaggattccctcataaagcgtcagtcagaggaactctccaagttgcggcaagaaatatattcctctcataaccaaccctccactggtggaaggactactattaccactaaaaagtacaggacacaatatccaatcctaggcctcctatatgatgactacgaatatataccaccaggtagtgaaacacagactattgtgattgagaaaacagaagacaaatacacttgtccatgaatggatccactttaaagtattacaactcaaagccgtttttttttgtgtgtgtgtgtctctgcattagtactttgttatttttccatcactaaaggccaatcagaatttggaaccatgctgctacccaagaaatctaatggaatgaattagttctgtagatgacaatttcttcacccatttatgagacctaaatcttttccataacactcatgtattcagtataacaacatactaactgaaagagggacctgattgtttaaagtttgattgcagacactgtagaacataactcattatgtttcagataaggtaactcctagatatcaaactaatttgttggggtagagattttacaagtcatgccattagaagattttctctgatattatatgtgcagttcagttacaagatgaaatcatgtttttttaacaaaagagataaaatacaattgaagcaaaaaataacagctagtatataatatatacagtctgtatttgcttttcacagtaggcctgatgactaaaagatatgctttattacacgctattttcacctcttgaaagtcaaaggtgatgattaatttcatttagcagggaagtggaataatatcttttgaaataactaagtccactaaattatacagtatgctattctggttctaagtacatattagtcccttggcaaatctgttctttcaaagcataccttccccaaatgagcctacctacttcttaaaaaacatataacacaatgtggtagtagtaggtgtaaggaaggtaagttttttcatagtggtatgcaaacatatcattgaaatattacatagatataaagacttagggaataaaaatagcagcaacaaatacttgatagatttatcctacttgggagaaatattttgtagcagagtatttagtatacttagaagttgatttagcaattaggctttaatgaccttacaaagtgaacataactgaacacaagtattttttcaatgcaagatgaggatgaaaattttacatttcaacccatctggctaaagttaagacttagcaaaaattaaaatgttgcctttgtccaagtatagattaaggcaacaaacatatttgggtgtgtaatttgaagttttggactgaaatatctttgcaagtatccacataaaattctgtaatgccttataattatattctaataattatgcattatactaagacaccattaagaacagttgaggcactacactaaatcaaaccataaatgaggaaaaaacttttaatgttcttttctagaagtgttcaaataggtcttgatatgaagctaaaagccttatttatattatcttaatatttcggctaaaatgttaagctccataacatgaattgatacaattccaattttatcaatattttgtgatagaaaaatgttaatattattcatgagctatacagtccttacattttttcccttggtgtaggaacaacggaggagtttctcctctgctaactattcatatatgtaactgtaacaaaagtgtactatgttatgcacacattacaaataatataaggggaagttttattagcttagtaggaaattgttattattaaggtttaaaaatgagaacaggtgtgagttttccaaaatacttaaaaataatagtgtcaaaaattcaggggcagttaaggagtcatggatggaactagaggtcactatattaagtgacataagccagaaacagacaaacattgcatgttctcaattatttgcgggatctaaaagtcaaaacaattgaactcatggatatagagagtagaaggatggttactagtggctgggaaaaggggtgtgcgaggggaactggggatgcttaatgtgtacaaaaactatgtagttagaaagtataaataagacctagtatttgatagcacaaccgggtgagtatagtcaataatagcttaattgtacaaataactaagagtataattggattgtttgtaacacaaataaatacttgagtggatggata

SEQ ID NO: 1560 - DNA, 2190 bp, Homo sapiens
gctgcgaggacgcgggccgagccggaagtggagtgcgctgcggcgcgagctgggccggcgggcgtggttcgagagcgcgcagagtccagactggcggcagggcccgaggggccgacccgcagcgtccctggtctctccagccctcactcggaaccgcacacagtgacaataccctcccctcccttgggctggacccctctctacagctaggagccaatggcagaagacaaaaccaaaccgagtgagttggaccaagggaagtatgatgctgatgacaacgtgaagatcatctgcctgggagacagcgcagtgggcaaatccaaactcatggagagatttctcatggatggctttcagccacagcagctgtccacgtacgccctgaccctgtacaagcacacagccacggtagatggaaggaccatccttgtggacttttgggacacggcaggccaggagcggttccagagcatgcatgcctcctactaccacaaggcccacgcctgcatcatggtgtttgatgtacagaggaaagtcacctataggaacctgagcacctggtatacagagcttcgggagttcaggccagagatcccatgcatcgtggtggccaataaaattgatgcagacataaacgtgacccaaaaaagcttcaattttgccaagaagttctccctgcccctgtatttcgtctcggctgctgatggtaccaatgttgtgaagctcttcaatgatgcaattcgattagctgtgtcttacaaacagaactcccaggacttcatggatgagatttttcaggagctcgagaacttcagcttggagcaggaagaggaggacgtgccagaccaggaacagagcagcagcatcgagaccccatcagaggaggcggcctctccccacagctgaggggctggggctaggggtgggtggagcccttttaaaatacccttcccttcaacaactctccagctctgaatggagaaactctctaggccatcccctcttctacctcctgcaacccacccatcctattagcctcccacattctaggcccgtgatacagggatgaggtcagcaccagcaaactctggactggtggaagaattccccaccagatctccttgaagcagaagtagggatcagcatcattaacaccttccccaccccctccccgcaggcagacagtgaagagaatcagaaaacatgattatgtgtcactttaatacaggaaatttaggtgttttttggtgtttttgtttttgtttttgttttctttccaaagctcacctcggggacaattccttgggcttctcctgaggtaatgatttacccccccacccacagctgagtctgtgaggccccatcctttccctacgttttctcccatcttttttcctcttcagtctcccagtcatctggtttgtttgtttctttgttcgttctgagacggagtctcgctctgtcgccaggctggagtgcagtggcgcagtctcggctcgctgcaacctctgactccctggttcaaacgattctcctgcctcagcctcccgagtggctggcatcaccacgcccagctaatttttgtatttttagtagagacggggtttcaccatgttgcccaggatggtctcgatctcctcacctcgtgatccgcccgcctcggcctcccaaagtgctgggattacaggcatgagccaccgcgcccggccccaatcatctgtttttaaacaatcgtttttgagcagatagctattcattccagattttcgtgtacccattctgtttcaggagctcttctaggtaaagctgagatcacaggaacagcaggtgacaggcctagctatagttaggaatacacaagccgtaaaatcgagtccttacagccataccacaaggtacgtccatttggactacaagaagagcttcctttaaagttcctatttcagcataaagaggctgtccttttttttgaggaatagtttggaccttgtgcctcctgtgggaggctgaggactgcaagaggagagctagcagatatgcctgttcacccctctctggtacttgtggcttgctagtatgtttttatgataatctcgggcattgtttgcattgtgtttattaatagggttttgtttttgttgtttccttttttacagtaaaggctgaattacataaacattgagtaaatgt

SEQ ID NO: 1561 - DNA, 7085 bp, Homo sapiens; identical to SEQ ID NO: 224

SEQ ID NO: 1562 - DNA, 739 bp, Homo sapiens; identical to SEQ ID NO: 220

SEQ ID NO: 1563 - DNA, 3505 bp, Homo sapiens
ctggagttgccgtgtgacgcgtgggcgggacgaggcccgggctcggggacctttcgcactcgggtcaggggtaaagcagcctgtcgcttgccgggcagctggtgagtcggtgacctggcctgtgaggagcagtgaggagaatgaataccttccaagaccagagtggcagctccagtaatagagaaccccttttgaggtgtagtgatgcacggagggacttggagcttgctattggtggagttctccgggctgaacagcaaattaaagataacttgcgagaggtcaaagctcagattcacagttgcataagccgtcacctggaatgtcttagaagccgtgaggtatggctgtatgaacaggtggaccttatttatcagcttaaagaggagacacttcaacagcaggctcagcagctctactcgttattgggccagttcaattgtcttactcatcaactggagtgtacccaaaacaaagatctagccaatcaagtctctgtgtgcctggagagactgggcagtttgacccttaagcctgaagattcaactgtcctgctctttgaagctgacacaattactctgcgccagaccatcaccacatttgggtctctcaaaaccattcaaattcctgagcacttgatggctcatgctagttcagcaaatattgggcccttcctggagaagagaggctgtatctccatgccagagcagaagtcagcatccggtattgtagctgtccctttcagcgaatggctccttggaagcaaacctgccagtggttatcaagctccttacatacccagcaccgacccccaggactggcttacccaaaagcagaccttggagaacagtcagacttcttccagagcctgcaatttcttcaataatgtcgggggaaacctaaagggcttagaaaactggctcctcaagagtgaaaaatcaagttatcaaaagtgtaacagccattccactactagttctttctccattgaaatggaaaaggttggagatcaagagcttcctgatcaagatgagatggacctatcagattggctagtgactccccaggaatcccataagctgcggaagcctgagaatggcagtcgtgaaaccagtgagaagtttaagctcttattccagtcctataatgtgaatgattggcttgtcaagactgactcctgtaccaactgtcagggaaaccagcccaaaggtgtggagattgaaaacctgggcaatctgaagtgcctgaatgaccacttggaggccaagaaaccattgtccacccccagcatggttacagaggattggcttgtccagaaccatcaggacccatgtaaggtagaggaggtgtgcagagccaatgagccctgcacaagctttgcagagtgtgtgtgtgatgagaattgtgagaaggaggctctgtataagtggcttctgaagaaagaaggaaaggataaaaatgggatgcctgtggaacccaaacctgagcctgagaagcataaagattccctgaatatgtggctctgtcctagaaaagaagtaatagaacaaactaaagcaccaaaggcaatgactccttctagaattgctgattccttccaagtcataaagaacagccccttgtcggagtggcttatcaggcccccatacaaagaaggaagtcccaaggaagtgcctggtactgaagacagagctggcaaacagaagtttaaaagccccatgaatacttcctggtgttcctttaacacagctgactgggtcctgccaggaaagaagatgggcaacctcagccagttatcttctggagaagacaagtggctgcttcgaaagaaggcccaggaagtattacttaattcacctctacaggaggaacataacttccccccagaccattatggcctccctgcagtttgtgatctctttgcctgtatgcagcttaaagttgataaagagaagtggttatatcgaactcctctacagatgtgaaggaatggacaagagttgagcagcctttctgctgattatcacacatcatgagctgagtgactgcagcttgccaaatctttgtgtttctgggtctgaccaattagcttagttcttctcctgcctaattttgaactagtaaagcaaagtgagtcatcagattatgagttactgtttaaaagaaaaatgctgtttattcatgctgaggtgattcagttccctccttcttacagaagtattttaattcaccccacactagaaatgcagcatctttgtggacgtctttttcacaagcctccaaggctccttagattgggtcgttactaaaagtacattaaaacactcttgtttatcgaagtatattgatgtattctaaagctagtaaacttccctaacgtttaattgccctacagatgcttctcttgctgtgggttttcttttgttagtggtctgaaataattattttcctgttctattaatacatagtgtattttgcacaaaaaaattaacctggtcaatagtgattaccaaaatatatattaataatcttggcaatttttgacattaattatgaaacattttagcccacgttagttctacattattcttcacttaaactcagctactgcaaattttgtctttctgtaaatgttattaaaatatccagtgagctctttagaaggactcagtattatttcaagactatttttgaggtaattctagccttttaaaatattctacagacctacggggcttaaaagaaccccagtaccgactaagcaaataggcaaaagacatgttggaaatgtagtatagtacttgaaacagtcactatcatagggataattggtgcatcctgtgtaaatggaagctgagcttgacacctggtgcttttaagtagggataaagtcatcctctcactgcaagcacagcatacctgtacctccaaaagtgacgttttagtgaacaggccgttttcaacacttgtgccttggggtgttcattgaagctttgtgaaaactactgatgttttctcagtctccttaaagttacgtccatgctttaaaatgtctgtgtaggagagaagtggggtttataatgttttctctaagatatctttgctgctttccagactttgaaactattaagcttcttaactgcctcttaccggaaatacttctggggaaacttcatggtcccaaaatgtcattgccatacagcttcactagagttctttgaaccacagctgaaaagagctttgtattattttttaattccctccccagatatcatttaggagtattatataaaggtggtgggcaaaaacaatgtaaggagcctttccagttatcttgagttgcagctctgtagtttcttgaggccaaacacactgtattttacaagtcaaaatataatttacattaatcactatgttaatgagtatgtaaaacattcttttgcattgatgaattttgtatctgcttccattaaaagcataacagccacaaaaaaaaaaaaaaaaa

SEQ ID NO: 1564 - DNA, 1277 bp, Homo sapiens
gatgtggcccgtggcctagctcgtcaagttgccgtggcgcggagaactctgcaaaacaagaggctgaggattgcgttagagataaaccagttcacgccggagccccgtgagggaagcgtctccgttgggtccggccgctctgcgggactctgaggaaaagctcgcaccaggtggacgcggatctgtcaacatgggtaaaggagaccccaacaagccgcggggcaaaatgtcctcgtacgccttcttcgtgcagacctgccgggaagagcacaagaagaaacacccggactcttccgtcaatttcgcggaattctccaagaagtgttcggagagatggaagaccatgtctgcaaaggagaagtcgaagtttgaagatatggcaaaaagtgacaaagctcgctatgacagggagatgaaaaattacgttcctcccaaaggtgataagaaggggaagaaaaaggaccccaatgctcctaaaaggccaccatctgccttcttcctgttttgctctgaacatcgcccaaagatcaaaagtgaacaccctggcctatccattggggatactgcaaagaaattgggtgaaatgtggtctgagcagtcagccaaagataaacaaccatatgaacagaaagcagctaagctaaaggagaaatatgaaaaggatattgctgcatatcgtgccaagggcaaaagtgaagcaggaaagaagggccctggcaggccaacaggctcaaagaagaagaacgaaccagaagatgaggaggaggaggaggaagaagaagatgaagatgaggaggaagaggatgaagatgaagaataaatggctatcctttaatgatgcgtgtggaatgtgtgtgtgtgctcaggcaattattttgctaagaatgtgaattcaagtgcagctcaatactagcttcagtataaaaactgtacagatttttgtatagctgataagattctctgtagagaaaatacttttaaaaaatgcaggttgtagctttttgatgggctactcatacagttagattttacagcttctgatgttgaatgttcctaaatatttaatggtttttttaatttctgtgtgtatggtagcacagcaaacttgtaggaattagtatcaatagtaaattttgggttttttaggatgttgcatttcgtttttttaaaaaaaattttgtaataaaattatgtatattatttctattgtctttgtcttaatatgctaagttaattttcactttaaaaaagccatttgaagaccaaaaaaaaaaaaa

SEQ ID NO: 1565 - DNA, 1070 bp, Homo sapiens
gcacttctgggcttcagcacacatcagtgtggttcacgtgtttcctgctgttatgaaagagattggagaggactaagcttggaattgcctgtcccacagcaagaggctatggagctgggccacggagcagggcccatctgaatgacaaggagggccaacaggacttggacccctggaaagcggcctacagttccttggacacctccaagttcaagaaccagggtctgtcatccccacagcccctgcccctgggatccagcactcaaggcagctccctagggcagtgccacttgaaggagattccccctccacccccgactgctgccagcagggattctctgggcatggacccacagtccaggtccctgaagaatgcgggctctcgatcctcctcgagagagaacagggccacctcgggagagggggctcagccatgccaggggacggatgacggtcccagcttgggggctcaggaccagaggagcacgcccacgaaccagaagggcagcatcattcctaacaacattcgccacaagtttgggagcaatgtggtggaccagctggtctccgaggagcaggctcaaaaggctattgatgaagtcttcgagggccagaaaagggcaagctcatggcccagcaggacccagaatcctgtggaaatctcctccgtcttctcagactactatgacctcggctacaacatgcggtcaaacttgtttcgaggggctgctgaggagacaaagagcctcatgaaggcttcttacacaccagaggtcattgagaaatcagtgagggacttagaacactggcatggcaggaagacggatgatctggggcggtggcaccagaaaaatgctatgaacctgaacttgcagaaagcactggaagagaaatatggagaaaacagcaaatccaagagctccaagtactagttttgacacagtagaggtgtcttctactcaaataaagtgctaacaataaaaaaaaaaaaaaaaaaaaaaaaaaaaaaaaaaaaaaaaaaaaaaaaaaaaaaaaaaaaaaaaaaaaaaaaaaaaaaaaaaaaaaaaaaa

SEQ ID NO: 1566 - DNA, 2798 bp, Homo sapiens
cctggcttggcaggagtcgtctgagaaggggactcctccagggacttggtccctaggtccccagatggggagactgaggccgtggctgtgtgtccctctgagagttggagcggggctgggcccgaattcgaccccagcaggattctctctcatttctgagccccggaggtggcagagcggcagactcgggcaagtgaaccctagggctgcaggagcccaggccccgacgccggcgcagaggggacggaagggcccgcccccagcccagcgtgcacagaggccatagccaaggccttaaggctcatccaaccggggactcatatcccccccaccggcagcccggcgccccagcctctacccgtgcccgccgagatgctgctgccgcggtcggtgtcatcggagcgggcccctggggtgccggagccggaggagctgtgggaggcagagatggagcggctgcgcggctctgggacgcccgtgcgcgggctgccctatgccatgatggacaagcgcctcatctggcagctgcgggagcccgcgggggtgcagaccttgcgctggcagcggtggcagcgccggcggcagacggtggaaaggcgcctgcgggaggcagcgcagcggctggcccggggccttgggctctgggagggggcgctctacgagatcgggggcctcttcggcacaggaattcggtcctacttcaccttcctccgcttcctgctgctactcaacctgctgagcctgctgctcaccgcaagcttcgtgctgctgcccctggtctggctccgcccccctgacccaggccccaccctgaacttgaccctccagtgccctggtagccgccagtccccgcctggcgttttgaggttccacaatcaactttggcatgttttgactggcagggccttcaccaacacctatctcttctacggtgcgtaccgagtggggccggagagcagctccgtgtacagcatccgcctggcctacctcctcagcccgctggcctgcctgctcctctgcttctgtgggactctgcggcggatggtgaaggggctgccgcagaagactctgctgggtcagggctatcaggcgcctctcagcgccaaggtcttctcctcatgggacttctgcatccgggtgcaggaagcagccaccatcaagaagcatgagatcagcaacgagttcaaggtggagctggaggagggccgtcgcttccagctgatgcagcagcagacccgggcccagacggcctgccgcctgctctcctacctgcgggtcaacgtactcaacgggctcctggtggttggggccatcagcgccatcttctgggctaccaagtactcacaggacaacaaggaggagtccctgtttctgctgctccagtacctgccccctggggtcatcgccctggtcaacttcctgggtcccctgctgttcacatttctggtccagctggagaactaccctcccaacacggaggtcaacctcactctgatctggtgcgtggtgctgaagctggccagcttggggatgttctccgtctccctgggtcagaccatactgtgcattggcagagacaagagcagctgtgagtcctacggctacaacgtttgtgactatcagtgctgggagaactccgtgggggaggagctgtacaagctgagtatcttcaacttcctcctcaccgtggccttcgccttcctggtcaccctgcctcggaggctgctggtggaccggttctcaggccggttctgggcctggctggaacgggaggagttcctggtccccaagaatgtgctggacatcgtggcggggcagacggtcacctggatgggcctcttctactgccccctgctgcccctgctgaatagcgtcttcctcttcctcaccttctacatcaagaagtacaccctcctgaagaactccagggcatcttcgcggcccttccgtgcctccagctccaccttcttcttccagctagtgctcctcctgggcctgcttctggctgcagtgcccctgggctatgtggtcagcagcatccactcctcctgggactgcggcctcttcaccaactactcagcaccctggcaagtggtcccggagctggtggcccttgggctcccgcccattggccagcgtgccctccactacctgggctcccacgccttcagcttccccctcctcatcatgctcagccttgtcctgacggtgtgcgtctcccagacccaggccaatgccagggccatccacaggctccggaagcagctggtgtggcaggttcaggagaagtggcacctggtggaggacctgtcgcgactgctgccggagccaggcccgagcgactctccgggccccaagtaccctgcctcccaagcttcgcgcccgcagtccttctgccccggatgcccatgccctggctccccgggccaccaggccccgcggccgggcccctccgtcgtggatgccgcgggactgcgttccccttgccctggacagcacggtgccccggcctccgcccgcagattccgcttccccagcggcgcggagctgtaacccctacccctgcctccccgaagcctccctggggcccctccaggcctccttactccatcttccagacccctggcgaccaccgcccctctcagtggctccagggcctccctcagaggtccccaaagatggacacacaaccccagcggcagcaggaaaaacatatgggaattttctttctatattttaatctcatccctttaaaatgtctattttttattgtgttttttataatatacataatctat

SEQ ID NO: 1567 - DNA, 2924 bp, Homo sapiens
cagttctctgccttccgtctttccctctgtcctcatccttagcccctctgccctgctttgtgtcccacctctccccctccacttcctctcctcccaccctcagtctcacccccgggctgtctcactctctggagcctctccttcctgttctctgtccccagtgctccctaccctcacctcaagacgaccatggccaccatcccagactggaagctacagctgctagcccggcgccggcaggaggaggcgtccgttcgaggccgagagaaagcagaacgggagcgcctgtcccagatgccagcctggaaacgagggctcctggagcgccgccgggccaagcttgggctgtcccctggggagcctagccctgtgctagggactgtagaggctggacctccagacccggatgagtctgcggtccttctggaggccatcgggccagtgcaccagaaccgattcatccggcaggagcggcagcagcagcagcagcaacaacaacggagtgaagagctgctagcagagagaaagcctgggcctctggaggcccgggagcggagacccagccctggggagatgcgggatcagagccccaagggaagagagtcaagagaagagagactaagtccgagggagaccagagagaggaggctggggatagggggagcccaagagttgagcctgaggcctctggaggctcgggactggaggcaaagcccaggagaggtgggagacaggagctcccgactgtcagaggcatggaaatggaggctgagtcctggagaaactccagagcggagtctgagactagcagagtctcgagagcaaagccccaggagaaaagaggtggaaagtagactgagcccaggggaatctgcctaccagaagttgggcctgacagaggcccataaatggagacctgactccagagagtctcaggaacagagtttggtacaactggaggcaacagagtggaggctgaggtcaggagaagaaagacaagactactcggaagaatgtgggagaaaagaagagtggccagttccaggggtagctccaaaagagactgcagagctgtccgagaccctgacaagggaggcccaaggcaacagttccgcaggagtggaggcagcagagcagaggcctgtggaagatggcgagaggggcatgaagccaacagaagggtggaaatggaccctgaactccgggaaggctcgagaatggacacccagggacatagaggctcaaactcagaaaccagaacctccagagtcagcagagaagcttctggaatctcccggtgtggaggctggagaaggggaggctgagaaggaggaggcgggggctcagggcaggcctctgagagccctgcagaactgctgctctgtgccctcccccctcccaccagaggacgctgggactggaggcctgagacagcaggaagaggaagcagtggagctccagcccccaccaccagcccctctgtctcccccacccccagccccaactgccccccaacctcctggggatcccctcatgagccgcctgttctatggggtgaaggcagggccaggggtgggggccccccgccgcagtggacacaccttcaccgtcaacccccggcggtctgtgccccctgcgaccccagccaccccaacctctccagccacagttgatgctgcagtcccgggggctgggaagaagcggtacccaactgccgaggagatcttggttctggggggctacctccgtctcagccgcagctgccttgccaaggggtcccccgaaagacaccacaaacagcttaagatctccttcagcgagacagccctggagaccacgtaccaatacccctccgagagttcggtactggaggagctgggcccggagcctgaggtccccagtgcccccaaccctccagcagcccaacccgacgacgaagaggatgaggaagagctgctgctgctgcagccagagctccagggcgggctgcgcaccaaggccctgattgtggatgagtcctgccggcggtgaccatcttccaacatagggatatacctccctccttcttataactgaagatcctggagcccggaagattcagggcagacagaccctgataatgagcctggcagggaagggcaaccaacatcttgtaacttgctttccccaccctgtttctgggggcagagccaattgcccaatttctaccctaatccaaagtccctggtgtgggtggggttaaacgtgctggtgcatcctaggtcatccaagagtgagcgccaagtcctgagaaggggcacagaactccctggagggtggagatggagcacctgccccccatggcagggtacactctccccacagccttcctccccaccatcccgtggggactctcgggatttaagcactcgtctctctgggaggcccagaccccactccatttataggcacatctccttcatttcctaggtcactgcccctttgtttacagctcctgcctcctcccttgaccacagcctggtttacaaattccatcagctcccagccccacctgccaaagtcccaggtttacaagccacgcttacttgctgtgtctgcgtggaattctctcctctgtcccctccagtctcctcattggagtgacctgaaggtgtggcttcctccactttttctcagtattactttgccttagttttccccaagagggaaggctggaactcttaactctgtaccccttgatagttatttaattctgtttctcctagtggttcacaattgaactgaattgagatggtgtcgggtggctaaggagacacctcacctctccttccccattgtgccgcctttatcaattgcctgttttgttttgtttgttttttaactttccataataaaatggagttctcttcaaaaaaaaaaaaaaa

SEQ ID NO: 1568 - DNA, 6074 bp, Homo sapiens
aagggagctcagtaagtcacttctgggcgactgttgttttatttccggtctatgggacccggctgcgatttgctgctgcggacagcagctaccatcactgctgccgccatcatgtcagacacggacagcgacgaagattccgctggaggcggcccattttctttagcgggtttccttttcggcaacatcaatggagccgggcagctggagggggaaagcgtcttggatgatgaatgtaagaagcacttggcaggcttgggggctttggggctgggcagcctgatcactgaactcacggcaaatgaagaattgaccgggactgacggtgccttggtaaatgatgaagggtgggttaggagtacagaagatgctgtggactattcagacatcaatgaggtggcagaagatgaaagccgaagataccagcagacgatggggagcttgcagcccctttgccactcagattatgatgaagatgactatgatgctgattgtgaagacattgattgcaagttgatgcctcctccacctccacccccgggaccaatgaagaaggataaggaccaggattctattactggtgagaaagtggacttcagtagttcctctgactcagaatctgagatgggacctcaggaagcaacacaggcagaatctgaagatggaaagctgacccttccattggctgggattatgcagcatgatgccaccaagctgttgccaagtgtcacagaactttttccagaatttcgacctggaaaggtgttacgttttctacgtctttttggaccagggaagaatgtcccatctgtttggcggagtgctcggagaaagaggaagaagaagcaccgtgagctgatacaggaagagcagatccaggaggtggagtgctcagtagaatcagaagtcagccagaagtctttgtggaactacgactacgctccaccaccacctccagagcagtgtctctctgatgatgaaatcacgatgatggctcctgtggagtccaaattttcccaatcaactggagatatagataaagtgacagataccaaaccaagagtggctgagtggcgttatgggcctgcccgactgtggtatgatatgctgggtgtccctgaagatggcagtgggtttgactatggcttcaaactgagaaagacagaacatgaacctgtgataaaatctagaatgatagaggaatttaggaaacttgaggaaaacaatggcactgatcttctggctgatgaaaacttcctgatggtgacacagctgcattgggaggatgatatcatctgggatggggaggatgtcaaacacaaagggacaaaacctcagcgtgcaagcctggcaggctggcttccttctagcatgactaggaatgcgatggcttacaatgttcagcaaggttttgcagccactcttgatgatgacaaaccttggtactccatttttcccattgacaatgaggatctggtatatggacgctgggaggacaatatcatttgggatgctcaggccatgccccggctgttggaacctcctgttttgacacttgatcccaatgatgagaacctcattttggaaattcctgatgagaaggaagaggccacctctaactccccctccaaggagagtaagaaggaatcatctctgaagaagagtcgaattctcttagggaaaacaggagtcatcaaggaggaaccacagcagaacatgtctcagccagaagtgaaagatccatggaatctctccaatgatgagtattattatcccaagcaacagggtcttcgaggcacctttggagggaatattatccagcattcaattcctgctgtggaattacggcagcccttctttcccacccacatggggcccatcaaactccggcagttccatcgcccacctctgaaaaagtactcatttggtgcactttctcagccaggtccccactcagtccaacctttgctaaagcacatcaaaaaaaaggccaagatgagagaacaagagaggcaagcttcaggtggtggagagatgttttttatgcgcacacctcaggacctcacaggcaaagatggtgatcttattcttgcagaatatagtgaggaaaatggacccttaatgatgcaggttggcatggcaaccaagataaagaactattataaacggaaacctggaaaagatcctggagcaccagattgtaaatatggggaaactgtttactgccatacatctcctttcctgggttctctccatcctggccaattgctgcaagcatttgagaacaacctttttcgtgctccaatttatcttcataagatgccagaaactgatttcttgatcattcggacaagacagggttactatattcgggaattagtggatatttttgtggttggccagcagtgtcccttgtttgaagttcctgggcctaactccaaaagggccaatacgcatattcgagactttctacaggtttttatttaccgccttttctggaaaagtaaagatcggccacggaggatacgaatggaagatataaaaaaagcctttccttcccattcagaaagcagcatccggaagaggctaaagctctgcgctgacttcaaacgcacagggatggactcaaactggtgggtgcttaagtctgattttcgtttaccaacggaagaagagatcagagctatggtgtcaccagagcagtgctgtgcttattatagcatgatagctgcagagcaacgactgaaggatgctggctatggtgagaaatccttttttgctccagaagaagaaaatgaggaagatttccagatgaagattgatgatgaagttcgcactgccccttggaacaccacaagggccttcattgctgccatgaagggcaagtgtctgctagaggtgactggggtggcagatcccacggggtgtggtgaaggattctcctatgtgaagattccaaacaaaccaacacagcagaaggatgataaagaaccgcagccagtgaagaagacagtgacaggaacagatgcagaccttcgtcgcctttccctgaaaaatgccaagcaacttctacgtaaatttggtgtgcctgaggaagagattaaaaagttgtcccgctgggaagtgattgatgtggtgcgcacaatgtcaacagaacaggctcgttctggagaggggcccatgagtaaatttgcccgtggatcaaggttttctgtggctgagcatcaagagcgttacaaagaggaatgtcagcgcatctttgacctacagaacaaggttctgtcatcaactgaagtcttatcaactgacacagacagcagctcagctgaagatagtgactttgaagaaatgggaaagaacattgagaacatgttgcagaacaagaaaaccagctctcagctttcacgtgaacgggaggaacaggagcggaaggaactacagcgaatgctactggcagcaggctcagcagcatccggaaacaatcacagagatgatgacacagcttccgtgactagccttaactcttctgccactggacgctgtctcaagatttatcgcacgtttcgagatgaagaggggaaagagtatgttcgctgtgagacagtccgaaaaccagctgtcattgatgcctatgtgcgcatacggactacaaaagatgaggaattcattcgaaaatttgccctttttgatgaacaacatcgggaagagatgcgaaaagaacggcggaggattcaagagcaactgaggcggcttaagaggaaccaggaaaaggagaagcttaagggtcctcctgagaagaagcccaagaaaatgaaggagcgtcctgacctaaaactgaaatgtggggcatgtggtgccattggacacatgaggactaacaaattctgccccctctattatcaaacaaatgcgccaccttccaaccctgttgccatgacagaagaacaggaggaggagttggaaaagacagtcattcataatgataatgaagaacttatcaaggttgaagggaccaaaattgtcttggggaaacagctaattgagagtgcggatgaggttcgcagaaaatctctggttctcaagtttcctaaacagcagcttcctccaaagaagaaacggcgagttggaaccactgttcactgtgactatttgaatagacctcataagtccatccaccggcgccgcacagaccctatggtgacgctgtcgtccatcttggagtctatcatcaatgacatgagagatcttccaaatacataccctttccacactccagtcaatgcaaaggttgtaaaggactactacaaaatcatcactcggccaatggacctacaaacactccgcgaaaacgtgcgtaaacgcctctacccatctcgggaagagttcagagagcatctggagctaattgtgaaaaatagtgcaacctacaatgggccaaaacactcattgactcagatctctcaatccatgctggatctctgtgatgaaaaactcaaagagaaagaagacaaattagctcgcttagagaaagctatcaaccccttgctggatgatgatgaccaagtggcgttttctttcattctggacaacattgtcacccagaaaatgatggcagttccagattcttggccatttcatcacccagttaataagaaatttgttccagattattacaaagtgattgtcaatccaatggatttagagaccatacgtaagaacatctccaagcacaagtatcagagtcgggagagctttctggatgatgtaaaccttattctggccaacagtgttaagtataatggacctgagagtcagtatactaagactgcccaggagattgtgaacgtctgttaccagacattgactgagtatgatgaacatttgactcaacttgagaaggatatttgtactgctaaagaagcagctttggaggaagcagaattagaaagcctggacccaatgaccccagggccctacacgcctcagcctcctgatttgtatgataccaacacatccctcagtatgtctcgagatgcctctgtatttcaagatgagagcaatatgtctgtcttggatattcccagtgccactccagaaaagcaggtaacacaggaaggtgaagatggagatggtgatcttgcagatgaagaggaaggaactgtacaacagcctcaagccagtgtcctgtatgaggatttgcttatgtctgaaggagaagatgatgaggaagatgctgggagtgatgaagaaggagacaatcctttctctgctatccagctgagtgaaagtggaagtgactctgatgtgggatctggtggaataagacccaaacaaccccgcatgcttcaggagaacacaaggatggacatggaaaatgaagaaagcatgatgtcctatgagggagacggtggggaggcttcccatggtttggaggatagcaacatcagttatgggagctatgaggagcctgatcccaagtcgaacacccaagacacaagcttcagcagcatcggtgggtatgaggtatcagaggaggaagaagatgaggaggaggaagagcagcgctctgggccgagcgtactaagccaggtccacctgtcagaggacgaggaggacagtgaggatttccactccattgctggggacagtgacttggactctgatgaatgaggcttcctttgggcctccttggtcagccttccctgttctccagcctaggtggttcacctttccccaatttgttcatatttgtacagtatctgatcctgaaatcatgaaattaactaacaccttagcctttttaaaagtagtaagtaaatgataataaatcacctctcctaatcttcctggggcaatgtcaccctttgatttaaaacaaagcaaccccctttcccctaccactacggaaaagagcaagctcatttttccgtgtcctcctttatttaactccatttattgcttttggtataatttttccctggggaaggaggggaaattatgaaagaactagtaactttatgtcctcttgatgtattaggaaatttccggccaggcgtggtggctcacacctgtaa

SEQ ID NO: 1569 - DNA, 3471 bp, Homo sapiens
gccggcctggtcgccagcctaacccggcacagtgagcggagcgcctgggcggcggcggcggcggcgtgatggctccggccgcggaccgagagggctactggggccccacgacctccacgctggactggtgcgaggagaactactccgtgacctggtacatcgccgagttctggaatacagtgagtaacctgatcatgattatacctccaatgttcggtgcaattcagagtgttagagacggtctggaaaaacggtacattgcttcttatttagcactcacagtggtaggaatgggatcctggtgcttccacatgactctgaaatatgaaatgcagctattggatgaactcccaatgatatacagctgttgcatatttgtgtactgcatgtttgaatgtttcaagatcaagaactcagtaaactaccatctgctttttaccttagttctattcagtttaatagtaaccacagtttaccttaaggtaaaagagccaatattccatcaggtcatgtatggaatgttggtctttacattagtacttcgatctatttatattgttacatgggtttatccatggcttagaggactgggttatacatcattgggtatatttttattgggatttttattttggaatatagataacatattttgtgagtcactgaggaactttcgaaagaaggtaccacctatcataggtattaccacacaatttcatgcatggtggcatattttaactggccttggttcctatcttcacatccttttcagtttgtatacaagaacactttacctgagatataggccaaaagtgaagtttctctttggaatctggccagtgatcctgtttgagcctctcaggaagcattgatgaatcattccaccaagaaaacaaacaagcacctaccatagacctggcagaataaataaggaaatccttaaagatctacaagttcaaatatgtcatgaccatcacagcagaggagtgactttctgactaatgctgccacccacacagagaataaggagtagggcctgctgggtgtttagctcatggctttatcttatttgtccccctcctcctttcacgctccagtttataaagaaacagagatgatgtgtgtgtatgcctcaaatgcagaaacagttgggcttttcttaacaggttaacagtttgtgctggttataagaaattaaccttcttttctttttgccaagggttgcatgtgaattatacctttcttaatatttgattaaataatgcagtcagctaagagccaacaaaaccccatatccagatagttagctgtgagccagcactcagctgtgtcagatttgattaatattgtattaatctcatggatggttctcaaaggtaaaaaaagagagagaaagagagagagctagctgtgggattctgtgtagttcttcactatctgttccagggctagtcggaggatcataagcaagctcagacctgcccccagttcagtacttgaccacatcccaggatttatggtgtctgtctatggccacagccaaccagaatgagtgggtcatcttataacctttctgaagctccatgaggacatgtatagaatgctgcaccttcagccagctctgctctgatctttgcagatctttaagttgtcactgtttctacggctagacaaatatgactggtggtctagactacccatagttcatcctcctcacataacttatttgaagttgtcagggaatgccattacactctgatttttaaattatgcagtattttccagttctcagagaggtcatggttgtacccaagggaagtgtgttgcattaactaaagctaaaattatcagaatcctatttacataaagcatattaaaatatctgctccttaattttctgaaggaaatagatgtaagtttctgctacttgaaacctacagaaccgacaaaaattagggtgctaaaaaaatgacagtgaaatctcatcgtaaggcagctagttctaatttgcatttgaatgtataacaaattgcatcacttttcacaaacttaacacctgcctggagtaaaaatctgatttgacccctctgctcatgtttcatcatatttgtagctctgcatcatttagcatttttatgactttttttgctttatataaattattgtaaaatccagattgtttttaccacatgatgacgtgactcaggattaaatcctgagctacagtttcaaaaggaaaatcatttttttcttatgcaaagatggtaaaacactgttgtcattttttccagtattcaataagtagcctttgtacaaatttaaaaccaaaaactattctgttgtttttcttcacctactagccttagtttttaaccaagtatccaaggatgtcaacttgacatccttcccttagcatgccaacaagccattagactgattcttccacctacttttatgaacctccaggaagaaaaacacttgccaaaacattaagagaactttgattctgccttaagagggtatagaactaaaccatttgaaggcacagcccataagactatacttgattttgccccaagattctgacttctggctacatttcacctgcagttacctgggctatcggccgtgatacattttttaattcatttgttttccaccattatatttttatacttttcagttagatatacttctgcataaagagtatatatacagtgtaggataaaggcatatcgtacatggcaatgctgttaaacatggtaagactgaggttctgcaggattaaagtcagattaagggtacagaaagcacaccttgatactgaggccatttagagcaatttgtttaatgagtggttcagccatcaccaccagtggccacctgttcaataaaattgcctagcaccacagtggagagtcatctacaccccaaggtgagctgtaagactggccaattctttgaagacctttttttctgttgggagaatggaaagcagaaagggaagccaggctctttaatgttccaagtcagctgtgcctcacacaaggctctctttttagctactaagtaacatactcaagactttgtatctgtgcagcattttatggaaatcactggtgacctataggatattactaaattatttcaatagctttatttttttcctacttggattctaggtggacattacagagttgaattcctcactaccccctcccgctgtcatttgttttattggaaaacttcatgttaactagagtgtacaaaaagtctgtttcctgctgagccaatagtgatttgtttgcatatcacctaatgtgaaaagtgctcatctgtgaactctatagcaaattatattttagaaaatactttgtgaggccgggcatggtggcagagcgagactccgtctcaaaaaaaaagaaaagaaaagaaaatataaggatgtaaaagaaaaaaaaaaaaaaaaaa

SEQ ID NO: 1570 - DNA, 2669 bp, Homo sapiens
gcggccgcgtctgcctggcccgtcccctccagcccagctcgggctccagctccagcgccggcgcttcagctgcgaccgcgagccctctcaagcaaggcctaccctctgaagaggtccaagcaacggaagtactactacgaagctgcctttctggccatccttgagaaaaatagacagatggccaaggagaggggcctaataagccccagtgattttgcccagctgcaaaaatacatggaatactccaccaaaaaggtcagtgatgtcctaaagctcttcgaggatggcgagatggctaaatatgtccaaggagatgccattgggtacgagggattccagcaattcctgaaaatctatctcgaagtggataatgttcccagacacctaagcctggcactgtttcaatcctttgagactggtcactgcttaaatgagacaaatgtgacaaaagatgtggtgtgtctcaatgatgtttcctgctacttttcccttctggagggtggtcggccagaagacaagttagaattcaccttcaagctgtacgacacggacagaaatgggatcctggacagctcagaagtggacaaaattatcctacagatgatgcgagtggctgaatacctggattgggatgtgtctgagctgaggccgattcttcaggagatgatgaaagagattgactatgatggcagtggctctgtctctcaagctgagtgggtccgggctggggccaccaccgtgccactgctagtgctgctgggtctggagatgactctgaaggacgacggacagcacatgtggaggcccaagaggttccccagaccagtctactgcaatctgtgcgagtcaagcattggtcttggcaaacagggactgagctgtaacctctgtaagtacactgttcacgaccagtgtgccatgaaagccctgccttgtgaagtcagcacctatgccaagtctcggaaggacattggtgtccaatcacatgtgtgggtgcgaggaggctgtgagtccgggcgctgcgaccgctgtcagaaaaagatccggatctaccacagtctgaccgggctgcattgtgtatggtgccacctagagatccacgatgactgcctgcaagcggtgggccatgagtgtgactgtgggctgctccgggatcacatcctgcctccatcttccatctatcccagtgtcctggcctctggaccggatcgtaaaaatagcaaaacaagccagaagaccatggatgatttaaatttgagcacctctgaggctctgcggattgaccctgttcctaacacccacccacttctcgtctttgtcaatcctaagagtggcgggaagcaggggcaaagggtgctctggaagttccagtatatattaaaccctcgacaggtgttcaacctcctaaaggatggtcctgagatagggctccgattattcaaggatgttcctgatagccggattttggtgtgtggtggagacggcacagtaggctggattctagagaccattgacaaagctaacttgccagttttgcctcctgttgctgtgttgcccctgggtactggaaatgatctggctcgatgcctaagatggggaggaggttatgaaggacagaatctggcaaagatcctcaaggatttagagatgagtaaagtggtacatatggatcgatggtctgtggaggtgatacctcaacaaactgaagaaaaaagtgacccagtcccctttcaaatcatcaataactacttctctattggcgtggatgcctctattgctcatcgattccacatcatgcgagagaaatatccggagaagttcaacagcagaatgaagaacaagctatggtacttcgaatttgccacatctgaatccatcttctcaacatgcaaaaagctggaggagtctttgacagttgagatctgtgggaaaccgctggatctgagcaacctgtccctagaaggcatcgcagtgctaaacatccctagcatgcatggtggctccaacctctggggtgataccaggagaccccatggggatatctatgggatcaaccaggccttaggtgctacagctaaagtcatcaccgaccctgatatcctgaaaacctgtgtaccagacctaagtgacaagagactggaagtggttgggctggagggtgcaattgagatgggccaaatctataccaagctcaagaatgctggacgtcggctggccaagtgctctgagatcaccttccacaccacaaaaacccttcccatgcaaattgacggagaaccctggatgcagacgccctgtacaatcaagatcacccacaagaaccagatgcccatgctcatgggcccacccccccgctccaccaatttctttggcttcttgagctaagggggacacccttggcctccaagccagccttgaacccacctccctgtccctggactctactcccgaggctctgtacattgctgccacatactcctgccagcttgggggagtgttccttcaccctcacagtatttattatcctgcaccacctcactgttccccatgcgcacacacatacacacaccccaaaacacatacattgaaagtgcctcatctgaataaaatgacttgtgtttcccctttgggatctgctaaaaaaaaaaaaaaaaaaaaaaaaaaaaaaa

SEQ ID NO: 1571 - DNA, 4233 bp, Homo sapiens
agcgggcttgcagcgtcggtttccaaggactgtaacgccttcaaccgcccgccgcgatagagtgcccacgaccctgcctcgggaatcccgctctgcaccgccccaccagacccggactcggagccgcgagcggcccgagatgagcagcaatgactcctcccttatggctgggatcatttactatagccaggaaaagtacttccaccatgtgcagcaggctgcagctgtgggcctggaaaaattcagcaatgaccctgtgttgaagttctttaaagcctatggagtcctcaaagaagagcacatccaggatgccatcagtgacctggaaagcatcaggcatcacccagacgtgtccctgtgctccaccatggccctcatttatgctcacaaaagatgtgaaatcattgaccgagaagcaattcaggagcttgagtacagcctgaaggaaatacgcaagacagtcagtgggactgcactgtactatgctggccttttcctctggctcataggccgccatgacaaggccaaagagtacattgaccgcatgctgaagatttctagaggcttcagagaggcctatgtgctcagaggctggggtgacctgacctcagacaagccccacactgcgaagaaagccattgagtacctggaacaaggaattcaggacaccaaagatgtgctggggctgatgggaaaggcaatgtacttcatgatgcagcagaactactcagaggccctggaggtggtgaaccagatcactgtgacttcagggagcttcctgccagccctcgtcctgaagatgcagctgttcttagctcggcaggactgggagcagacagtagaaatgggacacagaatcctagaaaaagatgagagcaatattgatgcctgccaaattctaaccgtgcatgagcttgcaagagaaggaaacatgaccacagtaagttctttgaagactcagaaggctaccaatcacgttagaaatctgattaaggcactagagacaagggaacccgaaaatccaagcctccatcttaaaaaaattattgtggttagccgactgtgtgggagtcaccaggtgattctagggctagtgtgtagtttcatcgagcgcaccttcatggccaccccctcgtatgtccatgtggccacagaactgggctatctcttcatcctgaagaaccaagtgaaagaggccttgctgtggtattcagaagccatgaaactggacaaggatggcatggctggtttgacagggatcatcttgtgtcatatcttagaaggccacctggaggaagctgagtaccggctggaattcctgaaggaggtgcagaagtcccttgggaagtctgaggtgctaattttcctccaagccctcctgatgtccaggaagcacaagggggaggaagagaccacagcgctcctgaaggaggcagtggagcttcacttctccagcatgcaaggcatccctcttggctctgagtactttgaaaagctggacccgtacttcctggtctgcattgctaaggagtacttgctcttctgccccaagcagcccaggttaccaggccagatcgtgtctccacttcttaaacaagtcgccgtgatcttgaatcctgtagtcaaagcagcaccagctctgatcgaccccctgtatttgatggctcaggtcaggtattactcagagctagagaatgcccagagcatcctgcagcgttgcctggagctggaccccgcctccgtggatgcccatctcctcatgtgtcagatctacttggctcagggcaactttggcatgtgcttccactgcttagagctgggtgtcagccacaacttccaggtccgagatcaccccctctaccacctcatcaaggccagggccctcaacaaggctggagactatccagaggccataaagacgctgaaaatggtcatcaaattgccagctctgaagaaggaagaaggcagaaagttcctcaggccctctgtgcagcctagccagcgggcatccatcttattggaactggtggaggccctccggctgaatggggagctacatgaggccaccaaggtcatgcaggacaccatcaatgagttcggtggcacaccagaagagaaccgcatcaccattgccaacgtggacttggtcctgagcaagggcaatgtggacgtggcgctgaacatgctaaggaacatcttgcccaagcagtcctgctatatggaagccagagagaagatggccaacatctacctgcagaccctcagagacaggcgcctctacatcagatgctaccgtgagctctgtgaacatctgcctggcccccacaccagcctgctactgggcgatgccttaatgagcattctggagcccgagaaggccctggaggtctatgatgaggcctatagacagaacccacatgacgcctccctggccagcagaattgggcacgcttatgtgaaggcccaccagtatactgaggcaattgagtattatgaggctgcccagaagattaatggacaggactttctgtgctgcgatctgggcgaactgctcctgaagttaaagaaggtcaataaagcagaaaaagttttgaagcaggcactggaacatgacattgtccaagacatcccatccatgatgaatgatgttaagtgcctgcttttgctggcaaaggtttacaagagccataaaaaagaagctgtgatagaaactttgaacaaggccttggacctccagtctcggatactgaagcgagttccactggagcaaccagaaatgattccctcccagaagcaactggcagcctctatctgcatccaatttgcagagcactacctggcagagaaagagtatgacaaggcggtacagtcttataaggatgtcttctcctacttgccaactgacaataaggtgatgctggagctggcgcagctctacctgctccaggggcacctggacctgtgtgagcagcactgtgccatcctcctgcagactgagcagaaccatgagaccgcttctgtgttgatggctgacctgatgtttagaaaacagaaacatgaagcggccatcaatctttaccaccaagtcttggagaaagcgccagacaattttttggtattgcataaattaatcgatctgctaagaagaagtggaaaacttgaagacattcctgccttctttgaattggccaagaaggtgtctagccgggtgcctttggaaccagggttcaattactgcagaggtatctactgctggcacatagggcagcccaacgaagccttaaagttcctgaacaaggcacgcaaggacagcacttggggccagagcgccatctaccacatggtgcagatctgtctgaatccagacaacgaggttgtgggcggagaggcttttgagaaccagggagctgagagcaactacacagagaagaaggagttggagcagcagggtgtgagcaccgccgagaaactgctgcgtgagttttacccacattcagactccagccagacccagctgcggctgctgcagggcctctgccggctggccaccagggagaaggctaacatggaggctgcgctgggcagcttcatccagatagcgcaggctgagaaggacagcgtccctgccctgctggccttggcacaagcctacgtgttcctgaagcagatccccaaggcgcgtatgcagttgaagcgcctggccaagaccccctgggtgctgagtgaggctgaggacctggagaagagctggctcctgctggctgacatttactgccagggcagcaagttcgacctcgccttagaactgctgcggcgctgtgtgcaatacaacaagtcctgctacaaggcctatgagtacatgggcttcatcatggagaaggagcagtcctacaaggatgcagtcaccaactacaaactggcctggaagtacagtcatcacgccaaccctgccattggtttcaaacttgctttcaactacctgaaggacaagaaatttgtggaggccatcgaaatctgcaacgatgtcctcagggagcaccccgactaccccaagatcagggaggaaattttggaaaaggcccgaaagtccctgaggccctagctggggtcaaggggcctagaccagtagaagccatcaacctactgaagttgtgtggagggatggaaagtgggtcagtggagaagggattcagaaaatgacacattcttccccaaaaaaaaaaaaaaaaaaaa

SEQ ID NO: 1572 - DNA, 2300 bp, Homo sapiens; identical to SEQ ID NO: 754

SEQ ID NO: 1573 - DNA, 1008 bp, Homo sapiens
atggaatcatctttctcatttggagtgatccttgctgtcctggcctccctcatcattgctactaacacactagtggctgtggctgtgctgctgttgatccacaagaatgatggtgtcagtctctgcttcaccttgaatctggctgtggctgacaccttgattggtgtggccatctctggcctactcacagaccagctctccagcccttctcggcccacacagaagaccctgtgcagcctgcggatggcatttgtcacttcctccgcagctgcctctgtcctcacggtcatgctgatcacctttgacaggtaccttgccatcaagcagcccttccgctacttgaagatcatgagtgggttcgtggccggggcctgcattgccgggctgtggttagtgtcttacctcattggcttcctcccactcggaatccccatgttccagcagactgcctacaaagggcagtgcagcttctttgctgtatttcaccctcacttcgtgctgaccctctcctgcgttggcttcttcccagccatgctcctctttgtcttcttctactgcgacatgctcaagattgcctccatgcacagccagcagattcgaaagatggaacatgcaggagccatggctggaggttatcgatccccacggactcccagcgacttcaaagctctccgtactgtgtctgttctcattgggagctttgctctatcctggacccccttccttatcactggcattgtgcaggtggcctgccaggagtgtcacctctacctagtgctggaacggtacctgtggctgctcggcgtgggcaactccctgctcaacccactcatctatgcctattggcagaaggaggtgcgactgcagctctaccacatggccctaggagtgaagaaggtgctcacctcattcctcctctttctctcggccaggaattgtggcccagagaggcccagggaaagttcctgtcacatcgtcactatctccagctcagagtttgatggctaa

SEQ ID NO: 1574 - DNA, 1678 bp, Homo sapiens; identical to SEQ ID NO: 1197

SEQ ID NO: 1575 - DNA, 4934 bp, Homo sapiens
ttttttttttttttttttttttttttttcctttcccctccccctccctctccaagccggaggggtcctgaggtgacagcgcctgcaactgaaatttcagcagcgggagaagatggacaagagaaagctcgggcgacggccatcttcatccgaaatcatcacagaaggaaaaaggaaaaagtcatcttctgatttatcggagataagaaagatgttaaatgcaaaaccagaggatgtccatgttcaatcaccactgtccaaattcagaagctcagaacgctggactctccctttgcagtgggaaagaagcctaaggaataaagtcatctctctagaccataaaaataaaaaacatatccgagggtgtcctgttacttccaagtcatcaccagaaaggcaactcaaagttatgttgacgaatgtcctatggacggatttaggacgaaaattcagaaagaccctacctagaaacgatgctaatttatgtgatgccaacaaggtgcaatcagactcattgccttcgacatctgttgacagcctagagacatgtcaaaaattagaacctcttcgccaaagccttaatttatctgaaaggatacccagagttatattgacgaatgtcctgggaacggagttaggaagaaaatacataaggaccccacctgtaactgagggaagtttgagtgatacagacaacttgcaatcagagcaactttcttcatcatctgatggcagcctagaatcttatcaaaatctaaaccctcacaagagctgttatttatctgaaaggggctcacaacgaagtaagacagtagatgacaattctgcaaagcagactgcgcacaataaagaaaaacgaagaaaggatgatggcatttctcttttaatatctgatactcagcctgaagaccttaacagtggaagtagaggttgtgatcatctcgaacaggaaagcagaaacaaggatgttaaatattctgattcaaaagtggaactcactctgatttccaggaagacaaagagaaggcttagaaataatttacctgattctcaatattgtacttctttggataagtcaacagaacagacaaaaaaacaagaagatgactcaacaatatccactgagtttgaaaagccaagtgaaaactatcatcaggatccaaaactgcctgaagaaattacaactaaacctacaaaaagtgattttactaaactatcctcacttaacagtcaggagttgactttgagtaatgccaccaaaagtgcctctgccggttcaaccactgaaaccgttgagaactctaattccattgatattgtggggatttcttccctggttgagaaggatgagaatgagttgaataccatagaaaagcctattctaagaggacataatgaagggaaccaatcactgatctcagctgaaccaattgttgtttccagtgatgaagaaggacctgttgaacataaaagttcagaaattcttaagttacaatctaagcaagaccgtgagacaactaatgaaaatgagagtacttctgaatcagcattgttagaactaccattgattacatgtgaatctgtacagatgtcatctgaattatgcccatataatcctgtcatggagaacatttccagtattatgcctagtaatgagatggatctacaactggattttatatttacttctgtttatattggtaaaataaaaggagcttctaaaggttgtgttacaatcacaaaaaaatatattaagatcccatttcaagtgtccctgaatgagatttcattgctagtggataccacacatttaaagcggtttgggttatggaaaagtaaggatgataatcacagtaaaaggagtcatgctattcttttcttctgggtctcttcagattatcttcaagagattcagacccaattagaacactctgtattaagccagcaatcaaaatctagtgaattcattttccttgaactacacaatcctgtttcacaaagagaagaattgaagctgaaagatattatgacggaaataagtataatcagtggagaattagagctttcttacccgttgtcttgggttcaggcatttcctttgtttcagaacctctcttcaaaagaaagttcttttattcattattactgtgtttcaacttgttctttccctgctggtgttgctgttgctgaagaaatgaagctgaaatcagtatctcagccctcaaacacagatgcggccaagcctacttacaccttcctgcagaagcaaagtagcggttgctactccctttctattacatctaatccagatgaagaatggcgagaagtcaggcacactggacttgttcagaagttgattgtatatcctccaccacctactaaggggggattaggagtaactaatgaagatctggagtgtttagaagaaggagagtttcttaatgatgtaatcattgatttttaccttaagtatcttatattggagaaggcatcagatgaacttgttgaacgaagtcacatttttagtagctttttctataaatgcttgacaagaaaggaaaataatttaacagaagataatccaaatctttcaatggcacagagaagacataaaagagtaagaacatggactcgtcacataaacatttttaataaagattacatctttgtacctgtaaatgagtcgtctcactggtatctcgcagtcatttgttttccatggttagaagaagctgtgtatgaagattttccacaaactgtatcccagcagtcccaggctcagcagtcccaaaatgacaacaaaacaatagataatgatctacgtactacttcgacactgtctttgagtgcagaggattcccaaagtaccgagtcgaatatgtcagtaccaaagaaaatgtgtaaaaggccatgtattcttatactagactccttgaaagctgcttctgtacaaaacacagttcagaatttacgagagtatttagaggtagagtgggaagttaaactaaaaactcatcgtcaattcagcaaaacaaacatggtggatctatgccctaaagttcctaaacaggacaatagcagtgattgtggagtatatttattgcagtatgtggaaagcttcttcaaggatcctattgttaactttgaacttccaattcatttggagaagtggtttcctcgtcatgtaataaagaccaaacgggaagatattcgagagctcatcttgaaacttcatttacagcaacagaagggcagcagtagctagttaatctgtacaaacatgacacagatgttctctaagattactggaaagcctcttaccagcatttgtgttagccagctcacagagaagaaaataacttgcagtagttttataataagtcattggaacattatttaaaatatgtaggacacattattagaattgttgggatctcatagatggaatgggaatgggggtgatatagataaacttactagatataaattaaaattttataaatatttcatatttttctgagtaaatatgattggattatgcaacagcatatgtaatatgggaatgttttgtagataataaaacttacatgatctgtacttccacgtgactgggtgctgaggggagttaaagcctccctggtgccagccccagtgcttgtcaaatttgctgacaggtcacatcatattgtaattctattctttgcagctcaagcatgcagtatgaatactgtgtattttttaaaaaaataatttagtatcaaggcttcagaaaatgccatttacggcatcccttctgtatgtaacaaaaagacattcataatgttaggaagatgataaaaattcgctcttttaaagtgcagcttattattctcaattgctaaatacgattactctgctttttttttttcatttcttttgatgtcatatgtgagtatcttataatttagttcatttgttcagggtaaaatttgaaacaaaaaattttacctgtgcaaaatagttttttaaaaattatacatgtagctcaacttgaggtactgctatataaatattcactcacattatcacggaatttatgtatagtttctctaatatagaagataaaattggtgtcctcataactttaacaaagaaaaccctcagtcctatttattaatgggtagaattaaatatataattttatagctcagtttacccagtattcatctgcaaagccagattgctctcattgcttttatatttttaaattgtagcttttagagacctatgatcctcatggaacttaattttttattaaatattcaggtaacagttctgaattcatgtgataatggtggcattatatatgattaaacacttcagaactttctaatgttatcaggagtattttgagggagatatgattatattgtattttctcagataagaaaaatgttttttaacaatattattttaatctgttttaagcatctcttagatttacattataactacataaagcagtgaagcaaaggcaaattaagataaagctagaaagtctgaacattttatttcaaaatcatacgaatcggggtcagttaagcctcagtattcttagcttttgttgattttggcactatctttatattattaaatatatttgttgtttggatatttcatataaagatggctataattacatatttcattcccaatttgtgtgtgttggggggtacttttaaaggtgactattgttttgtacatctaattttgggaaagcaagtctataagacatcttgtgatttcttaatgtttttgtttgtatgtttttcaaagatatcactgtcctttatcatgttttgaagattgtttaaaattcattttcctaaattaatgtgcaagtaatgttttgaggatatcagtgttttatattaaacatatttccaattcattaaa

SEQ ID NO: 1576 - DNA, 2932 bp, Homo sapiens
ggctggctgcggcggccggggaggccggggaggccgcggcgcggtcactgcgagccgagccgagccgcgccgagccgcgccgatcgccatccggcctcggcactcgcgcgcgatcccggccggcggcgcggcccggcgggccaggcggcgccacagcccatggagctcgagaacatcgtagcgaacacggtgctactcaaggcccgggaaggtggcggtggaaatcgcaaaggcaaaagcaagaaatggcggcagatgctccagttccctcacatcagccagtgcgaagagctgcggctcagcctcgagcgtgactatcacagcctgtgcgagcggcagcccattgggcgcctgctgttccgagagttctgtgccacgaggccggagctgagccgctgcgtcgccttcctggatggggtggccgagtatgaagtgaccccggatgacaagcggaaggcatgtgggcggcagctaacgcagaattttctgagccacacgggtcctgacctcatccctgaggtcccccggcagctggtgacgaactgcacccagcggctggagcagggtccctgcaaagaccttttccaggaactcacccggctgacccacgagtacctgagcgtggccccttttgccgactacctcgacagcatctacttcaaccgtttcctgcagtggaagtggctggaaaggcagccagtgaccaaaaacaccttcaggcaataccgagtcctgggcaaaggtggctttggggaggtgtgcgcctgccaggtgcgggccacaggtaagatgtatgcctgcaagaagctagagaaaaagcggatcaagaagcggaaaggggaggccatggcgctgaacgagaagcagatcctggagaaagtgaacagtaggtttgtagtgagcttggcctacgcctatgagaccaaggacgcgctgtgcctggtgctgacactgatgaacgggggcgacctcaagttccacatctaccacatgggccaggctggcttccccgaagcgcgggccgtcttctacgccgccgagatctgctgtggcctggaggacctgcaccgggagcgcatcgtgtacagggacctgaagcccgagaacatcttgctggatgaccacggccacatccgcatctctgacctgggactagctgtgcatgtgcccgagggccagaccatcaaagggcgtgtgggcaccgtgggttacatggctccggaggtggtgaagaatgaacggtacacgttcagccctgactggtgggcgctcggctgcctcctgtacgagatgatcgcaggccagtcgcccttccagcagaggaagaagaagatcaagcgggaggaggtggagcggctggtgaaggaggtccccgaggagtattccgagcgcttttccccgcaggcccgctcactttgctcacagctcctctgcaaggaccctgccgaacgcctggggtgtcgtgggggcagtgcccgcgaggtgaaggagcaccccctctttaagaagctgaacttcaagcggctgggagctggcatgctggagccgcccttcaagcctgacccccaggccatttactgcaaggatgttctggacattgaacagttctctacggtcaagggcgtggagctggagcctaccgaccaggacttctaccagaagtttgccacaggcagtgtgcccatcccctggcagaacgagatggtggagaccgagtgcttccaagagctgaatgtctttgggctggatggctcagttcccccagacctggactggaagggccagccacctgcacctcctaaaaagggactgctgcagagactcttcagtcgccaaaggattgctgtggaaactgcagcgacagcgaggaagagctccccacccgcctctagcccccagcccgaggcccccaccagcagttggcggtagcagctactccgagcgccgtttacagttttgcacagtgatcttccccattgtccactcaagtcgtggcctggggaacacagacggagctgtccccagtgtcctccgtccctcagcccctggcctggctgagtttggcagggcctgggccatccctgggacaaaggtgcgtcccttcagctcttctccgtggagctcggggctttctgtatttatgtatttgtacgaatgtatatagcgaccagagcattcttaattcccgccgcagacctggcgcccccgccttggctcctgggggcagccagccctggctgggagagcgggagctggcagaggagccactgccaaactcaaggctcctctggcccagcttggatggctgagggtggtcacacccctgagccttcagcactgtgctggccaccccggcctctgagtaagactcgtgcctccccctgctgccctgggctcaggctgctaccctctggggcccaaagctgtcccttctcagtgcttgtcagcgctgggtctggggcctctgtatgccctaggcctgtgccaaagtggccagagattgggctgcctgtgatacccatcagcccactgccccggccggcccagataggtctgcctctgccttccagctcccacagcctggtccctgatactgggctctgtcctgcagacacctctttcagaaacgcccaagcccagcccctaggagggggtggggcatccctggtcaaccctcaaacattccggactcccctcataacaatagacacatgtgcccagcaataatccgccccttcctgtgtgcgcctgtggggtgcgtgcgcgcgcgtgtgtacctgtgtgggtgaaggggatagggcgaggctgtgcctgtgccccaggtcccagccctggcccttcccagactgtgatggccatcctggtcccagtgttagggtagcatgggattacagggccctgttttttccatatttaaagccaatttttatta

SEQ ID NO: 1577 - DNA, 1983 bp, Homo sapiens
gccggcgcagcggcctgggctgggatgtgaggagcggcgggttccgggctccgggctctgggtggcggcggctgtgagcggcggcactgcggcgcaggccagcgggcgccgtcggcggctggccctgtcggccgcgggatgaggaagcggaccgagcccgtcgccttggagcatgagcgctgcgccgccgcgggctcgtcctcctccggctcggccgccgcggcgctggacgccgactgccgcctgaagcagaacctacgcctgacgggcccggcggcggctgagccgcgctgcgcagccgacgcgggaatgaagcgggcgctgggcaggcgaaagggcgtgtggttgcgcctgaggaagatacttttctgtgttttggggttgtacattgccattccatttctcatcaaactatgtcctggaatacaggccaaactgattttcttgaatttcgtaagagttccctatttcattgatttgaaaaaaccacaggatcaaggtttgaatcacacgtgtaactactacctgcagccagaggaagacgtgaccattggagtctggcacaccgtccctgcagtctggtggaagaacgcccaaggcaaagaccagatgtggtatgaggatgccttggcttccagccaccctatcattctgtacctgcatgggaacgcaggtaccagaggaggcgaccaccgcgtggagctttacaaggtgctgagttcccttggttaccatgtggtcacctttgactacagaggttggggtgactcagtgggaacgccatctgagcggggcatgacctatgacgcactccacgtttttgactggatcaaagcaagaagtggtgacaaccccgtgtacatctggggccactctctgggcactggcgtggcgacaaatctggtgcggcgcctctgtgagcgagagacgcctccagatgcccttatattggaatctccattcactaatatccgcgaagaagctaagagccatccattttcagtgatatatcgatacttccctgggtttgactggttcttccttgatcctattacaagtagtggaattaaatttgcaaatgatgaaaacgtgaagcacatctcctgtcccctgctcatcctgcacgctgaggacgacccggtggtgcccttccagcttggcagaaagctctatagcatcgccgcaccagctcgaagcttccgagatttcaaagttcagtttgtgccctttcattcagaccttggctacaggcacaaatacatttacaagagccctgagctgccacggatactgagggaattcctggggaagtcggagcctgagcaccagcactgagcctggccgtgggaaggaagcatgaagacctctgccctcctcccgttttcctccagtcagcagcccggtatcctgaagccccggggggccggcacctgcaatgctcaggagcccagctcgcacctggagagcacctcagatcccaggcggggaggcccctgcaggcctgcagtgcccggaggcctgagcatggctgtgtggaaagcgtgggtggcaggcatgtggctctccttgccgcccctcaacctgagatcttgttgggagacttaatggcagcaggcagccatcactgcctgcttgatgctgcactgagctggacagggggagtccgggcaggggactcttggggctcgggaccatgctgagctttttggcaccacccacagagaacgtggggtccaggttctttctgcaccttcccagcacatgcagaatgactccagtggttccatcgtcccctcctgccctgtgtacctgcttgcctttctcagctgccccacctcccctgggctggcccactcacccacagtggaagtgcccgggatctgcacttcctcccctttcacctacctgtacacctaacctggccttagactgagctttatttaagaataaaatcgtggtggtggtcaaaaaaaaaaaaaaaaa

SEQ ID NO: 1578 - DNA, 2344 bp, Homo sapiens
gtctcaggggctgaagtttgtgaggtgtagtattgagtcctgtttgagctattgttctctttttcctgaaaaatggcactgtcaaagagggagctggatgagctgaaaccatggatagagaagacagtgaagagggtcctgggtttctcagagcctacggtggtcacagcagcattgaactgtgtggggaagggcatggacaagaagaaggcagccgatcatctgaaaccttttcttgatgattctactctccgatttgtggacaaactgtttgaggctgtggaggaaggccgaagctctaggcattccaagtctagcagtgacaggagcagaaaacgagagctaaaggaggtgtttggtgatgactctgagatctctaaagaatcatcaggagtaaagaagcgacgaataccccgttttgaggaggtggaagaagagccagaggtgatccctgggcctccatcagagagccctggcatgctgactaagctccagatcaaacagatgatggaggcagcaacacgacaaatcgaggagaggaaaaaacagctgagcttcattagcccccctacacctcagccaaagactccttcttcctcccaaccagaacgacttcctattggcaacactattcagccctcccaggctgccactttcatgaatgatgccattgagaaggcaaggaaagcagctgaactgcaagctcgaatccaagcccagctggcactgaagccaggactcatcggcaatgccaacatggtgggcctggctaatctccatgccatgggcattgctcccccgaaggtggagttaaaagaccaaacgaaacctacaccactgatcctggatgagcaagggcgcactgtagatgcaacaggcaaggagattgagctgacacaccgcatgcctactctgaaagccaatattcgtgctgtgaagagggaacaattcaagcaacaactaaaggaaaagccatcagaagacatggaatccaataccttttttgacccccgagtctccattgccccttcccagcgccagagacgcacttttaaattccatgacaagggcaaatttgagaagattgctcagcgattacggacaaaggctcaactggagaagctacaggcagagatttcacaagcagctcgaaaaacaggcatccatacttcgactaggcttgccctcattgctcctaagaaggagctaaaggaaggagatattcctgaaattgagtggtgggactcttacataatccccaatggctttgatcttacagaggaaaatcccaagagagaagattattttggaatcacaaatcttgttgaacatccagcccagctcaatcctccagttgacaatgacacaccagttactctgggagtatatcttaccaagaaggaacagaaaaaacttcggagacaaacaaggagggaagcacagaaggaactacaagaaaaagtcaggctgggcctgatgcctcctccagaacccaaagtgagaatttctaatttgatgcgagtattaggaacagaagctgttcaagaccccacgaaggtagaagcccacgtcagagctcagatggcaaaaagacagaaagcgcatgaagaggccaacgctgcccgaaaactcacagcagaacagagaaaggtcaagaaaattaaaaagcttaaagaagacatttcacagggggtacacatatctgtatatagagttcgaaatttgagcaacccagccaagaagttcaagattgaagccaatgctgggcaactgtacctgacaggggtggtggtactgcacaaggatgtcaacgtggtagtagtggaagggggccccaaggcccagaagaaatttaagcgtcttatgctgcatcggataaagtgggatgaacagacatctaacacaaagggagatgatgatgaggagtctgatgaggaagctgtgaagaaaaccaacaaatgtgtactagtctgggagggtacagccaaagaccggagctttggagagatgaagtttaaacagtgtcctacagagaacatggctcgtgagcatttcaaaaagcatggggctgaacactactgggaccttgcgctgagtgaatctgtgttagagtccactgattgagactactgcaagcccttgcctctcctcccttgcctttgtctcttcagtcctctcacttattctatttcccaaccccctcccacttgtttgtgtgatctcagaactgtgccaagcagacactgggacaaagggagaatatcttgctcccctcctgagtcagcctggtgttgccctttattccccttatgtgcatatgattaaagagttatttttaaaaaaa

SEQ ID NO: 1579 - DNA, 2600 bp, Homo sapiens
aggggtggttgctgcttttgctacatgacttgccagcgcccgagcctgcggtccaactgcgctgctgccggagcgctcagtgccgccgctgccgcccgcgccccccgcgccccgttcggcacccaccggtcgccgccgcccgccgcgccgctgtcccgctcccgcgccgccgccgccgtttccccccgacgactgggtgatgctggacatgggagataggaaagaggtgaaaatgatccccaagtcctcgttcagcatcaacagcctggtgcccgaggcggtccagaacgacaaccaccacgcgagccacggccaccacaacagccaccacccccagcaccaccaccaccaccaccaccatcaccaccacccgccgccgcccgccccgcaaccgccgccgccgccgcagcagcagcagccgccgccgccgccgcccccggcaccgcagcccccccagacgcggggcgccccggccgccgacgacgacaagggcccccagcagctgctgctcccgccgccgccaccgccaccaccggccgccgccctggacggggctaaagcggacgggctgggcggcaagggcgagccgggcggcgggccgggggagctggcgcccgtcgggccggacgagaaggagaagggcgccggcgccgggggggaggagaagaagggggcgggcgagggcggcaaggacggggaggggggcaaggagggcgagaagaagaacggcaagtacgagaagccgccgttcagctacaacgcgctcatcatgatggccatccggcagagccccgagaagcggctcacgctcaacggcatctacgagttcatcatgaagaacttcccttactaccgcgagaacaagcagggctggcagaactccatccgccacaatctgtccctcaacaagtgcttcgtgaaggtgccgcgccactacgacgacccgggcaagggcaactactggatgctggacccgtcgagcgacgacgtgttcatcggcggcaccacgggcaagctgcggcgccgctccaccacctcgcgggccaagctggccttcaagcgcggtgcgcgcctcacctccaccggcctcaccttcatggaccgcgccggctccctctactggcccatgtcgcccttcctgtccctgcaccacccccgcgccagcagcactttgagttacaacggcaccacgtcggcctaccccagccaccccatgccctacagctccgtgttgactcagaactcgctgggcaacaaccactccttctccaccgccaacggcctgagcgtggaccggctggtcaacggggagatcccgtacgccacgcaccacctcacggccgccgcgctagccgcctcggtgccctgcggcctgtcggtgccctgctctgggacctactccctcaacccctgctccgtcaacctgctcgcgggccagaccagttactttttcccccacgtcccgcacccgtcaatgacttcgcagagcagcacgtccatgagcgccagggccgcgtcctcctccacgtcgccgcaggccccctcgaccctgccctgtgagtctttaagaccctctttgccaagttttacgacgggactgtctgggggactgtctgattatttcacacatcaaaatcaggggtcttcttccaaccctttaatacattaacatccctgggaccagactgtaagtgaacgttttacacacatttgcattgtaaatgataattaaaaaaataagtccaggtattttttattaagcccccccctcccatttctgtacgtttgttcagtctctagggttgtttattattctaacaaggtgtggagtgtcagcgaggtgcaatgtggggagaatacattgtagaatataaggtttggaagtcaaattatagtagaatgtgtatctaaatagtgactgctttgccatttcattcaaacctgacaagtctatctctaagagccgccagatttccatgtgtgcagtattataagttatcatggaactatatggtggacgcagaccttgagaacaacctaaattatggggagaattttaaaatgttaaactgtaatttgtatttaaaaagcattcgtagtaaaggtgcccaagaaattattttggccatttattgttttgtccttttctttaaagaactgtttttttttcttttgtttacttttagaccaaagattgggttctagaaaatgcacttggtatactaagtattaaaacaaacaaaaaggaaagttgtttcagttggcaacactgcccattcaattgaatcagaaggggacaaaattaacgattgccttcagtttgtgttgtgtatattttgatgtatgtggtcactaacaggtcacttttattttttctaaatgtagtgaaatgttaatacctattgtacttataggtaaaccttgcaaatatgtaacctgtgttgcgcaaatgccgcataaatttgagtgattgttaatgttgtcttaaaatttcttgattgtgatactgtggtcatatgcccgtgtttgtcacttacaaaaatgtttactatgaacacacagaaataaaaaataggctaaattcaaaaaaaaaaaaaaaa

SEQ ID NO: 1580 - DNA, 1881 bp, Homo sapiens
ggtggctgaacctcgcaggtggcagagaggctcccctggggctgtggggctctacgtggatccgatggagccgctggtgacctgggtggtccccctcctcttcctcttcctgctgtccaggcagggcgctgcctgcagaaccagtgagtgctgttttcaggacccgccatatccggatgcagactcaggctcggcctcgggccctagggacctgagatgctatcggatatccagtgatcgttacgagtgctcctggcagtatgagggtcccacagctggggtcagccacttcctgcggtgttgccttagctccgggcgctgctgctacttcgccgccggctcagccaccaggctgcagttctccgaccaggctggggtgtctgtgctgtacactgtcacactctgggtggaatcctgggccaggaaccagacagagaagtctcctgaggtgaccctgcagctctacaactcagttaaatatgagcctcctctgggagacatcaaggtgtccaagttggccgggcagctgcgtatggagtgggagaccccggataaccaggttggtgctgaggtgcagttccggcaccggacacccagcagcccatggaagttgggcgactgcggacctcaggatgatgatactgagtcctgcctctgccccctggagatgaatgtggcccaggaattccagctccgacgacggcagctggggagccaaggaagttcctggagcaagtggagcagccccgtgtgcgttccccctgaaaaccccccacagcctcaggtgagattctcggtggagcagctgggccaggatgggaggaggcggctgaccctgaaagagcagccaacccagctggagcttccagaaggctgtcaagggctggcgcctggcacggaggtcacttaccgactacagctccacatgctgtcctgcccgtgtaaggccaaggccaccaggaccctgcacctggggaagatgccctatctctcgggtgctgcctacaacgtggctgtcatctcctcgaaccaatttggtcctggcctgaaccagacgtggcacattcctgccgacacccacacagatggcatgatctcagctcactgcaacctccgccttccagattcaagagattctcctgcttcagcctcccgagtagctgggattacaggcatctgccaccatacccggctaattttgtatttttagtagagacggggtttcaccacgttggccaggctggtctcgaactcctgacctcaagtgatccacctgccttggcctcccaaagtgttgggattataggcgtgagccaccatgcccagcctaatttttgtatttttagtagagatggagtttcaccatgttgcccaggctggtctcaaactcctgccctcaggtgatccacccacctcagcctctcaaagtgctgggattacaggtgtgagccactgtggccgacctactatttttattatttttgagctaggttctcagtctgttggcagactggagtgcaatcatggctcactgcagccttgaactcccagactcaagtgatccttccacctcagcctctggagtagctgggactacagacatgcaccaccacacctggttaattttttatttttattttttgtagagacaggtgtctctctacgttgcccaggctggtctcgaactcctgggctcaagtgatccacccatctccacctcccaaagtgctaggattacaggcgtgagccaccgtacccagcctggtcccatatcatagtgaaatggtgcctgtaaagctctcagcattggcttggcacatgcagttggtactcaataaacggctgttgctatccccaaaaaaaaaaaaaaaaaaaaaaaaa

SEQ ID NO: 1581 - DNA, 423 bp, Homo sapiens
ctgaggcgaacaatggcggagctgggcgaagccgatgaagcggagttgcagcgcctggtggccgccgagcagcagaaggcgcagtttactgcacaggtgcatcacttcatggagttatgttgggataaatgtgtggagaagccagggaatcgcctagactctcgcactgaaaattgtctctccagctgtgtagaccgcttcattgacaccactcttgccatcaccagtcggtttgcccagattgtacagaaaggagggcagtaggccatcccccaggagaatgacagaagcaaaggacttgttactaagcagatttaagggtcagtgggggaaggctatcaacccattgtcagatcagcatcaggctgttatcaagtctgttggtgctaaaaagtaaaagatgaaatgttcaaaaaaaaaaaa
